United States Patent Application Publication US 2019/0348154 A1 - sequence listing, part 130

SEQ ID NO: 496233 - DNA, 1998 bp, Stenotrophomonas maltophilia
atggactcttcatggatcgacgccaccctcgcgtggattgccgctcaccccgtgctggcgggtgccgttatcttcctcatcgccttctgcgatgcggtgatcattctcggcgccatcgtgccggccctgccgctgctgttcgcggtgggcgtgttcatcgggctgggccagatctccgggccgtatgcggtggcggcagccgcactgggcgcattcgccggtgatggcatcagttactggatcgggcgccgctggggtgaccgcctgcgtggcgtgtggcccttcagccgttacccgcagctgctcgaccgcggcgaaaacctgttccgccgcaatgccttcaagagcatcctggtagcacgctacgtgggcgcgatccggccgttcgtgccggccatcgccggcatgatgaaaatgccggccagccgctacatgcaggccagtggcatcgccagcatttcgtgggcggtgctgttcctggcaccgggctgggtgctcggcgaggcctacgacgcggtggccgccgtcgcagggcgcctggtggtggtggtcggcctgctggcagtgatcctcggcctggtctgggccatcgtgctgtacggctaccgctggtcggccgcgcgcatggacaactggctggcgcggctgctggactggtccaaccgacacccgacgctgggccgctacaccgtcggtgtgctggacccgaagcgccgcgagtcggtgccgctggcgatgctggcgctgatgctgctggtgctgggctggggctggttcgcgctgctgaccgtggtggtcgcccatggcgagccgctggcgatcgacctgctggtgcaccaggccatgctggcgctgcgcaatccgctggccgattacccgatggccgcgctggcatcgctgggcgcctggcaggtgttgttgccggccaccgctgcagcgatgggctacctgatctggcgccgccgctggatggcagccgcgcactggctggccgcgcttgccttcggcctggcgttgaccatgctgctcggcgcaacggtggatgtggtgcgaccggtcgatgccagcagtggctttggcttcccgtcggtgtcggtgaccatggccaccatcaccttcggcttcttcgcggtgctgatcgcccgcgagatgcctggccgcacccgtgtctggccgtacctggtgtcgggcatcgtggtcagcctgatcggcttctcgcgcctgtacctgggcgcgcactggctgagcgatgtgatcggcggcatgctgttcggcacgttctggctgctggtgctgggcatcgcctaccgccgccgcttcaaccgctcgttctgggtgaagccggtggcgtggctgttctacggtgtcttcgccgtggcggcgatgtggtacgcgccgcgccacattccggtgaagctggaacgcttcgagccgaccctgccggcggcgcaggcgatggacatgcaggcctggtggcagcacgactgggcgacactgccggcgcgccgcaacgagttcgacgacgaccagcgctggccgctggacgtgcaggtggcgggcccgctggccccgctgcaggcgcagctggaagcacgcggctggaagcggcaggaacaggccggctggcaggaggcgctgctgatgctggacaagaacacgggtgccgacgaactgccggtgctgccagccacgctggacacgcgcgtggaagcgctgttgatggtgcgcccgggtacacaccgcgatgagcgctacgtactgcgcctgtggccagcccctgcgcagttgcaaccgggcagtacgccgctatggctgggcagtgcgcagaccctgcgctacgagcgtcatttcgagtggatcggcatgtggcacccgctgcgtggcgtcgacccggcgctcaacgcagtgaaggacgccgtgcaggacctgccgcagcgcgaggacgtgcacagcgaaaccgggttgccggtgctgcggttgaagaccacaacgccctga

SEQ ID NO: 496234 - DNA, 663 bp, Stenotrophomonas maltophilia
atgccgcattcgccagacacgccctcgcacgccctgaaggccgacagcttcggtcgcatcctccttgtggaagggccggccggcccctttgtacgccgtgatctgggcgccacaccactgtggttgcggctgccagcctggtggctggcccgccgtgaagcacgcgcactgcgccacatccacggcatggccgatgtgccgcagctgctggcgtgggatggacgtcatctcgaccgcagcttcatggccggcgacgccatgtaccagcgtccgcctcgcggtgacctggcctggttccgcgccgcgcgtcgcctgctgcagcagctgcatcgcaatggcgtggcccacaacgatctggccaaggaagccaactggctggtcaccgacgatggccgcccggcgctgatcgacttccagctggcggtgatcggcaacccgcgttcgcgctggatgcgcctgctggcccgtgaggacctgcgccacctgctcaagcacaagcgcatgtactgccgcgagtcgctcaccccggtggaaaagcgggtgctcaagcgcacctcgtgggtgcgcgaactgtggttcgccaccggcaagccggtctaccgcttcgtcacccgccgcatcctgcattgggaagacaacgaggggcaggggccgaagccgtga

SEQ ID NO: 496235 - DNA, 507 bp, Stenotrophomonas maltophilia
gtgagccgtgcgcaggtggtgaccggcccgccgagcgcgggcagcgtcctgcgcccacagctggccggtgccgacttcgtgcacgcctgccaggcgacgacccgtcgcgatgggcgctcggccttgcaggcctatcgcgacatggcggcgaccattcccggctggttcgatgggctgatggcgctgcgcaatcgcggcatgcgcctgctcggcatgaagcacctgggctcgttgcgcgcggtgcaggacatcgcgcagccgcgtccggggcaacggctgggcatcttcaccctgcagtcgctggatgacgatgccatcgtgctggaagacgacgaccgccacctgcgtgtgcagctggccctgcagtggcagggcgatgtgctggaagtggcgacggtagtgcatacgcacaacgcgttcgggcgtgtgtacatgctgccggtcgccccggtgcatcggctgatcgtgccgcatctgctgaggaagcaggtgcaggcgtaccggtag

SEQ ID NO: 496236 - DNA, 213 bp, Stenotrophomonas maltophilia
gtgggattcgtcatttctggatatgagcgtccgccgtatctagggcagcacgcatatcccgtcgagctgcagatgcaggacgcagatggtgctgaactcacgccgattcttcatgcggacgcaaacgaccggctactggagctggagatcattcgttgggatggtggcgagctgatatctccgcagatcgagagcgtggtctgctatgcatga

SEQ ID NO: 496237 - DNA, 573 bp, Stenotrophomonas maltophilia
atgcatgaggtggcgaagaaggattctggtgacgacaagggcaatgtgcagaatgccagcctcgaagagccagtggatgtcgcggaagcgcttgcgatgtatcagcgcttgatgcttgaacgaagcgatgcggcgttcgtcgccgacttcatggtgttctgttggcaggccgttgatcccgggcgcgtcgccgcattggacttgcctggggacgttgtggatgcgtgcgctgatcagctatccctgctgatgcggatggaggatcagcaggatcagcaggatcagcagcgcgcggcgccagctttctggaagcgctacatcgagtgggcggactacgccatcgatttcccgcttgatgaacgcaagcggttcatctgtgaggcacctggctacctggagccagcattttctgtgttcgtggccactggcggtgctgagatgaggtctgaggcgatggagctcctggctgagcactccgggtctggcacagcgagggctgcctatgtcagatcggtgatcgagagtcggctcagctctgaagggtcatatggtcatcaatccgtcggtggctga

SEQ ID NO: 496238 - DNA, 333 bp, Stenotrophomonas maltophilia
atgagtgggtcgcgcaatgatgtgcagtcctgccagacaccgctgcaggcgcttcttgcgaactcgggcggctatgatggcgggcactttgctgcgttcggctacctgctccatgagggtggaagcagtgatgccctcggcccctccgccgatgcgctggtcgatctgagtggcgcggagtacgaggactccgtgcgtggcatcgagccaggcctgtactttgtcatgctccaggggatgtattacgcggggggggcagtgaacggtgcctgcgtgggcgaactgagggcgcctttcatatcgcgcacatcaaaggtcgatgaggttgattga

SEQ ID NO: 496239 - DNA, 162 bp, Stenotrophomonas maltophilia
atgctcggctctacatttccattcctggtacagcacttccacgccatcaccacgggcaagacgtctcacctgatccaacgtatccaccgccatgacggagtacgtgacctccacaccggagtgcaggcgtccctcggcagggtcctcatcagtctctactga

SEQ ID NO: 496240 - DNA, 684 bp, Stenotrophomonas maltophilia
atgcgccgttcccgcctgttgctgcctgccctggggcttgccctgctgactgcctgccagggccgttcgccggaacccggcaaggagccgcctgccggtgacacccccagcgcagagaaggccgccgccgacggcaagctgcgctggagcgaggcagtggtgtgggatggcgacctcaacgcctgccgccagggcgagaacgccgccacgcgtgattgcctgcgcgatgcgatgcgcgccggcggcgccagcgccgatgcgatcaccgccgccgaacagctgtccaccggcggcgagctggcctacgtgacggcctggcacgagaacgaaggcctgggcattgccacggtcgaatatccgttccgcgccaacaccaacgagggcacccgcctggtcgacgccaccggcaagcgcattgatgtggatgccgtgcagctggacgacaccctgcgtgccgatcccaccgtgcaggccctgctgaaggaccacccgcaggccacgccgttcgcaccggcgcagtcggccggggccacgccgctggagaacgacggcatccgcgtgatgtaccgcacgccgctgcgcgactgccacgcctgcccggatgtgggccagctgcagatcgcgtacgacttcgacgccaagcgcaacttcattggccagcaggtggtgccggcgacgccgtaa

SEQ ID NO: 496241 - DNA, 819 bp, Stenotrophomonas maltophilia
gtgggcagtctgcagggcaaaacgcttttcatcaccggtgcctcgcgcggcatcggcctggccatcgcactgcgcgctgcgcgcgacggcgccaatgtggccattgcggccaagtcatcggtgccgaatccgaagctgccaggcaccatccataccgcggccgaagcggtaacagcagcgggcggccaggggctggcgctgaagtgcgacatccgcgaggaagagcaggtgcacgcggcggttgcggccacggtcgacaccttcggtggcatcgacatcctggtcaacaatgccagcgcgatctggctgcgtggcacgctggatacgccgatgaagcgcttcgacctgatgcagcaggtcaattcgcgcggcagcttcctgtgcgcgcaggcctgcctgccatacctgctgcaggcgccgaacccgcacatcctcactctcgcgccgccgccgagcctggaaccgaagtggtggggcgcgcataccggctacacgctggcgaagatgggcatgagcttcgtcacgctcggcctggccgcggaattcggcccgcagggtgtggcggtgaacgcgctgtggccgcgcacggtgatcgccaccgatgcgatcaacatgattccgggcgtcgatgcggccggctgccgcacgccgcagatcatggccgatgctgcgcacgcggtgctggtgcgcgaggcggcgggtttccacggccagttcctgatcgacgatgacgtgctggcacaggcgggtatcaccgatctgtccggctatgcggtggatccatcgcgtccgttgttgccggatctgttcctggaatga

SEQ ID NO: 496242 - DNA, 993 bp, Stenotrophomonas maltophilia
atgtcacgcactctttccgtcgcggcgctggccgcttcgctgtcgattgtcctggctgcctgcggcggcaaggcacccgcaaccactggcgacgccggcccttccagcacgcccgacgccagcgcggcgccgtccgacgcacagcagcagttgaccgccaagctcaacgcctacatcggctgcttcaacacgctggattcgaagacccacggcagcatcgagtcctatacgcgctggatcaaggacgtcgaggccggcccgagcgggcgcgagacccaggtgtacggtccgttcgagatcagcgattacgacatgaagcagtgcgatggccccgtgaccgaggcgatggctgccaagccggcgctggctgagctcgatgccgctgctggccattaccagcaggcgctgaaggcactggtgccgctcagcaaggacgcgcacgactattacgatcgccaggactacgaagacgaccagttcgccaagggaaagcagctgcacgcgcccttgatggccgccttcaaggagttcgtggctgccagcgaaacgttcaacgccgagctggagcgccagaacgacgccgcccagcgcgagcagctcaaggtattggaacaggccgagggacgcacgcgcgagtactaccgtctggcaatgatgctggaagccaaggccatcatggatctgatgagtgaggatgacttcgatcaggccaaggcgcgcgagcgtctggatgcgttcaaccgcatttccgacgaagcgcatgcgaaggtggctgatcaggagccgggcaagctggactggaacagcttcgagcgtgaagccgagaacttccgtcgcgaaggcaaggagcggctgcagcgcgtcagcgagaaaaagccttacagcgatttcgaacgacgcatgctggattcgccgtcgatggcgccgcgtggctccgccaacaagctgatgcaggaatacaactcgctggttttccagagcaaccgccagtag

SEQ ID NO: 496243 - DNA, 942 bp, Stenotrophomonas maltophilia
ttgaacgcatccacacgcctgattcccgttctcctgcttggcgcgctggccggctgcaacaacccggcggggctggcggtcgccgaccccgggctggggaaggtgaacgcctacatcgagtgttacaacggcgtcgaacagcccatccgcgagggtttccagacctatacgggctggatgaaggatcccgaggccggcccgaccggcaaggaagcgcagccgcgttcacccggcaagctgttgtcgcaccgggtcgactattgcggccagccgctgaccgatgcgctggcaaagacccctgccacgccgctggatgcaccagcgcgacagtaccagcgggcattccaggcactgaacaccctgatcgagcgtgccgatgggtacttcacccgcgaggactatcgtcgcgatggtggcgaagggatgcgcagccagcataccccgctgatgcaggcctatgctgatttcttcaaggccagcgaagcgatggatgctgcgctggaaaagaacgagaacgatcgccgcgccgcccagctgaagcagatcgaggaaagcgaaggccgctcgctggcctattaccacctgcgccttgtcggcgatggcaagcagctggcgatggcgttccagagcgacgcaccggacgttgcggcgttgcgcggccagctggccgactatcaggcgctggtgacggaaatccagaacagtggtgtcggcaaggacgacccgatgtggggtcatgtgcagcgttcggccgacaagctggtgcgtaccgccggtcgcggtgtcgaacgtctggagcagggcaagccgatcaccgccgatgcgttggccgccgagcgcaaggcgtcgggcagctggctcaccaccgatcctgagggcgcgcagtcgacgatcctggatgcctacaacgacctggtgaccaccagcaaccgcatgcgttga

SEQ ID NO: 496244 - DNA, 873 bp, Stenotrophomonas maltophilia
atgcgaccgttttctgccccccagctgaaccccgccaccgagaccggctggcgccgccggtggttcgacatcatctaccgccacgactcgcggccctcgcgcaatttcgacctgatcctggtagtggcgatcgtcgccagcatcctggtggtgatgatcgacagcgtgcagcacctgcatgccgaatggtccaccggcctgtacatcctggaatgggccttcacgatcatcttcaccgccgagtacctgctgcggctggccgtggtcaagcgtccgctgcgttacgcggtgagcatctggggcatcatcgacctgctgtcgatcctgcccgcctacctgtcgatgttcattcctggcgcgcagagcctgctggtggtacgcgcgctgcgcatcctgcgcgtgttccgcatcctcaagctgacccgctacatcgaggaaagcggcgtgctgatgacgtcgctgtggcgcagcaggcgcaaggtgctggtgttcctgttcacggtgatcaccatcaccatcatcgccggcgcgctgatgtacgtgatcgagggccccgaacacggcttcaccaacatcccggccagcatgtactgggcggtggtgaccatggccacggtcggcttcggcgacatcgtgccgcagaccgtgcttggccgcttcgtcacgtcggtgctgatcctgatcggctacagcatcatcgccgtgcccaccggcatctacaccgcggagctggccagcaccatgcgcgaagccgagctggccgcgcgccgcgatgcgcgtggctgcccgcactgcgggctggaaggccacgagccggatgcccggcattgccgcaagtgcgggggtgaactaccggatgcattcagccattga

SEQ ID NO: 496245 - DNA, 1227 bp, Stenotrophomonas maltophilia
atgaccgccgctaccgatccgctgatctccctttcgcactattacctgccggtctacaagccccgtcaggtggtactggagcgaggccagggcgcccgcgtgtgggacagccagggccgtgagttcatcgacctggccgccggcatcgccgtgtgcgggctgggccacaacgatccggacctggtggccgcactggtcgagcaggccggcaagctctggcacaccagcaacgtgttctacagtgcgccgccgctgcacctggccgaggagctggtgaaggccagccgcttcgccgagcgcgtgttcctgtgcaactccggcgccgaagccaacgaagtggcgatcaagatggtccgcaagtgggcctccagccagggccgcccggccgacaagcgggtgatcatcaccttccgtggcagtttccacggccgcaccctgggcgcggtgaccgccactgcccagccgaagtaccaggaaggctacgagccgctgcccggcggcttccgctacatcgatttcaacgatgaagtacagctggaaaccgcgatggccgccggcgacgtggcggcggtgatgctggagccgatccagggcgagggcggcgtgatgccggccaagtccggtttcctcaagcgcgtgcgcgaactgtgcgaccagcacaacgcactgctggtgctggacgagatccaggccggcatgggccgcaccggcacgctgttcgcgcactggcaggacgacgtggtgccggacatggttaccctggccaaggcactcggtggcggcttcccgatcggcgcgatgctggccggcccgaaggtggccgagaccatgcagttcggcgcgcacggcaccacctttggtggcaacccgctggctgctgcggtggcccgcgtggcgctgcgcaagctggcctcggcggagatcgccgccaacgtcagtcgccagtccaaggcgctgcgcgatggcttcgcccgcatcaacgacgagttcggtgtgttcagcgacgtgcgtggtcgtggcctgatgctgggcgcggtgctgagcaaggacttcgccggccaggccggtgcgatcctcgaccacgccgccgagcagggcctgctgaccctgcaggccggcccggacgtgctgcgcttcgtgccgtcgctgaacatcaccgacgaagaagtggccgaaggcctgaagcgcctgcgcgcggcgattgccgcgttcatcgccgcgcgctga

SEQ ID NO: 496246 - DNA, 603 bp, Stenotrophomonas maltophilia
atgcggatcgacctgttgctgctggatgtggatggcgtgctggtgcagtaccagcgcgggcaacgcgtgctgcatctggcccggacactgcaggttccgacgcacgccgtacaggccgcgctgtacgacagcggtctggaagcagcgcatgacaatggcacgctggacggcccggcctatctggcgcagctgggagagcttctgggcacgactgtcgatgtggctgcatggaccgcggcgcgacgggccgccagccatcctcaggcggccgtgttgcaacgattgcaggccctgcaactgccaatcgcggtgctgaccaacaacggcgcgctgatgcagcaggcattgcccaccctgctgccggaactgtttcctgccctgcaggcgcgcgtgttctgcagtgcggatttcggcctgcgcaaacctgcgccggcggtgtttctgcgcacgctggaagcgctgggcgtggcaccttcgcgcacgctgttcgtcgatgacctgttcgccaatgtgcgtggcgcgcgcgctgccggcctgcacgcggaaaccgtgcgcgatggccggggattgggcaaggtgttgaagcgctaccggattgcgtga

SEQ ID NO: 496247 - DNA, 453 bp, Stenotrophomonas maltophilia
atgatgaaggcttggagggtggcagtgggactgggtgcgctgatgctggcgccgtcggcgatggcgcgggtgtgtgcggtgagcatcgacagcaccgaccagatgagcttcagcagccgcgagatcaaggttgccgctgattgcaccgccgtggacctgaccctgcgccataccggcaagctggcggtcaccgcgatgggccacaactgggtgctgacccgcagcgctgattaccagccggtggcgatggcgggcatgcgcatgaccctggctgacagctacctgccgaaggccgacaagcgcgtgctggcgcacaccaaggtgatcggcggcggcgagaccacgcgcgtgcgtttctctacccagggcctgcagaaaggtggcgactacaccttcttctgttcgttccccggccacttcgcgatgatgaagggcaagttcctcttcggttag

SEQ ID NO: 496248 - DNA, 1290 bp, Stenotrophomonas maltophilia
atgaaccacgaccagtcccacgccctgttctcccgcgcccagcaactgctgccgggcggcgtcaattcgccggtacgcgcgttcaaatcggtcggtggcgaaccgttcttcgtcgagcgcgccgacggcgcctacctgtacgacgtcgacggcaaccgctacatcgactacgtcggttcctggggcccgatgatcgtcggccacaaccacccggccgtgcgccaggcggtgaagaaggcgatcgacaacggcctgtccttcggcgcgccgtgcgcagccgaagtgaccatggccgagaccatcacccgcctggtgccgtcgtgcgagatggtgcgcatggtcaactccggcaccgaggccacgctgtcggcgatccgcctggcgcgtggtgcgaccggccgcaaccgcatcgtgaagttcgaaggctgctatcacggccatggcgactcgttcctggtcaaggccggcagcggcatgctgaccctgggcgtgccgacctcgccgggcgtcccggccgggctgagcgaactgaccctgaccctgccctacaacgatttcgaagcggccactgcgctgttcgcgcagcagggtgacgacattgccggcctgatcatcgagccggtggtcggcaacgccaactgcatcccgccgcgcgagggctacctgcagcacctgcgcgaactgtgcacgaagcatggcgcgctgctgatcttcgacgaggtgatgaccggcttccgcgtcgccctcggcggtgcgcaggcgcactacggcatcaccccggacctgaccaccttcggcaagatcattggcggcggcatgccggtcggggcctacggcggccgccgcgagctgatgcagcagatcgccccggccggcccgatctaccaggcaggtacgctgagcggcaacccggtggcgatggccgccggcctggcgatgctggaactgatccagcagccgggcttccacgccgacctggccgagcgcaccgcgcgcctgtgtgccggcctggaagcggccgccgccgaagccggcgtggccgtgaccaccacccgcgtgggcgcgatgttcgggctgttcttcaccagcgagaaggtggagacctatgcgcaggccactgcctgtgacatcccggcgttcaaccgcttcttccatgcgatgctggaccagggcgtgttcctggcgccgtcggcgtacgaagccggtttcctgtccagcgcgcacgacgatgcggtgatcgaggccaccctcgccgctgcacgcgtggcgttcaaggccaccaagggctga

SEQ ID NO: 496249 - DNA, 627 bp, Stenotrophomonas maltophilia
atgacttctgcttccccggcgccccgcggcgtctacctgatcaccccggacgagcccgataccgcatgcctgctggcccgtaccgcgccgctgctggccgctggcgccacctggctgcagtaccgcaacaagaccgccagtgacgcgctgcggcgggagcaggccaccgccctgcaggcgctgtgcgcggaacacggcgtgccgctgatcgtcaacgacgacccggcgctggccaaagccgttggcgcggcgggggtgcacctcggcggcaccgacggtgacatccccagcgcacgcgccctgctcggtgccgaggccatcatcggcgcctcctgctacgaccagctggccaatgcagagaaggccgtggccgccggcgccagctacgtggccttcggcgcgttcttcccgaccacgaccaaggtcaccagcagccgcgcgcataccgacctgctgcggcaaagcgccgcactgggcgtgccgcgggtggcgatcggcggcctgacgccggacaatgtcggtcccatcatcgacgccggcgccgatctggtcgccgtggtcagcagcgtgttcgccgccgaagacccggtcgcgacccagcgcgcctacctcgcccagttcgcgtaa

SEQ ID NO: 496250 - DNA, 225 bp, Stenotrophomonas maltophilia
atggcggcccgtgaatccagccctgattatccgatgagcgatgccacccccaccaccttgcgcacctggatgtgcgtggtctgcggcttcctgtacaacgaagcggagggcctgccggaggagggcatcgcgccggggacgcgctgggaggacattccggagacctggacctgcccggactgcggggtcaccaaggccgatttcgagatggtcgaggtcgattga

SEQ ID NO: 496251 - DNA, 846 bp, Stenotrophomonas maltophilia
atgcaggaccggatcacactccccgactgggatgcactggccgacctcgaagacgaggcgctgccactgttgccgaccgcgctgctgatcgcgcgcgatgaataccccgatctgcagccgtcgacctacgatgcgctgatccagagccatgtcgaccacctccgctcggaagtggagagcatcgacaacagtccattgaagatggcggcgatcaaccgccacctgttcgacgagctgggctacagcggcgaccacgacgagtattacgacccgcgcaacagctacctcaaccaagtattcgagcgccggctgggcaacccgatctcgctggcgctggtgcagatggaagtcgcgcggcggctgggcattccgctcgacggcgtatccttccccggccacttcctggtgcgcctgccggtggacgacggcgtgctggtgatggacccgttcaatggtggtcgcccgctggacgtggacgaactgcgcgaacgcgccaagtcacacctgggcgggcagatgcccgacgaccaggtgctggcgcagattctggacccggcgccggcgcgcgcgatcctgatgcgcatgctgcgcaacctgcacggcgtgtatgccgaagccggcgaatgggaccgcgccgcgcgcagtgccgaccgcctgctgaagctcgccccggagcaggacgatgcgctgcgtgaccgcggcctggcctacctgcaactggagtacctggccggtgcccgccacgacctggggcagtacctgaagcgcaacccggaagccagtgatgcgcagtggctgcgcgagaagctgatcgacctcggcggaccgatgccgcggctgcattga

SEQ ID NO: 496252 - DNA, 447 bp, Stenotrophomonas maltophilia
atgtcgctgttgcgttcgctgctgatgcttccgctgctggccctggccggctgtgccaccgacgcggcccgccattgggtcgaactggatggcgcccgctaccaggtggagctggccaccaacgatgaaacccgcgcgcgcgggctgatgttccgcgaccagatggcggccgaccacggcatgctgttcatccacgaccgcgaagaaatgcaggcgtactggatgaagaacaccaggatcgcgctggacatcctgtacttcgacagccagcgcaggctggtcagccagcagcgcgacgtaccgccgtgctcggccggcgacatgtgcccgccctaccccagcggtggcccggcgcgctacgtgctggaactcaacgccggccaggccgagaagctgcagttgaaggacggcacggagctgaaattcggcccgggcatcgaaaagtaa

SEQ ID NO: 496253 - DNA, 648 bp, Stenotrophomonas maltophilia
atgtccgaagccaagcgcctggccgccgagaaagccatcgaatacgtcgaagacggcatgatcgtcggtgtcggcaccggttccaccgtggcctatttcatcgatgccctggcccgcatccagcaccgcatcaagggcgccgtgtccagctccgagcagagcaccgcgcgcctgaagcagcacggcatcgaagtgatcgagctgaaccacagcggcaacctgtcgctgtacgtggacggcgccgatgagtgcgatccgaacaagtgcctgatcaagggcggcggggccgcactgacccgcgagaagatcatcgccgaggccagcgagcgcttcatctgcatcgtcgacccgagcaagcaggtgccggtgctgggcaggttcccgctgccggtggaagtgatcccgatggcgcgcagcctggtcgcccgccagatccgcgacatgaccggcggccagccgacctggcgcgaaggcgtggtcaccgacaatggcaaccagatcctggacatccacaacctgcagatcaccgatccggaaaagctggagcgcgagctcaaccaactgccgggcgtggtctgcgtgggcctgttcgcgcgccgtcgcgccgacgtggtgatcgtcggcggcgagccgccggtcgtgctctga

SEQ ID NO: 496254 - DNA, 480 bp, Stenotrophomonas maltophilia
atgaccgcccgcaagcgctactggctgatgaagtccgaaccggacgccttctccattgatgacctggccaaggtcaaggtcgaaccctggaacggggtgcgcaactaccaggcgcgcaacttcatgcgcgatggcatgcaggtgggcgacggcatcctgttctaccactccaataccaaggtgccgggcatcgtcggcctggccacggtggccagcaccgcctatccggacgacacccagttcgatccaaaatccgactactacgaccccaagagcacgcgcgagaacccgcgctggatgctggtggacgtggccttcgaccgcaagctgaagcaggtgatcgcgctggacgagatcaagctgcacgccgaggaactgggcgaaggcttcccgctggttgccaagggcaaccgcctgtcggtgttcccggtgactgccgcgcagtggaagctgctgctgtcgctggaaaagaaatcctga

SEQ ID NO: 496255 - DNA, 594 bp, Stenotrophomonas maltophilia
atgaccgacccgcgccaggccctgcgccacgacctgcggcaacgccgccgcgacctttccgccggtgagcgcattgctgccgccgaatcccttgccgatgccctgctcgccctgccgttcgccccgcgcgaaggcgccgtggccggctactgggcgctggatggcgaaatcgccctgcaccgctggcagctgcaactgcccgaaggcctcacctactgcctgccggtgctggccggcgacgtgctgcgcttcgcgccgtggcggccggggcaggcgctgaccagcaaccgctacggcattcccgaaccggacgtagcgctggacgatacgctggaaccggcgcagatggcgctggtggtggccccgctggtgggcttcgacgcacagtgccggcggctgggcatggggggcggctggtatgatcgcagcttcgccttccgccatgaccggccggcgccgccctggctggtcggtgctgcgttcgcggtgcagcaggtcgagtccttgccggtggcgtcgtgggacgtgccggtggatgcgatctgcaccgaagacggcaccctgttcccctccgctgcccccgtgaacgcatga

SEQ ID NO: 496256 - DNA, 297 bp, Stenotrophomonas maltophilia
atgagcgccgaaccggtcagtgtccgcatcctcgatcgtgaatacacggtgggtgtcggcggcgatgaacgcgacagcctgatggccgccgcgcgcctgctcgatgcgcgcatgcgcgaaatccgcggcagcaaccgcatggccgccgtcgaccgcgtcgccgtgctggccgcactgaacctggcccacgaactgcagctgctgcgcgacgagaacgcccgccaggccgtggccctgcagcagacgctggccgacctgaacaggcgcctcgaccgcgcgatcgacggcaccccctag

SEQ ID NO: 496257 - DNA, 222 bp, Stenotrophomonas maltophilia
atggaacccgccgatccccttgcccagctgcaggacttcgccgcccgcgtggaagcgttgctcgaacgcaaccagcgcctggccgaggagaaccgcagcctgcgccaccagcaggaacagctggtggccgagcgttccacgctgctggccaagaacgagcaggcacgctcgcgggtggaagcaatgatcagccggctcaaatccctggagcagcacacatga

SEQ ID NO: 496258 - DNA, 549 bp, Stenotrophomonas maltophilia
atgaccgaacttccctccgtcgacgacgttacccgcgccagccaggaactgggcctgggcgctaccgctgccgagctgcacggtgcgctgtgtggctggctggccgccggtggcgcccccggcaacgactggccggcacgggtgctggccgacgacaacctgccgccggtggctgccgacagcgtgctggggcagctgctgcaggcgaccatcaagcagctggaagaccgcgacttcgccttcgaactgctgctgacagacggcgacgatgtgtccgcgcaggccgatgccatgttcagctggacccgctcgttcctgggtggtttcggcctgggcagcggcggccgtcgcccgaccttgtccgaagagggtgaagaagcgctgaccgacatggccagcctggcacgcgcctccagcgaggatttcgaagcgggtggcgatgatgacgacgaagcactgtcggagatcgaggagttcatccgcgtggcggtactgctgctgcacggtgacgtggtgctggcctcgcgccatcggcagcgcctgaactga

SEQ ID NO: 496259 - DNA, 1329 bp, Stenotrophomonas maltophilia
atggacatcaagcagcgcaccggcatcgcggccggcgaatacaagcgtcggcgccgccagctgatggacatggccggcgaggacgcgatcctggtgctgccggccgcggccgagaaggtgcgcagcctcgatacccattacccgttccgccaggactcggacttccagtacctgagcggtttcccggagccggaggcggtattggtgctgatcccgggccggcgccacggcgaggccatcctgttctgccgcgaacgtgatgccgagcgcgaagcctgggacggcagccgtgccggccaggaaggcgcggtggcgcagtacggcatggacgatgcgtacccgatcgatgatctggacgacatcctgccgggcctgttggaaggccgttcgcgcgtctactaccacttcggtcgcgacgccgatttcgacctgaagctgatcggctgggtcaaccgcgtgcgttcgcaggtgcgccacggcgcgcagccgccgcatgaattccttgaactgggccatctgctgcacgagcagcgcctgttcaagtccggtgcggaagttgcattgatgcaccacgccgcccagatcagcgtgcgtgcacatctggcggcgatgaaggctgccagggccggcatccacgaatacgagctgcaggccgagctggaacgcgtgttccgcgccagcgatgcggtgccggcgtattgcagcatcgtcggtgcgggccgcaacggttgcatcctgcattaccgggacaacaacgcgcgttcgcgcgacggcgagctggtgctgatcgacgccggtgccgagtaccgtggctacgccagcgacatcacccgcacgtttccggtgaatggccgcttcagcgccgagcagcgtgcactgcacgacctggtcggcgatgcacaggccgccgcgctggcccaggccaggccgggcgtgccgtacgaggccggtcacctggccgcggtgcagaccctgaccgagggcctgctgcggctgggcctgctgaaggggacgctggaaaagaacctgtccgaaggcctgtaccagcgtttctaccggcacaagaccgggcactggatcgggctggacgtgcacgatgtgggcgattaccgcctggcgggcgattcgcggctgctggagccgggcatggcattcaccatcgagccggggctgtacatcggcgtggacgatacgacggtggaaccgcgctggcgcggcatcggcatccgtaccgaggatgatgtgctgatcaccgatgacggtcatcgcgtgctgaccgaaggcctggcgcgcagcgccgacgagatcgaagcggtgatggcggggtaa

SEQ ID NO: 496260 - DNA, 537 bp, Stenotrophomonas maltophilia
atgagcaccggcaacggccacttcaacctgctcgcgcgggtgctgcactggtccatggcgctgatgatcgtcgccatgctgttcattggcgtgaccatggtcgcctcgctgcacctgcggccgatgctgatcgacctgcaccgcccattgggcatcactatcggcgtactggtgttgctgcgcctgtacaaccggctgcgtcatcgcccaccgccgctgccggcggatcttcctgtgtggcaggtgatggcggccaaggcctcgcactggatgctgtacgcactgatgctggcgatgccgctgatcggctgggcgatgctgtcggccggcggttacccgatcgtgctgtggggtggcctgcacctgccgccgatcgtgccccataccccggcactgtatgccgcgttgcgcaatgcgcacagcctgctggcgtatgtgttgttcgccacggtgctgatgcatgtgggggcggcgctgttccatttgtgggtgcggcgggatggcgtgttccaggcgatggcgcgcgggaaggattga

SEQ ID NO: 496261 - DNA, 1104 bp, Stenotrophomonas maltophilia
atgtcgctcttccgctacacccgcgctggccagacgccgggcgcgccacgcaagcattcccccctgctctggatcgcactgatcgcactcattctgggtgcggtcgcgctggccttcgcctggctggccggctggattggaaaccgcctgaccgcgcagcgcttcaccgacaccatcgaggccaccggcccggcccacccgggcttccgccgcgcgcacagcaagggcatctgcgtgagcggctggttcgaacccagcgcgcaggcgcccaccctgtccagcgcacgggtgttctcgcagcgccgcgtgccggtgatgggccggttgtcgatcggcggcggcgacccctacggtgccgacaacactgcacgcgtgcgcagcctcgcggtgcagatggtcagcgatgatggccaggaatggcgcatggcgatgaacagcttcccgttcttcgccgtacccagcgccgaggcgttctacgagcagacccgcgcctccattcccgacccggccaccggcaagcccgatccgcagaagatggccgcggtgctggccaaataccccagtgcgcaggctttccagcagtgggccaagaccgcgccgtggaccagcagctgggccgacaccaccttcaacagcgtcaacagcttctggttcaccaatgcgcagggccagaagcgcgcggtgcgctggcgctggcagccgcaggcgccggtggtggagatggatgcggaaacccgcaagcaggccagcgtcgatttcctcagccaggaactgcagcagcgcctggccagcggcccggtgcgctggaacctggtcgtgaccaccgccgagcctggcgatgccatcgatgatccgtcggtaccgtggcccgaatcgcgtgaccaggtagtggccggcgtactcagcctggaccgcatgcagtcgcaggaacagggcgcctgtgggcagatcaatttcgatccgctgatcctgcccagcggcgtgcgtggcagtgacgatccgatcctggcggcccgctcggccgtgtattcgcagtccttcaaccgccgcgaacgcgagcgcgccaccggcaacgtcgagcaacggaaggaggccgcacgatga

SEQ ID NO: 496262 - DNA, 1368 bp, Stenotrophomonas maltophilia
atgagcgagatcactggtttcactgccgacaccgctgcggcgctgccgttgtacgtgctggaccgcgagcagttcgccgcctggaaggacagccagccggctgccacgcaggcgtggctggcatcgcagggcttcaacgccggcgcccacagcgtggcactgctgccgggcgccgatggcctggccggtgccgtgatgggcgtgggtgatcgtgccgatgcctacagctatgcgcatgcgccgcacgcgctgccggaaggcagcgtgtggcagctggccagcgaactaccggccgccgaactggcgctgctgcagctgggctggggcctgggcagctaccgcttcgaccgctaccgcaagcgcaaccgcgcgccggcccagctggtagcggcgccatccggcgaggtggccgacctgatcgccgccagcctgcgcgtgcgcgactgggtcaacaccccgaccgaagacatgggcccgcagcagctggaagacgccgcgcgcgcgctggccgatgcacatggtgcgcaggtcgaggcgattaccggcgacgaactgctgaagcagaatttcccggccatccacgccgtgggccgcgcttcgcatcgtgcgccgcgcctggtcgtgctgcgctggggcaaggacaccgatccggcattggtgctggtgggcaagggcgtgtgcttcgataccggcgggctggacatcaagccagccgacggcatgcgcaacatgaagaaggacatgggcggcgccgcgcacgcactggccctggccggcttggtgatggcgcgcgggctgccggtgcggctgaccctgctggtgccggcggtggaaaacgcgatcggtccggatgccttccgcccgggcgaagtgatcgccacccgcaagggcctgagcgtggagatcgacaacaccgatgccgaaggccgcgtgatcctgtgcgatgcgctgaccttcgccggtgagcagaagccggacctggtgctggacttcgccacccttaccggtgccgcacgtatcgcactgggcccggatctaccggcgctcttcagcaacgacgacagcgtggcccagcagtggctgcaggccggcgacgcgacccgcgacccggtctggcgcatgccgctgtggcgcccctacctgcgttacctgagcagcggcatcgccgacctggccaacgccggttcgcgcatggccggctcggtgaccgccgcgctgtacctggaacgcttcctggaagacggccagcgctgggcgcacctggatgtgtatgcctggaacgacggcgagcgcccgggccgtccggccggtggcgaagcgctggcgctgcgctcggcgtgggcgatgctgaagcagcgctacagctga

SEQ ID NO: 496263 - DNA, 720 bp, Stenotrophomonas maltophilia
gtgaatttccccgtccaagccatcaccctcgaccttgacgacacgctgtggccgttcgctccgatcggcgcccgcatcgaacaggtcctgcacgcctggatgtgcgaacacagccccgctaccgccgcgatgtatccggtggaggcgatgcgcgaactgcgcgagcggctgtaccacgcccatccgtacctccaccacgacctgagtgcgctgcgccggctgaccctgcacgaagcactgcacaccagcggtgccagcctcgatctgctggagcctgcgtatgaagtgttctacgccgcgcgcaaccaggtggagtgctatcccgatgcgatcgacgcgctggcgcgcattgccgcacgggtaccggtggcggcgctgagcaacggcaacgccgacctggagcggatcggcctggcccatcatttcgccttccagctgggttcgcgcgaacacggcgcggccaagcccgaagccagcatcttccatgccgcgtgcacccgcctgggtgtggcaccggcacaggtgctgcacgtcggcgaccatgccgacatggacgtggccggggcgattgccgccggcctgcgcggctgctggatcaaccgcgacgcagccacctggacccatccgcagctgcagccggacctgcagttcgacacccttaccggcctggccgactggttggatgccaacctcgacgccgccgcaccccggagtacctga

SEQ ID NO: 496264 - DNA, 333 bp, Stenotrophomonas maltophilia
atgcagttcgacgccatggcccggatgctggcaccggccccggcaagggcgcaggacggcgaatccagcggcgagttccggctgaccacgcccttgatggtgctgggccagcccgtgaaccggctgcagtcctatgacggcgacagcggcgaggatggcatcgacagtttcaccgcgtacttcagctcggccagtgtggaacaggtcgcggcactggcgaagatgtccgacccggtagcaggcacctacacgaaggaagttgggcggcacaacctggacgtgcagcagttcgacggccagaccaccatcgcctgctcgtacaacctgcgctga

SEQ ID NO: 496265 - DNA, 1110 bp, Stenotrophomonas maltophilia
atgagcgagtccctcctgtccccgtcaccagccgatccgcagggtgcggaggcgccgctgccgcccccgtcgcgtccacgcgggccgatgtcgctggtggtcctggccaccctggcggtgggctacacgctgtgggccgcgcaggacatcatcctgccggtgctgctggcgatgttcttcgcactggtcggcaacccgatcctgcgcctgctgcagaagctgtggattccgcgcgcgctgggcgcactgctgatcctcggcgccgggctgggcgtgaccggttcgctggcggtgcagttgatcggtccggcgatggaatgggcgcaggaagcaccgcagcagctgcgcaaggtggcccggcaggtgcaggacctgaccaagccggtgcagcaggccaaccaggcggcggaaaacttcgcccgcgtggccggcggtgacagcaaccacaaggtgcaggtgatccgcacccagctggacgatccataccgcatgctgacccgtgcaccgcgcctggccgcgtcggtgctggcggtggtgctgctgaccctgttcttcatgatctacgggcagagcctgcagcgcgcagcgatcgccctgttcccgaaccgccagcagcagcggttcaccaccgacatcctgcgttcgatcgaacgggaggtctcgcgttacgtgctgaccatcagcgtcatcaacaccctggtcgggctggtgttcgccggcgtgctgatgctgctcggcatcggcctgcaggaagcactgctgtggggcacggtggctgcactactgaacttcgccccgtacgtgggcccgctgatcggcgtggcattgatgctgttgatgggcttcgtcgagttccgcgacccgctgcaggccctgctgccggccgccgcctacctgggcctgcacaccctggaagggcagatggtgaccccgatcgtgctgggccgtcggatgaagctgtcgccgctggtgctgatcctggcgctgatggtgttcggctgggcctggggcatgatcgggctgctgctggcagtgccgctgctggtgtgcatcaagctggtgctggcacgcctggatggcatgcagggctgggcacgcctgctggagtga

SEQ ID NO: 496266 - DNA, 456 bp, Stenotrophomonas maltophilia
atgaagttcggcgcgctgcagcggcgggtgaaacgctgcgaacaggtggtgaccgtgcgcctgggcgagacccaggaccactggtccacgctcagcgacgtctggcgaaagggctggtcgccgttgcgcatcgtggtggtcggcttggccggtggcttcatcgccggcaagctggaagtgcccggcaaggtcaacggtgcgcgctggctgcagatggtcggttcggtctcgaacctgttcgccagtgcccaggcggcgttcgccacggcgatggcggcacaggctgcagcgaccgccgatgacgcggccgaagaagccgacgatgccagcgaacaggcacaggcggcggcctccgccgccaacgcacggccggcacctgccccccgcccggaacccgaaccggaaccgtgcgaaccgcgcccggccgaagccgccaccgagctgtccgaacgttga

SEQ ID NO: 496267 - DNA, 471 bp, Stenotrophomonas maltophilia
gtgagcgaagacaacgcgcaagcccctgatccggcggccaccccgccgctggatgagagcatccgccaggtcggcgcggccggtcgtgccgccgccgattcggccaagcacaccgtgcgctcgctgcgccggctggcctcggccgacttcgccctggcccgcagcgccttcggccgtgcgctggcctgggccggcgtggcgatcgtatttggtgcctcggcctggctgctgatggcggccaccctcatcgccctgctgcagagctggggccttagctggctgcaggcgctgctgatcacctcgctgctgagcctggccgtcaccggctacgcgatctggcgggtgtcctacttcttccaccacaccggcatgcatgccacccggcgccagctgtcacgcctgggcctgttcgacgagcccagcgaagacgaccccgatgccggcgtgcagctgcccgagggcaagccatga

SEQ ID NO: 496268 - DNA, 366 bp, Stenotrophomonas maltophilia
atgagccccaccaataccgagaacctgaaggaacacctgggtgaagccggttcccacctgaagcaggccgccacggccgccggcggtgcgatcaagggcgcaaccggtgccgcgaccgacgagctgcgcatcggcaaggccaacgtcaaggccgaactgtccgacagcgcactgtctggtctggccgccgccgaattcggtggtgccgctgccaaggaacaggttgacgcgttgatggacaagggcaaggacctgatcgacagcgccgccgagttgatccgtgagcgtccgctggcttcgttcggcgtcgccttcgctgccggctggatcatcgccaagctggcccgcggcagcagcgacaagtaa

SEQ ID NO: 496269 - DNA, 1434 bp, Stenotrophomonas maltophilia
atgcgaccgcttcccaccctgcttacgctcgcaatcaccgccgccttcggtggcttcgttgccaccggcatcaatgcccacctggacaaccgtgccgatgcagcaccgctgccagcggtgctgccgaccaccgccgcgttgccggccgcggtggccggacaggcggtgccttcgctggcgccgatgctggaaaaggcgatgccggccgtggtcagcgtcaacaccaagcaggtggtgcgcgtgcgcaacccgttcttcaacgacccgttcttccgccgcctgttcccggatatcccgcaggagcgcatcaacgaatcgctgggctcgggcgtgatcatcgacgccaaggaaggcctggtgctgaccaaccaccatgtcatcgacaacgccgatgacgtgcaggtgacactggccgacgggcgcacggtgaaggccgagttcctcggttcggaccgcgataccgacatcgcgctgatccgcatcccggcgcagaacctgaccgacatcaagctcggcaacagcgaccagctgcgggtcggtgacttcgtggtggccatcggcaacccgttcggcttcagccagacggtcacctcgggcatcgtctcggcggtgggccgcagcggcatccgtggcctgggctaccagaacttcatccagaccgatgcgtcgatcaacccgggcaattccggtggcgccctggtcgacctgcagggccagctggtcggcatcaataccgccagcttcaacccgcagggcagcatggccggcaacatcggcctgggcctggcgattccgtccaacctggcgcgcagcgtggtcgaccagctggtcaagcacggcgtggtggtacgcggcacgctgggcgtggagagccagaacctgaccgcgcagatcgcgcaggggctgggcctgggcgaaacgcgcggtgcgctgatcacccgcgtgctggccggttcggcggccgccgcggccgggttgaagccgggcgacgtggtggtctcggccaacggccaacgcgtggacagcgccgaagccctgcacaacgtggaaggcctggctgcggtcggcagcccgatgacgctggacgtacgccgcgaaggcaagcccgtgcagatcaaggccacgctgaaggaacaggcgcgtgcggtcaccggcgagagcctggacccgcggttgaccggtgccaccttcgtcgacctgcccgagtcgctgcgacagtcgggtgtcggcggcgtgctggtcagcgaggtcaagcgtggcagccgcgcggccagcaacggcctgcagcagggcgacatcatcaccgacgccaccgtgggtgaattcgccgacctggccagctggcgcgccaacttccagcagcgcccgccgaccctggtggtgcgcgtgctgcgcaacaatggccagcagcagggccagctcgtgatgcgctga

SEQ ID NO: 496270 - DNA, 882 bp, Stenotrophomonas maltophilia
atgagcaacggtaatggtgtgtcggtcgtgaccgacgccgtcgagaacgtcaaagaagccgccaccaacgttggcgagaccatcgcccacgccgccgaagacgccgtgaagtcggtcaagaagaccgtcaagcgcgccaccaaggcggccggtacccgcgttgccaaggccaagaaggccgtggccaaggtcgagaagaccgttgccaagaaggccgacaaggccgccaagtcggtcggcaagaccgttgccaatgccaagaagaagctggaagcggccaagaagaacgccaaggccgaagccgctgccctgaagaaggaagtggccaagaagaaggccgctgcaggcaaggctgtgaccaagaaggccgctgccgccaagaaggccaccaaggctgccggcaagaaggtcgccaccgtgaagaaggccgccaccaagaaggccgccgtcgcgaagaagaccgttgccaagaagaccgcggccgccaagaaggtggtcggcaagaaggtcgccaccgccaagaaggctgtggccaagaagaccgtcgccgccaagaaggtcgccggcaagaaggccgtggctgcgaagaaggttgtcggcaagaaggttgccgccaccaagaaggtcgccaccaagaagaccgcggccgccaagaaggttgtcggcaagaaggctgccgtcgccaagaaggttgtcggcaagaaggctgccgtcgccaagaaggctgtcggcaagaagaccgccgtcgccaagaaggcggtgggcaagaaggttgccgccacccgcaagacggtcgccaggaaggctgcgccgctgaagaaggtcgccgccaagaaggctccggccaagaaggccgtgcgcaaggtcgccaagcgcaagtaa

SEQ ID NO: 496271 - DNA, 687 bp, Stenotrophomonas maltophilia
atgcgcggtatcgacttcagttcctggcagggcgtgctgtccacgttggccggcctggtcctgatcaccctgctcggcgtcggcatccgcctgctggtgatgcagaccctgcagcagcgccgcgagcgcgagaaccggcagatcaacgaacggctgcgcacgctgatggccgcctacaagaccctgggcggttcgttcaccggcgagctgggcgtggatcccagccatcgtcgcgacctgcgccagcgcgaagatgccgacggcatcgccgagccgcgctcggaccgtgcgcggcgcattcgcgatgcggtcgaggccgcgctgtcggacatcctgctgctgggcaccgacgaacaggtgcggctggccacgcgtgccgccaacgaactggcacaggggcggccggtgcatacccacgaactggtggtctcgctgcgcgacttcgtgcgcgaagcgctggatctagccccgattccggccgatctgcagattccaccgcaggggccgacccggcccgttgccagtggtggcggcaagggccgtaacgacggcgatgccaagggcggccgtgcaggcggtggcggtggtggtggaatgggcgccggcatgggcggcatgggcctcggtgccggcgccgcactgggcgccggccatgctgctgccagcgatgaaacggacgcgcgctga

SEQ ID NO: 496272 - DNA, 360 bp, Stenotrophomonas maltophilia
atgagctacatcgacggtttcgtcctggcggtgcccaccgccaacaaggagaagttcctcgcccatgcacgcacaggggatcccgttttcatcgagtacggcgcgctgcgcgtggtcgagtgctggggcgatgacgtgccgcacggcaagaccaccgacttcttcggcgcggtgaaagccacgccggatgagacggtggtgttttcctggatcgaatggccggacaagccgacccgcgatgccggcatgaagaagatgatggaggacccgcggtttgatccaacgaagaatccgatgcccttcgacggcgcgcggatgatctacggcggcttcgtgccgctctacgagctgacgcgctga

SEQ ID NO: 496273 - DNA, 2403 bp, Stenotrophomonas maltophilia
ttgcacgtacctgccccgctgcggttccggttctgcgccgccgtcctcgccttcatcggcgtgctttccacagcatcggctcggccgttgcagccctccgattaccagcgcgccgagcgcgtgcacgacagccacctgcgcggtgcgctgcgcaatgcctcgctcctgccgaactggctggccgatggccgcttctggtacgaacgcgaagacggccagggccggcgcgagggcgtgctggtcgatccggcgcaggcctcccggcagatcctgttcgatcgcgctgcgctggacagcgctgcgggggccctgggggtgaacgggcaacggttgcggttggtcaatgtgcaggtgctggccgacggcctgcgcctgcgcttcagcggtgaagccggcatcgactgccagtggccacgttggcagtgcctgcggacgcagggcgccatgcctgctgccgatgcactgcccgcacccgacggcgaggcctggctgcaggtgcgcgaccacaatctatggctgcagcaacgccgacaggcaccgcgggcgctgaccaccggcggtgtcgccggccatggctatggtgtattgcccgatttcaccctgcgcggtattccacgcagccagggccggatgccggcgcggccgttcgccgtcggctggtcgcccgatggacgctatgttgccggcatccgctacgacgaacgtgcgctgcgggactacccctatctggaaagcaccccggccggcggcgcgcggccccgcgtgcacacggtgaaactgggattgctgggcgatgcacagcaggtgcgtgacagcctgtacatcgtcgatgtgcgcagcggccggcagcaggacatcaccctgcccgagggctggaacaccctcagcgaggccggcgtgctgggctgggacggccaccggctgtatgccgcgatcgcgcacttcggcgcgccgcgacggctgcgcctggtggagatcgatgccggcagcggtgcgctgcgcaccgtgctggaagaagccggcgacgcgcgcctgcagctcagcctgtattcctacaaccgtgcctcggttgcgatcctgcccggccaggacaccgccgtgtggttctcgcagcgtgatggctggggccatctgtaccgggtgcgcctgtccgacggcaaggtgatgcgccagctcacccgcggccggtgggcggtgcgtgacctgctcggggtggacagcgcaggcgcttgggcatacttcagtgctggcggtgtcgagggcggcgatccctacgtacgtggcctgtaccgggtagcactgcacggtgggccggtgcagcgcctggccgccgatggcagcgaccacctggccgatgcgggcaccggcatgctgttcggcggacgcgcgccgcaggcgctgtcgcccggcggcagctatctggtggataccgtgtccagcctcgcgcagccgccgcgcacggtgctgcgcgccagcgacgatggcagcgaagtgatggtgctggaggctgcggatgcgcaggcgatcatcgctgctggctggcggccgccgcggcgcgaacggctgctggccgccgacgggcgcacgccgatcttcgccaccgtctacctgccccgcgactatcgcgatgacggcagcttcccggtgatcgacgcgatgtacggcggtgccttcatcagcaatgcgccggtgacctatgccgaagcggtttcggcgcagaacccggtatcgcgcgccagcctggccgagctcggcttcgtggtggtcagcatcgatgcccgcggcaccggcggccgcgacaaggcattccatgacagcagcttcctgcacggcgccgatgtgcagctcgatgaccatgtggccgcgctgcgccagctgggcgaacgctaccggggcatcgacctgcagcgggtcggcatctacgggcattcgttcggtggttacagcgcggcgcgtgcactgctgcgccacccggcgttctacaaggtggctgtggcctcggccggcagccacaatttccagggcatgtacggcggcgccctgcacggcatggaccggctgttcggtggcgtggtgccagctacagccatggccgatggcgtgccggccccctttgccgggctcgacaatgcggcactggccggcaacctgcgcgggcatctgctgctggtctatggcgaactggacgagaacgcgccaccggcgctgaccctgcagctggccgcggccctgaacaaggcccagcgtagttacgacctgctgtacctggcccggcaggaccacgaactgttccgcaacgacgccacctacacgcaccgcatgtgggactacttcgtgcgccacctggccggccagcagccaccggatacggtgctggccccgctcccgggtggcccgggctga

SEQ ID NO: 496274 - DNA, 573 bp, Stenotrophomonas maltophilia
atgaagaattcgctgattgctctggccctggccgctgccctgccgttcagcgcttcggctgctgagaacctgtcctacaactacgccgaagccgactacgccaagaccgacgttgaaggcatcaaggccgacggctggggcgtgaagggttcctacggcttcctgccgaacttccacgccttcggcgaatacagccgccaggaaatcgaccacaccaacctgaaggttgaccagtggaaggtcggtgccggctacaacgttgaaatcgctccgagcaccgacttcgttgcccgcgttgcctaccagaagttcgaccgcaagcacggtctggacttcaacggctacagcgctgaagccggtatccgcactgccttcggcgcccacgccgaggtctacggcatggtcggttacgaagactacgccaagaagcacggcgtcaatccggatggccagtggtacggccgcctgggtggtcaggtcaagctgaaccagaattggggcctgaacggcgagctgaagatgaaccgccacggcgacaaggaatacaccgtcggcccgcgcttcagctggtaa

SEQ ID NO: 496275 - DNA, 684 bp, Stenotrophomonas maltophilia
atgccgctgacccttccgcctctgctgcctgatcggccacgacgcctggcgctgctggacccgcacccggtactgcggttgggcgtggaagtgctgctgcgccagcacgcgggtgtgcaggtacgggtgagcctgtccagcgaggcgcacctgctgcacctgctggagcgcagcccgacgtgtgtcgacctgctgctgatcgatgcgttgcccatgggcgacctgggcgatgggttggccctgttgcacgtgctgtcgcagcgctggccggcactgccggtgctggtgctctcggcacactgcaatgccagcacggtggccaccgcgatgcgtgccggtgcgcgcggcttcctgtccaagtcgacgccaccggacgtgctgctgcgtgccattgatgtggtcgcccggggagggcgcttcgtgccaccggagctgcgcgcggaactgaacctgccgggcacgcgtgcacgcagaatgccggccccggcactggtgccgttgagccagcgcgaacgggaagtgctcgggctggtgctgaaaggggtcagcaccagcgaaatggccctgcgatcggggcgttcagccagcacgatcagctcgcagaaaacctcggcctaccgcaagctcggcatccgcggggacggtgacctgttccgcttccgccacctgctggaatgcggatga

SEQ ID NO: 496276 - DNA, 390 bp, Stenotrophomonas maltophilia
gtggacgccatcctgaccccggtatcgatcggcgagctgatcgacaagatcaccattctccagatcaaggccgagcgcatcgacgatgccgccaagctggccaacgtgcgcactgagctggacggcctgctgcccctgttgcagcagcagctgcaggcacagccggccctggccgcgctgcagcagcagttgaaggcgatcaacgagcgtatgtgggacatccaggaccagctgcgcgacaaggaagcggcccaggtgttcgatgatgcattcatccagctggcacgcggcgtctatggcaccaatggcgagcgcgtgcaggtgaagaacgagatcaaccgcgtggccggttcggcactggtggaagagaagcagtaccagggcgagtaa

SEQ ID NO: 496277 - DNA, 699 bp, Stenotrophomonas maltophilia
gtgaacagcaaggggatgatggcggcggtggtggccgccctggcagggctgcttggcatgggcagcgcgcaggcacaggtgcaggtcagtggcagtgcggccttgaccagtgactacgtgtggcgcggcagctcgcagagcgatggtgacccggcggtgcaagccggcgcgaagatctcgatcccatcgggctcgtacgccagcgtgtgggggtccaacgtctcgttcaagccggacaatggcgcgcgcagcgagttcgacctggtggcgggctggtccggcgcgctggcaccggactggacgctggatgcgaacctgacccgctatgtgtatccgggtaccgctcgtgcgctggactggaccgaactcaacacgaccgtgacctggaagcagcgcgcctggctgcaggtcgcgcattccaacgatgcgttggccggtggccatcgcggaacctatgcccagctgggcgtgcgtgtgccgctgcacgaacgcgtccgcctggaagcagcggtgggccagtactggctggccaccgcgcagggcccggattacctgcatggccagctcagtgccattgccacgctgactccggcatgggagctgcgcgccaccgtgcatgacaccgacagcgcggccaagcgactgttcccgggcaatgccggtggacgctgggagctggcgctgcagggcagcttctag

SEQ ID NO: 496278 - DNA, 1194 bp, Stenotrophomonas maltophilia
gtgagcccgtcccttccccctctgcaccgctggcaggtgctgctgatgtcggtcgccaccggcgtggccgtggccagcaactactatgcgcaaccgctgctgcacaccatcgcagatgccttcggcgtgccgttcggccaggtcggcatggtggttaccgcagcacagctgagctatgccgccggactgatcctgctggtgccactgggtgacctgttcgagcgccgccgcttgatcgtggtgatgagcctgctgtcggccggtggcctggtgatcagtgcctgcgcgccgtcgctggcctggctgctggtcgggaccgcgatcaccggactgttttcggtggtggcacaggtgctggtgccgttcgcggccacgctggccgcgccggaacatcgtggccgcgtggtcggcacgctgatgagtggcctgctgctgggcatcctgctggcgcgtaccgtggccggcctgctgtccagcctgggtgactggcgcctggtgtatgccatcgctgccggcaccctggtgctgaccgcactggcattgcagcgcggcctgccgcgattccaccacagcgccggcctgggctatttcgccttgctgcgctcgatcggcgtgctgttcgtgcaggagccggtgctgcgccagcgcaccctgctgggtgcctgcagctttgccatgttcgcgattttctggaccccgctcgcgttcctgctggcgcagccaccttacgcctacagcgatgccaccatcggcctgttcgggctggtcggtgcagccggcacgctggcggccggcctggccgggcgcatgtccgaccgcggccagaccggacgcgccactgccatcgcgctggtgctgttgctgctgtcgtggctgccactggggctgtcggcccactcgctgctggcgctgctgatcggcgtggtggtgctggacctggccgcacagctgctgcacgtcagcaaccagaacctgatctatgcgctgcagcccgcggcgcgcaaccgcctcaatgccggctacatgaccggctacttcatcggcggctcgctgggttcgctgctgtcggcgcaggtctaccagcgctacggttggaccggcgtctgcgtggccggtgccgccgtggccgtgctggccctgctgctgtggctgcccggcgcgctgcgcgcgcgccaggcggcatcgtcgaactag

SEQ ID NO: 496279 - DNA, 888 bp, Stenotrophomonas maltophilia
atgaacctcaagcagctcgagtttgccgtcgccctggccgaggagggcaatttcacccgtgccgccgagcgctgccacgtggtgcagtccgcgctcagccaccagatcgcccacctggaacaggaactgggtgccacgctgttcgagcgcctgccacgccaggtgcgggctaccgccgccggcgaggcgttgctggtgcacgcacgccaggtgctggccagcctgcgccacctgcgcgccgacgtggccgccgtcagtggcgaagtgcgtggcctgctggccatcgggcagatttcttcgctgaccgacatcgacgtcgtggcgatgctggcggccttccagcgggtgcacccacaggtggagttccagctgcgcgtggacaagagcgaagacctgatcgcacaggtgcagtcgcgcgcgctggatgtggcactggtcggcctggcgccgtcggcagcgctggatggcgtctgccaccaggtgctgcaggaggaggatctggtagcggtactggcgccgtcgcaccggctcgccgggcgcacgcggttgccattgaccgcactgcaggatgaagcgctggtcgacttcccgcgcggtaccggtgcgcgccggcagaccgacgatgccttcgccgccgctggcctgccgcacacggtgcgtttcgaggtcaacctgatggaactggtcgagcgcttcgtccgccacggattggcggtcggcatcgtgccggcgttgatcgccgaaggtttccagggcgtggttcagattccactgcagccgaccccgacccggcgcgtacacctggtctggcagcggctgccgacgccggccgcgcgcgccttcgtcgaggccgtgctcagccgcgcaggcgcaggctcaggcccttga

SEQ ID NO: 496280 - DNA, 468 bp, Stenotrophomonas maltophilia
atgatcaacaatgatgtcctgcgcagcgtgcgctactctctggacctgggtgaccagcacgtggtcaccctgtgccagatggccgacccggccttcgccgtggataccgagcaggtgaaggcctggctgcgccgcgaggacgaagccggtttcgaggcgatgaacgacagcgcactggcgcacttcctcgatggcctgatcgtgcacctgcgcggtcgcgacgagagccagccgcagcgtgcggtggaaacccgcatcgacaacaacctggtgctgaagaagctgcgcgtggccttccagctgcgcgacgtggacctgatggagatcttcgccagcgccggcttcaacgtgtccaagtcggaagtcggtgcgttgttccgccagcccgggcacaccaactaccggcgctgcctggaccagatgctgcgcaacttcctcaagggcctgagcctgcgcctgcgcggctga

SEQ ID NO: 496281 - DNA, 753 bp, Stenotrophomonas maltophilia
atgacccgcactgtcctgattaccggcgccacgtccggcttcggcgccgccgccgtccaccgcttcgcccaggccggctggaaagtgatcgccaccggccgccgcggcgaacgcctgcaaccgctggtcgagcgctatggcaaggacgtggtgcacgccgccgccttcgacatccgcgatccggtggcgatggaggcggccctgctggcgctgccgccggccttcggcgagatcgacctgctggtcaacaacgccggtctggcgcagggcaccgcaccggcacagagcgccaggctgtcggactggaccacgatgatcgacaccaacatcaccgcgctggtgaccctgacccaccgcctgctgccgcagctggtggagcgcaagggtgcgatcatcaacatctcgtcggtggccggcgtctacccgtacccgggtggcaacgcctacggtggcaccaaggccttcgtcagccagttctcgctgggcctgcgttcggacctgcacggcaccggcgtgcgcgtgaccacgatcgagccgggcatggccgagaccgagttcaccgtggtccgcacccatggcgaccagaatgcatcggacaagctgtacagcggtgccaatccgatgaccgccgaagacatcgccgaacagatcttctgggtggccacgctgccaccgcacctgaacatcaatcgcctggagctgatgccggtcagccagtccttcgccgggttccaggtcgcccgcgagggctga

SEQ ID NO: 496282 - DNA, 897 bp, Stenotrophomonas maltophilia
atggcagcacgacgcggcaaaacccaggcacgacgcaacagcagcagccagggcacacccggatgggtgtggctggtggccggtgtggcgatcgccgccgtggtgttcctggcggcgccgaacctgttcaagggcgaaggcgacggcttcctgcgcgccggtccgcagccgaacccgaacgcgcagccggccccggttgctgatgcagacagcgatgtcggcagccagccagccgcgcagccggccacgccgaagccggccgaaccggagaagcccgcggcgacgcagtacgacttctacaccctgctgccgggcaaggaagtggaaatgtccgacgccgaactggccgccagcgcgcgtgccgaggaccagcgccgggccaaggccgaagcgtcgcgcgcgcaggccgcgctggagggcaagccggtgccgccggcgagcacggccacgccggcaccgaccgcaacggccagcgtcgccagcaccgcaccggtgaccgcgagcaaccgtccgctgccggcaccgctgagcgagcgcccggccgcggcaacgccgccggccagcaccgcaccggcgtcgaccagcacggccgccgcccccgcgccgcgcgcggaagccgcgcccaccgcgccggcgaccactgccgcaccggcgcccgccgacaacgcgcgctacatcctgcaggcaggtgccttcggtgcgtccggcgacgccgaagccaccaaggccaagctggccatgatgggcctggcggcacgcgtggagtcggcgcagatcaacggcaagaccgtgtatcgcgtgcgcatggggccgtacggcagcgccggcgaactgtctgaagcgaagcagaagctggatggcaccggcctgcaggcgatggccatcaaggcgcagtga

SEQ ID NO: 496283 - DNA, 1689 bp, Stenotrophomonas maltophilia
gtgaaaaatctcctccgcgccctgatcagccaaggcatcgaagccttgcgcgccaatggcaccctgcccgccgactccctgccgccggacttcgtggtcgagcgcccgaagacccgtgaccacggcgacttcgccaccaacgccgcgatgctgctggccaaggccgcgcgcagcaatccgcgcgcactggcacaggcgctggtcgaggcgctgccgcgcagcgaggacgtcagcaaggtcgagatcgccggccccggcttcatcaacttccatctggccccggccgcgtaccagcgcgaaaccgcctcggtcatcaaggaagcccacgactacggccgcaacctgtccggcaatggccgcacggtgggcgtggagtacgtgtcggccaacccgaccggcccgctgcatgtcggccatggccgcgcagcggcgatcggcgactgcgtggcccgcgtgctcgatgccaacggctggaacgccaagcgcgagttctactacaacgacgctggcgtgcagatcgagaacctggcgctgtccacccaggcgcggatcaagggcatcgcacccgatcaggacggctggccggaaggcggctaccgcggtgagtacatcgccgatgtcgcccgcgcctacatggccggtgccagcgtcgacctggaaggcagcaccgtggtcggcgccaaggacccggacgacatgcaggcaatccgccgcttcgccgtggcctacctgcgcaacgagcagaacctggacctggccgcgttcggtgtcgacttcgacatctacttcctggaaagctcgctgtacgccgacggcaaggttgccgaagcggtggccaagctgcaggcgtccggccacacctatgaggaaggcggcgcgctgtggctgcgcagcaccgacttcggtgacgacaaggaccgcgtgatgcgcaagtccgacggcaccttcacctacttcgtgccggacgtggcctaccacctgtccaagtggcagcgcggctacgagcgcgcgatcaccgaactgggcgccgaccatcacggctcgctggcgcgcgtgcgcgccggcctgcaggcgatggaagtgggcatcccgcagggctggccggaatacgtgctgcaccagatggtcacggtcatgcgcggcggcgaggaagtgaagctgtccaagcgtgccggcagctacttcaccctgcgcgacctgatcgaagaagccggccgcgatgcgacccgctggttcctgatcgcgcgcaagcccgattcgcagctgaccttcgacatcgacctggcgcgccagcagagcaacgacaatccggtgttctacgtgcagtacgcgcacgcccgtgtctgcagcctgctgcgccaggcgcaggaaaagggcctggtgtacgagcagggcaatggcctggccaaccttggccacctggccgacgatgcctcgctgctgttgatgaacgagatctcgcgctatccggaagtggtggaagcggccggcgtggcgctggagccgcacctggtggcgcagtacctgcgtgaattggcgcatgccttccacacgtggtatcacgggacgccggtgctggtggaagacgccgccgatcgcaacgccaagctgaccctggcctgcgcggcgcgccaggtgctggccaacggccttgaactcctgggcgtgagcgccccggaaaaaatgtaa

SEQ ID NO: 496284 - DNA, 771 bp, Stenotrophomonas maltophilia
atggccgacccgggcatgcgtcctgccctgatgggccgcatcgcccccactggcgatgatgcaggcatgcccatccacgactggcccgaacaggaacgtccccgcgagaagctgatcgcacgcggccccgccacgctgtccgacgcagaactgctggcactgttcctcggctccggcttcggtggacgcgatgcggtgcagaccgcgcgcgacctgctgcaggcgcacggtcccctgcgtgtgctgctggaccgcccggcccgcgagctggcccggttgccggggctgggccctgctcgaagctgtgcactggccgccgggctggaactggcccaccgctatctggcggccgaacttcagcagggcgaggccgtcggcaacaacccggctgcggtcggccgctatctgcagcaccgcctgcgcggccaggcccgcgagatcttcatggcgctgttcctggacaaccgccaccgcctgatcgcctgcgaagaactgttccagggcaccatcaatgccgccccggtctatccccgcgaggtggtgcgtcgagccctgctgcacaatgcggcagcggtgatcctcagccacaatcatccttccggcgaccccgagccctccggcgccgacacccgcatcaccgatgaactgcagcaggcgctggcactggtggacgtgcgcctgctcgaccacttcgtcgtcggcgagggccgccccgtttcatttgctgaacggggcctgctgtccccgccccagccgcgcctgttcggctga

SEQ ID NO: 496285 - DNA, 627 bp, Stenotrophomonas maltophilia
gtgcacccgcgcatcatcatcgccgacgaccatcccgtcgtcctgcacggcatccgcatcgtgctgcagacccacctgatggaggtcgtcggcagcgcgcgtgacggcgccgagctgctgcagctggtcgagcaccacggctgcgacgcggtgctgaccgacctctccatgccgggcaccggcccggatggcccggaactgatcgctgaactgcgcgcacgccacccgcgcatgcccgtggtggtgcttaccggcgcccgccaccccggcctgctcgatggcctgctgcgtgagggtgtcagcggcttggtcgacaagtgcgccgatttcggcgagttgccgcaggccttgaacgcggccatggcagggcaggtgttcgtctcgcagcagctgcgccaccacctgcaggcgcgcgacctgatgttcgcgcgcgaaccggcggcgctgtccgcccgcgaacaggaagtgctggacctgttggccgccgggctgaaagtgaacgccatcgccgtccactgcggccgcagccccaagacgatcagccggcagaaggccgaggccaagcgcaagctggggctgcagaacaaccaggagctgttcgcctacctgcagtcgcgacgcgactga

SEQ ID NO: 496286 - DNA, 1290 bp, Stenotrophomonas maltophilia
atgccctcgtttgcacaggaattccaggtggctgactcccccaacgcttcccccgcgcccggccgcgcgctggaaggccagaaactgctgttgtgcgtcggaggtgggatcgcggcctacaaggccctggaactggtgcgacgcctgcgtgatgcgggcgcccaggtgcaggtggcgatgaccgccggcgcccagcagttcgtcacccccctcagtttccaggccctgtccgggcagccgacccgcaccacgctgtgggacagcgccgccgaacaggccatgggccacatcgagctggcccgctgggcggaccgcatcgtggtcgcgccgggaaccgccgatctgctggcccggctggcccagggccatgccgatgacctggtcagcaccctgtgcctggccagcaccgcaccgctgacgatctgcccggcgatgaaccatcgcatgtggctgcatccggccacccaggccaatatcgccctgctgcgccagcgtggtgcgcaggtgatcggcccggtcgatggcccgctggccgaaggtgaatccggtcccggccggctggccgaacccggcgacatcgtggccgcgctggccgccaatggcggcgccgctgcgacggttgccgcgccggaaacccgtgccctgcaggggctgcgcctgctgatcagtgccggcccgacctacgaagacatcgatccggtgcgttacgtcggcaaccgcagcagcggcaagatgggctttgccctggccgccgctgccgccgcgctgggcgcgcaggtggtgctggtcagcggtccggtacagctgccgacgccgccgggcgtgcagcgtatcgacgtgcgctcggccgcgcagatgcgcgatgccgtactgaagtcgctgcccgccgacatctatatcggtgccgccgcggtgtccgactacacgccgcgccaggtcgccgcgcagaagctgaagaagaccgccgacagccagtcgctggtgatcgaactggtgcgcacgccggacatcctcgccgaagtcgctgcacagacgcagtcgctgaagctggtggtcggcttcgccgccgagacccacgacgtggagaaatacgcgcgcggcaagctggtcgacaagcgcctggacctggtgatcgccaaccaggtcggcatcagcggcggcggtttcgagagcgacaacaatgccgccacggccttctggcaggacggtgaacaggtattcccggccacttccaagcgcgagctggccgaacaactgctggcgctgatcgcgcggagactccaggcatga

SEQ ID NO: 496287 - DNA, 474 bp, Stenotrophomonas maltophilia
atgacccaggcatccacttcccacccgctgcaggtcaagctgctcgatccgcgcttcggcgacagctggccgctgccggcctatgccaccgaggccagtgccggcatggacctgcgcgcggcgctggataccgcgctgaccctgcagccgggcgacaccgggctggtgcccagcggcctggccatccatattgccgacccgaacctgtgcgcggtgatcctgccgcgttccgggctgggccatcggcatggcatcgtgctgggcaacggcaccggcctgatcgatgccgactaccaggggccgctgctgatcagcgtctggaaccgtggccgcgaggccttcaccatcgagccgggcgatcgcatcgcgcagctggtggtggttccgatcgcccgcgtcagcctgcaggtagtggatactttcaccgacagcgtgcggggcgcgggtggattcggccataccggggtgcgttga

SEQ ID NO: 496288 - DNA, 2349 bp, Stenotrophomonas maltophilia
atgagcggcatcggggaaggacagcggggacggtcgttgggtcgcagtgcacctctactgggggtgctgttgatcctgttggccggctggttcggatggagcgcggtgcagcaatggcggcaggaggccaacgggcaggcgctggaagaggcgcgtgaccaggccgtgcagggcctgcagcaggctgctgcaggccagttgcagcagctgcagcagcagttgaagaacgatcgcgtgcagcaggcgctgcaggccggcgacgccgctgcggcggcgctggccgttcgcgagagctggaccggggtcgagcaggtcgaggtgctggcggccgatctggccaacgcctatgccgatccggccaccttcgggtattcccgcctggcgctgctggaagcggcgctggccgaggccaggccaagcctgcgcgtggtccgcgacggcggcggcaaccgcctgggcctggccgcgccggtgcagctgggcagcctggggccggccgtcatctatgtccgccaaccgctgctgcggctgacgtcaccgctcgaccaggtcagcgcgccgtccgccggcttcctcggcctgcgccagggagcattcgatctggtcacccagggcgacccgagcctggccgaaagcgcggaagcgctggcgcgcccggttgcaggcacgccgttgcggctggtcgcgtcggtgccgaatgtcgaggccggtccgctcggcctgggcgcgctggccagcgccattgtggcgttgctgctggcgttcattgccgtgctgctggtggtggggcgcgaccggctaccgaagtcgctgccgttgccgcgccgcgccgccgcgtccgaggccgaccatggcccgaccctgagcgagagcctgcagcaggcgccgccaccggtggccgccgtgaccggcagtggcgatgccacgccaccgccgccaccgccggtgcctgccgaagagctggccgccggcatcttccgcgcctatgacatccgcggcatggtgggcagcgaactgacaccgaagaccgcggcgctgatcggccaggccatcggcaccgtggcactggagcagggcctgcgcgaggtggtgatcgggcgcgatggccgcctgtccggacccgagctgacggccgcgctggccgagggcctgcgccgtgccggctgcgcggtgatcgacatcggcctggcgccgaccccgctcgtgtactacgccgccttccatctgcgtaccggcacctgcgtggcggtcaccggcagccacaacccgcccgagtacaacggcttcaaggtggtgatcggcggcgagacgctgtccggcgatgcgatcaccgacctctaccagcgcatcgtcgagggccgcctggtgcagtccgccgagccgggtgactaccagcagcgcgatgtcagtgccgactacatccagcgcatcgccgatgacgtgcagctggaccgtccgctgaaggtcgtggccgatgccggcaatggcgtggccggcgcactggccccgcagctgctggaagcaatcggcgccgacgtcattccgctgtactgcgatgtcgatggcaccttccccaaccatcatcccgacccgagcgagccggccaacctggaagacctggtgcagacggtcaagcgcttcggcgccgacctcggcgtagccttcgatggcgacggcgaccggttgggcgtggtcaccggcgaaggcaggatcatctatgccgaccgcctgctgatgctgttcgctgccgacgtgctgatgcgcaatccgggcgcgatggtgatctacgacgtcaagtgcaccggcaagctgtccgaccatgtgctgcgcaacggtggcagcccgctgatgtggaagaccgggcattcgctgatgaaggcgaagatgcgcgagaccgatgccgagctggccggtgagatgagcggccacttcttcttcaaggaacgctggttcggtttcgacgacggcctgtacgccgctgcgcgcctgctggagatcctggcccagcgcgaggagaccccggacgaagtgctgggcgaactgccggaaatggtcgccacgccggagctgaaggtagcggtggccgacgggacgccgcatgcgctggtggcgatgctggtggcggcggcgcagtcgccggacaacccgtatgtggggggccgcctgtcgaccatcgatggcctgcgcgtggacttcgccgatggctggggcctggtgcgcgcctccaacaccacgccggtgctggtgctgcggttcgaaggcaacgacgatgccgcactggagcgcatcaaggccttgttccgcagccagctgcagccggtgctgggcgacaccccgctggggttctga

SEQ ID NO: 496289 - DNA, 714 bp, Stenotrophomonas maltophilia
atgagcccgaccccgattgatgccagcgtgccggccgcgcgcgtgctggtgatcgatgatgaaacccagatccgccggttcctggacatcagcctgcgcgcgcagggctaccaggtgcgacaggccgccaccggccaggaaggcctgcagctggccgccagcgaggacatggacctggtgatcctggatatcggcctgccggacatggaaggccacgaggtgctggaacagctgcggcagtggagccaggtgccggtgatcatgctgaccgtgcgcgccggcgaagccgagaaggtgcgcgcactggataccggcgccaacgactacgtgaccaagccgttcggcacgcaggaactgatggcgcgggtgcgggcgctgctgcgcacgcgcagcgtacccagtgatggcacgccaccggtgttcgacgacggccacctgcgcgtggacctggtgcgccgcgaagtcgccctgcagggtgaaccggtggcgttgacccgcaaggaatacgcattgctgtcgctgctgctgcgcaatgccgggcgggtagtgacacagccgcagatcctgcaggagatctgggggccgacccaccagcacgatacccattacctgcgcatcctggtcggcaagctgcggcacaagctgggcgattcggcgctggattcacgctacctgttcaccgaaccgggcgtgggcttgcgattcaaggggtga

SEQ ID NO: 496290 - DNA, 2661 bp, Stenotrophomonas maltophilia
atgactgatgcgcgtacccgccaggccgatgccctggtggaaggcctgcaacgcgaagccggtggcaagctgaccgtgttcctcggcgctgcgccgggtgtgggcaagacctacaccatgctgacccgtgcccaggagcagctgcgccgcggcgtggacctggtggtcgggctggtggaaacccatggccgcgccgaaacccaggccctgctggaaggcctgccgcagctgccgttgaaggacgtggcctatcacggccacgccctgcaggagatggacctggatgccgtgctggcacggcatccagcgctggtgctggtggacgaactggcccatcgcaatgcgcccggcagccgccatgagcggcgctggcaggatgtgatggagctgctcgacgccggcatcgacgtctggaccacggtcaacatccagcatctggaaagcctcaacgacgtggtgatgcgcatcaccggcgtgcgggtcagcgagaccgtgcccgatggcgtgctcgatcgcctgcacgacatcgtgctggtcgacctgccgccgcgcgaactgatcgcgcgcctgcagcagggcaaggtctatgtgccggagcaggccgcgcaggcacttcaggcgttcttctcgccggccaacctgaccgccctgcgtgagctggcgatgcaggaagccgccgaccgcgtcgacagcagcctgcgtgaaacccgcgccgcacggggcgaaggcaacctgccgctacggcgcggcgtgctggtggccatcgatggcggcggccagagcgagtacctggtgcgggtggcgcgccgcatcgccgagcgccgcgacgcaccgtggacggtggtgaccgtgcagggccggcgccaggacgaggccacgcggcgcgagatcgatgcggccttcgccctggcacggcgcctgggtggcgacgccgaactgctgcacggatcgagcatcgccgatgccctgctggaccatgcagcgcacaacggtgtatcgaccctggtgctgggacggacccgtgagcgcccgctggcgcggatgttcaaccgaaccctgacccagcagctgatccagcgcggcgcgcactacgagatcaccatcatcagcacgccgcaggcccgggcgcgctcgcgccgcgaaggtctgctgccaccgatgcgcggcatcagctacgagccggtacaggcactgatcgccaccgcgctggcctgtgcggtggcttggctggccgaacgctgggtcggcatggccgacctgtcgatggtgttcatcgtggcagtggtgctggtggcggcgcgcacgcgtgccagcgtggcggtgatggcggcgatcctgtgcttcctggcctacaacttcctgttcatcgcgccccgcttcaccttcgccatcggtgcgcgccaaggcgtgatcaccgtgttcctgttcctggccgccgccttggtggccggacggctggcctcgcgcctgcgcatgcaggtcattgcgctgcgtgcggccaaccgccatgcacgtgcacgccagcagctgggccgtcagctggccagcgccgctggcaacggcgaggtggcacaggcaggtcggcatgccttggagcaggcgatggatgtgccggcgtggctgcggatcggcgcggacactgccgccggtggccgcagccaacccggcgataccgacctggctgccgccgactgggcgctgcgccacggccagcccagcggccgcttcaccgacaccctggccggtgcgcagtggtggttcctgccattgctggatggcgaagatcgcgcgatcggcgtggccggcctgtacctgcccggcgcacaggcacgcctgctgcccgaacagcggcagcttgccgaagcgatggtcgatgacatcgcgcaggccgcactgcgtacccggctggtggccgaactggaacaggcgcatgtcagcaacgagaccgagcggttgcgctcggccctgctctcttcggtgtcgcacgacctgcgctctccactggcggcgatgatcggttcggccgacagcctggccagttacggcgcggcgatggacacggccgatcgccgtgccctgctggacaccatcctggtcgaaggcgagcggctggaccgctacatccagaacctgctggacatgacccgccttggccacgaaggtctgaagatcaaccgtgactggatcggcgtggacgaactgatcggctcggccgcacggcgcctgcagcgctaccagcccaaggtgcggctggagctggacattccgtccacgctggcgccgatctgggtacacccggcgctggtcgaacaggccgtgttcaacgtgatggagaacgcggccaagttctcgccgcccgacgccgccgtgcaggtgcaggcgcgcgaactggacggccagctgcgcatcgacgtgatcgatgccggccccggcattcccgacgacgagcgcgcgcgcatcttcgacatgttctacagcgtcgagcgcggcgaccgcggccgccacggcaccggcctgggcctgaccatctgccagggcatgatcggcgcacatggcggcagcgtgcaggcgctgcccggacgcgacggtcgcggtaccctgatccgcatcaccctgcccctgctcaagccagcctcccacgatgagcccgaccccgattga

SEQ ID NO: 496291 - DNA, 651 bp, Stenotrophomonas maltophilia
atgaaccgttctgcttccacctccaccacccttccccgcgaaccgaaggccgaagcccgcgtggccagcctgcaggacggcgccggctggcgcccggcgatcggcctgggcctggccaccctgctgctggccggcgcggtctacgccggcatcgccaccggtttcgccggcctggcctaccccacccaggccgagggcagcctgctgcgcgacggcaacggccaggtgcgcggctcggcctggctgtcgcagccgttcaccggtgatggctacttccaggcacggccgtcggcggccaactacgacccgatggccgcggccggttccaacctggcgcgcagcaacccggggctggccgagcgtgttgccgccagcacggcggcggtggccgcgcgcgaaggtgtcgccccggcgcaggtgccggccgacctggtcacccagtccggcggcgggctggatccgcagctgtcgccggcggcggcgcagctgcaggtggcacgcgtggcacgtgcccgcggcctgccggtggagcgcgtgcaggccttggtgcaggcacatactgaagggcgccagtggggcgtgctcggccagccgcgggtgaacgtggtgacgctgaacttcgcgctggaccatgcggccaaggcgccgtga

SEQ ID NO: 496292 - DNA, 2058 bp, Stenotrophomonas maltophilia
atgagtacccaagcaagttcaacccgtagtacccatgcaccgcgccctgccctgcttgatggcgccggcctgcgccgtgcgctggtcgaagcagtgcgcaagctggcgccgatgcatctggtgcgcagcccggtgatggcggtggtgatggccggcacgatcgtcgccgcgatcgtcaccctgaccggcaatgcaccgctgggcttcggcttggcagtgaccgccatcctgctggtgaccgtgctgttcggcaatttcgccgaggcagtggccgaagcgcgtggccgtggccaggccgcctcgctgcgccgtgcccgccaggacctggtggcgcgccggctggcggcgccgcagccgggtgcagccgaagcccaggtgcctgccgccgagctgcgcccgggcgaccatgtgatcgtcagtgccggtgagctggtgccggccgatggcgagatcgtgcagggcctggccaccatcaacgaagcggcagtgaccggcgaatcggcaccagtgctgcgcgaggccggtaccgaccgttccggtgtgatcggtggcaccaaggtgctgtccgaccagatcatcgtgcgggtgaccgccgagccgggccacagcttcctggaccgcatgatcgcgctggtggaaggtgccaatcgccagaagacccccaacgagatcgcgctgacgctgctgctggcggcgatgacgctgaccttcctggtggtggtggccacgttgccggcgatcggcgcggccgtgggcgtgcaggtcgatccactgctgctgatcgcactgctggtgtgcctgatcccgactaccatcggcggcctgctgccggccatcggcatcgccggcatgaaccgtgcgctggctgccaacgtgctggccaagtcgggcaaggcggtggaagtggccggcgacgtcgacgtgctgctgctggacaagaccggcaccatcacctacggcgaccgccaggccagccacttccatccgctggccggcatcgacgccagccagctgcgcgaggccgcactgctgtcctcgctggccgacccgaccccggaaggcaagtcgatcgtgcgcctggcgcgcgaacagggctgcgccaccgccgagccggaccgtgccgactacctggcgttcagtgcccagacccggatgtccggcgtcgatctggaacacgggcggcagatccgcaagggcgctgccgatgcgatccgcgcccacgtgcaggcgctgggcggcaacgtgccggctgaactggccggccgcgtcgagcaggtcgcgcgcaatggcgccaccccgctggtggtggccgagggccgccacgtgctgggcgtgatcgagctgtcggacgtggtcaagcacggcatgcgcgagaagttcgcacagctgcgggcgatgggcatccgcacggtgatgatcaccggcgacaacccgctgaccgctgccgccatcgccgccgaagcgggcgttgatgactacatcgccgaggcccgtccggaagacaagctggcacgcatccgccaggaacaggccggtggccgcctggtggcgatggtgggcgatggcaccaacgatgctcccgcgctggcccaggccgacatcggcctggcgatgaactccggcacgcaggcggcgaaggaggccggcaacatggtcgacctcgattcagacccggccaagctgctggcggtcgtggaagtgggcaaacagcagctaatcacccgcggtgcgctgaccaccttctcgctggccaacgacgtgtccaagtacttcgcgatcctgccggcgctgtttgccgctgcggttccggccatggccgcactgaacgtgatgcagctgtcgagcccacgcaacgcggtgctggcggcgctgatcttcaacgcgctggtgattcccgcgctgatcccgctcgccctgcgtggcgtgcgcttccgcccggccacggccaccgcgctgctgcgccggaacatgctggtgtacggcctcggcggcgtgctgttgccgttcgcggcgatcaagctgatcgacctcttccttgtcctggtattcggcgcatga

SEQ ID NO: 496293 - DNA, 1710 bp, Stenotrophomonas maltophilia
atgactgagatgcttgtcattcttgccgccagcctgctgctggcgtggccgctgggcctgtacctggcccgcgtgatgcgcggcacgccgatgaaggtcgacgtgctgttcaactggatcgaaaagccgttgtacaaggtgttcggcgtcgatccctcgcgcgcgatgtcctggcgcggctacgtgctggccttcgtgctgagcaacgtggtggtcgctgtgttgacccaggcggtgttcatgacccaggcctggttgccactgaacccggaccagatcccgaacatgcgctgggacaccgcgctgcacacgatgatctcgttcctgaccaacaccaaccagcagcactattcgggccaggcgcagctgtcctacctctcgcagatgaccggcatcaccggcctgcaggtggtgacgccgatgatgggcctggcgctggcggtggcgacgctgcgcgcgttgttctcgcgtgcgccgcaggctgcggcggccaccggtgccggcgatgaccgccaggtggcggtaggcaactactacgtggacgtggtgcgcctgtgcgtgcgtttcctgttgccgctgtgcctggtgtggaccctgctgctgaccagccagggtgtgccgtcgacgatggccggtggcccgcaggccacgccgatcgatgccagcgccggcatgaccggacagaagctgccgctgggcccggtggcggcgatggtcgcggccaagcagcttggcgccaacggtggcggctggtacggcccgaacagcagcttcccgctggagaacccgaccccgctgtcgaacgcgctggaaatcgtcggcatcctgctggtgccgatggcggtgatcttcatgatcggcgcgttcaccggccggcgtcgcttcggcgccctggtgttcagctgcatgctgggcatgtcgctgctttccaccggcgcgatgatgtggagcgaagggcatagcgccagcgccgccaccccgctgctgatggaaggcaaggaggtgcgcttcggcgccgaaggcacggcgctgtgggcggcggtgactacccaggtctccaatggctcggtgaacggcatgcacgattcgctggcgccgctgagcggtggcatcgcgatggtcaacatgctggtcagcgcgatctggggcggcatcggctgtggcctgcagcagttcatcgtctatctgctgctgggtgtgttcctggccgggttgatgaccgggcgcacgccggaactgttcggccgcaagctggagacgccccaggtgcgcctgctggccctgctggtgctgctgcagccgatcaccctgctggtgttcactgcgatcaccctggccgtgcccggcctggccggcacctccaaccccggcttccatggcatcagccaggtgttctacgagtatgtctcggcctacgccaacaacggttcgggcttcgaaggactgggtgacgccacgctgtggtggaacctgagctgctcgctggtactgctgctgggccgcttcccgctgctgatcattccgctggtggtggccgcacagctggccgccaagcgccaggcgccggagtctgccggcagcctgcagatcgaaaccccgaccttcgccctgaccctggtctcggtgatcgtcatcctgaccgtgctgcagttcatgccggcgctggtactcggcccgatcgccgatcacctgagcctgggactgcgctga

SEQ ID NO: 496294 - DNA, 663 bp, Stenotrophomonas maltophilia
atgtcccgagttcctgctgttctctttgccggcctgctgctggccgtgccgttcaccgtgccggcgcagtcgcgcgacggcggcaaggtggaaaagaagctgtactgctggaacgagggcaaggagcggatctgcagtgattcgctgccggccgatgcggtaaatcacgcccgcgaggagttcaacgcgaagagcggcctgcgcaatgcgcaggtccagcgcgcgttgaccgacgaggagcgcgccgcagccagcaccgtggcacagcagcagcagctggacctgatggccgagcagacccgccagcgcaccgagcaggcgatgctgtccacctatggcagcgaggacgacctgcgccgggtgttcgccgaacgccaggaagtgctggacaacaacctgaagaccgccgagtacaacgtcaccagcctgcgcgaatcgctggtggcgctgctgtcggccgccggtgaccgcgaactggccggtggcaaggtggccgacaagcaggccgaggcgatccgccagcggcacgtgcaactgcagtcgcagcaacgcctgcaggccggattcctgcagcagcagcaggcgctgaaggccgagatcgacagcacgctgcagcgctatcgcgagctgaagggcgtggcgcaggcgagccaggcgccgtga

SEQ ID NO: 496295 - DNA, 660 bp, Stenotrophomonas maltophilia
atgagcgaccaccgccaccgtttcctgcagctggccctgactgccgacgccctgcgcttcggccagttcaccctcaagtccggccggctgagcccctatttcttcaacgccggtcgtttcgactccggttcgctgctgtcgcagctcggcgcctgctacgccgatgccatcgatgccaccgggatcaagtacgacgtggtgttcggcccggcctacaagggcattccgctggccaccgcgatggcctgcgagctggctcagcgtggccgcgacctgccgctgtcgttcaaccgcaaggaagccaaggaccatggtgaaggcggccagctgatcggcgccgacctgaatggcaagcgcgtgctgatcgtcgatgacgtgatcaccgccggtaccgcgatccgcgaagcgctgggcatcatccgcgctgccggcggcaccccggccggcatcgtggtggcactggaccgccaggagatcgcctcggaagccgaccgtcgctcggcggcacagtcggtggccgaagaagccggcattccggtgatcgccgtggcatcgctggccgatctgcttgatttcgcctccggcaacccggaacttgtcggttaccggcagccgctggaagcctaccgggcccagtacggcgtccgttcgatccgctga

SEQ ID NO: 496296 - DNA, 801 bp, Stenotrophomonas maltophilia
atgcgcatcatcagtttcaacgccaatggcatccgttccgccgcgaccaagggcttcctcgactggttccgtgcccaggacgccgacgtcctgtgcatacaggaaaccaaggcccaggaagaccagctgaccgacccgatgttccgtccggacggccaccactgcttctatcgcgatgccatcaccaagaagggctacagcggcgtggcgatctacagcaagcgcgagccggaccaggtcatcacctcgctgggctgggcgccgttcgacgacgaaggccgctacatcgaggcgcgctacggcaatctcagcgtggtctccttctatatcccgtcgggcagctcgggcgacctgcgccagggcttcaagttcgaagtgatggaatggctgcggccgatcctcgaagcgtgggcgcgcagcggccgcgactacgtgctgtgcggcgactggaacatcgtgcgttcggcgctggacatcaagaactggaagtccaaccagaagaactccggctgcctgccggaagagcgcgactggctcaacgcgctgtgcgccgaccacggccaggccaccgatgtcgccgccggccgtggttgggccgacgcctaccgcctgctcaaccccaccggagaggactacacctggtggagcaaccgcggcgccgcccgtgccaacaatgtcggttggcgcatcgactaccagttcatcaccccgggcctgcgtgaccgactgcgcagctgctcgatctaccgcgacgagcacttctccgaccacgccccgttcaccgtggactacgacctgtga

SEQ ID NO: 496297 - DNA, 1305 bp, Stenotrophomonas maltophilia
gtgaccgaggccgccacgccggtcagctacaagggctgggccggcatcaagcgcgccttcggtaccccgtcggcgctgaccatggccatgctcggcttcggcagtggcctgccgttcctgctgatcgcctcgcagaccctgtccacgcgcctgcgcgacgtcgggctggacctgggcagcatcggcctgatcagcctggccagcttcttctacctgctcaagttcctgtgggcaccgctgctggaccgctacgccttcccgctgctggggcggctcggccgccgccgctcctggctgctggtgtcgcaggtgctggtgctggtcgggctggtcgcgctggccttcgtgcggcccgaacagggcgtgtggccgttggtgatgtgggtgctggtggcgtcgttcgccggcgccacccaggattcggccgtcgatgcctaccgcatcgagatcgcgccgcagaccgcccaggcggcgctggccgccacctatacgctgggctaccggatcggcctgatcctggccggtgccggcgcgctgtacctggcccagttcgaaggctggatcgtcgcctacctggcgatggccgcgctgatgctgctgccgatcgtcaccaccctgctgtgcgccgaaccgcagcgcccggccaccgccgtgcagcgccgcatcgacattgccgaagcgttcgtccagcccatctccagcttcttcagccgcaatggcgtggcactggcactggtgctgctggccttcgtcggcctgttcaagttccccgaccaggtgatcggggtgatggccgggccgttctatctcgactcggggttcgacaaggccgacatcgccaccgtctccaagctgttcggcgtgtggatgggcatcggcggcgcgttcctgggcggcatcgcggtggccgcattcggcttccgccgcatgctgctggtggccgcgctgggcgtggcgctgtccaacctggccttcctgctgatggcgcacaatccgggcaagctgtgggcgttctacgccgcgctcagtgccgacaacctgttccagggctttgccggcaccgtgctggtggccttcatgtcgtcgctgaccgaccgcaacttcaccgccacccagtacgcattgctggtctcgctggccaacctgccgggcaagttcgtcggtggcgtctccggctacatcgtcgaagccacgtcctacagcacgttcttcatcctcagctcgatcaccgtggtgccaaccctgctgctgctggcgtggctgtggccgcggatcgccgaccgcgggccgccgccggtcgcctga

SEQ ID NO: 496298 - DNA, 231 bp, Stenotrophomonas maltophilia
atggccgacgttgtgctgcgggacctggacccgctgctgctggaacgcatccgacgggtcgcggtcgcccgcggctggacccacgaacagacctgcgccgccttgctggagcaggggctgttcagcagtgaactggaggtccgctccggcttcggcgatcccgaagtggacgccctctccgccgcgattgccgccctgcaggccctgccggcagggcagggcttcgattag

SEQ ID NO: 496299 - DNA, 1128 bp, Stenotrophomonas maltophilia
atgaacacgactgccgacgctgacgcccccctgtaccttggcctgatgtcgggcaccagcgccgatggcatcgatgccgcgctggtgcagttccccgccggcggtggctgccgcttcgtgcacggcctgaccgcccgctgggagccggtgctgcgcgcgcggctggtggcgctgggcgaaggtggcccgctggagtcgctggaggaactgggcgaactggacgcgcggatcgcgatcaacttcgccggggccgccaatcaactgctggccgaggccggcgtggaccgcagccaggtgcgcgcgatcggctcgcacggccagaccgtgcgccaccgcccgctggccgacccggcgttcaccgtgcagctgggcgacggcaaccgcattgccgaactgaccgggatcacgacggtatccgacttccgccgccgcgacgtggcggccgggggccacggtgcgccgctgatgccggccttccacctgggcatgctgggcaccgccgacgaagaccgcgcggtgctcaacctgggcggcatcgccaacctgaccctgatcccgcgcgaaggcgcggtgcgtggcttcgataccggcccggccaatgcgctgatggacgcctggtgccagcgccataccggccgcaccttcgatgccgatggcgcttacgctgccattggcacgttggacgagggcctgctggccggctggcgctcggacccgtggttcgcgctgccgccgccgaagagcaccgggcgcgaacagtttcacctgtcctgggccgaagcccacatgggggaaggcgagtacgccgctgccgatgtgcaggccaccctgctggagctgaccgtggcgaccgtggccgatgcgttgctggcgcagcagccgcagacccggcgcctgctggtctgtggcggcggtgtgcgcaaccggcagctgatgaagcggctggcggcgcggctgccggaggtgcaggtggagtccagcgcggtgcatgggctggacccggagtacgtggaggcgatgggcttcgcctggctggcgcagcggacgatggacgggctggcgggcaacctgccgagcgtgaccggggcaacgggcccgcggatcctgggggcgatccacctggcgtga

SEQ ID NO: 496300 - DNA, 1473 bp, Stenotrophomonas maltophilia
atgcacaattccgaacaagggcgcgcacgcaagcagcgcttccaggaacgcctccacgtcctgcacgacaacaccctgcatcggaagctcaggcaacatcttcccgccgccttcaatgagcgctggacccgccgccattggatgcacgccagcctgtttgcgaccatcggcgccctggtggcgacgatcgtccccggtttctcgcacaccatcgatgcgccttacgccgacagccacaccagcctggcgctgccgttgccgccgctgaccatggcccgccagcagcaggtgccgggtgacagctggcaggtgctgcgcgtgcagcgtggccagaccctgagcgacctgttcgacaaggctggcattccggccaccaccctgcaccgggtgctggaccaccccggcgcgcgtgaggcgttgaccaaactgcgcccgggtgccgagatcgccttcgacatgccgctgtccggcgacctgcgcagcatccgtttcgaccgcgatgccgacaaccgcgtggaactgagcctggccggcgatgacatcaaggagaaagtgaccaagcgcgagtcctccacgcgcaccgtggtcaccagcggcgagatcaccagttcgctgtatgccgcggcccgacgggccgggctgtcgccgtcggcgatcgcgacgatgaccgacgacatcttcaagtacgacatcgacttctccaaggacctgcagccgggcgaccgcttcagcgtggtgatggatgaaacctggcgcgaaggcgagaaggtggacaccagcaagatcctggcggcgaccttcaccaccggtggcaagacctattccggcttccgcttcgaccgcaacggcaagtccgagtactacgacatcaacggccgttcgctgaagaagagcttcatccgcatgccgatcccgttcgcgcggctgagttcgaccttcggcgcacgcaagcacccggtgctgggcaagatgcgcatgcacaagggcgtggactacgccgcgcgcaccggcactccgatcatggccgcgggcgatgcccgcgtgcagttcgccggcgtgcagcgcggctacggcaacgtggtgatcctcgaccatggccgcggccacaccaccctgtacggccacatgtcgcgctttgcgaacatcaggaccggccagcgcgtggcccagggcacggtgatcggctacgtcggttcgaccggcctggcgaccgggccgcacctgcactacgaattccgcgtcaacggcgagcaccgcaacccgctgaccgtgaccatgccgccgccggaaccgctgaagggcgccgagctggtcgccttccgcgcgcagaccgcgccggcgatggcgcgcatccagggcatggagaagctgatctacgccgacgccagcccggcaccgaccagccgcgacgaggctgcgcccgaggtggccagcgccaaggacaagcaggcgaccggccgcaagcgcggctga

SEQ ID NO: 496301 - DNA, 1212 bp, Stenotrophomonas maltophilia
gtgtcctcgattgaagaagcccttgccctgatcggccgtggtgccgacgagatcctcaagctcgaggatctgcgtgcgcgcctgcaggaaggccgcccgctgcggatcaaggccggcttcgaccctaccgcgcccgacctgcacctgggccatacggtgctgctgaacaagatgcgccagttccaggacctgggccaccaggtcattttcctgatcggcgacttcaccggcatgatcggcgacccgtccggcaagagcctgacccgcaaaccgctcagccgcgatgacgtgctcgccaacgcccgtacctacgaggaacaggtgttcaaggtgctcgaccgcagccgtaccgaagtccgcttcaactcggagtggttcggcaagatgggcgcggccgacatgatccgcctggccggccagcacaccgtggcgcgcatgctcgagcgcgacgacttcgccaagcgctatgccgcccagcagtccatcgccatccacgagttcctgtacccgctggtgcagggctacgattcggtggccctggaggccgacgtcgaactgggcggtaccgaccagaagttcaacctgctgatgggccgcggcctgcaggaacaccacggccagaagccgcaggtggtgctgaccatgccgctgctggaaggcctggacggcgtcaacaagatgtccaagtcgctgggcaactacattggtatcagcgagccggccatcgacatcgtcaccaagaccatgaaggtggacgacaccctgatgtggcgctggatcgaactgctgtccttcgacatcagccaggccgaagccgtgcagctgcgcgagcaggtggccaatggcggcttgaacccgcgtgtggtcaagctgcgcctggcgcgtgaactggcgacccgtttccacgacgccgccgcggccgagcaggccattgcaggctgggaagcagcggtgaccgggcagggtgacattacccagctgccgctgcaggaggtggcgattccggccgaaggcctgcgtatcgctgcgctgctgacggcggccggcctgaccccgagcaactctgaagccaaccgcaagctcaaggagcgcgcggtcaaggtcgacggtgaagtggtcgaagatggccagcaggtgctgcagccgggcttcgaaggcctgctgcaggtcggcaagcgtactttcgcccgcgtgcgcctggtcactgcctga

SEQ ID NO: 496302 - DNA, 1650 bp, Stenotrophomonas maltophilia
atgagtgcatcggtccaacgccccgcccgctcttctgcgctggcgggtcttcgccactggcggccacagctgtccaccgaagcactgatcgcgttcaccagcctgttcttcgcggtggccggcaacggcctgttctggcacagcgcgatggccagccatccgggcagcctgcgctacgcgctgtcgctgctgctgttgctgctgggtgcgcacggcgtgctgctgggcatcctggtctggcgctggaacgccaaggtggtgatcagcctgctgctgctggtgaccgcattcgccgcacactacatgagccgctaccacatctacctggatgcggacatgctgcgcaacgtgctggcgaccgaccccaaggaaagccgcgagctgatgacggtatcgctgctgtggccggtactgctgctggcagtgctgccgatggtggtgctgtggcgcgtgcagctgcgccgccgcagctggggccgcagcctgctctggcgcgtcggcttcctggtggtggcggcagtgacggctgtcggcggcgcgttgatctcgttccaggatgtctcggcactgatgcgcaaccagcgtgaagtgcgctatctcgcgacaccggccaatgtcctgttgggcatgccgcgtgcattgcgtggcgacaatccggtgcagcgcgcgccgaagctgccgatcggcaccgatgccaaggccaccccgcgcgcgccggccagcaagccgcgcctgctggtgatcgtcatgggcgagaccgtgcgtgcgcagaactgggggctcaacggtggccgcaacaccaccccggaactggcgcaggccagcgtgatcaatttcccggacatgcattcgtgcggcaccagcaccgaggtttcgttgccgtgcctgttctcgccgtggggccgccatgactacgacgagaagaagatccgcgcgcaccagtcgctgctgcacgtattgaaccgtgccggcatcgcaccgttgtggcgtgacaaccagtccggctgcaagggcgtgtgcgaaggcctggacttccagtcgctgtccgatgccaccacgccgggcctgtgcgccgatggccgctgcatggacgagatcctgctgcaggacctggccacccaggtacgcgccaggcccggcgaccgggtggtggtgctgcaccagctgggcaaccacggtccggcctacttcgagcgctatccgcccgcattccgccgtttcaccccgacctgcgatacccgtgacattggccgttgctcgcgcgaagagatcaccaacagctacgacaatgccgtgctgtacaccgatcacttcctgacaaagaccatcggcacgctgcagggcatgcaggattacgacacggcgatgatctacctgtccgaccacggcgagtcgctgggcgagaagggcctgttcctgcacggcgtgccctacgccatcgccccggccgagcagacccgggtaccgatgacgatgtggttctcgccgggcttcgccagcagccgcgggctggacctgcagtgcgtgcgcaagcgttcggcggcgtataccgaccatgacaacctgttcccgtcggtgctgggcctgatgcaggtgaagacctcgctgtacgagcgtgatcgcgacctgttcgccaactgcgagagttga

SEQ ID NO: 496303 - DNA, 768 bp, Stenotrophomonas maltophilia
atgcccgttcgtcccattgatgcggttgcgccgcttgcgacatcaccactggcgtcaagattcgccgtaactcacttctggctgcctgtcgcaatcggtctgcccgtgtttacgctgctgatgggtttcggcggtgatcaatgggtggccgatcacctgttccgcctcgaaggtggccactgggcgttgcaggacgcctgggtcacccgcacggtggtgcacaaggccggcaagtggctgagcacatcggcggcgctggtcgcgatcctgttgtgcgtgcaccactggcgcaaggggggcgatcgcaccctgcgatgggcgctgctttatgtcgtaattggcatggcgctgggtacgggcgtgatctccctgctgaagaccctggtgccgatggaatgtccctgggacctgctgcgctacggtggccatcagccctatatcgggcttttcacgcagcgcccggccggcatggccgcacaggcctgcttccctgccggccacgccagcgcaggctatgcgtggctgtgcctgtactatttcgccctgctgtggcgcccgtcgtggcgctgggcaggcttgtggatcggcctcggcaccggcctggtgttcggcatcagccagcagctgcgcggcgcgcatttcctttcgcatgacgttgccaccgcgttgatatgttggctgctgtcactcggcctgtacctgatcgtcaaaggcatcctgatccgccgtcagctggaccgtcccaaccgccaggaggcaaacgcatga

SEQ ID NO: 496304 - DNA, 1704 bp, Stenotrophomonas maltophilia
gtgcccgtagccctgccccgccgttggcgcctgcccctgttgtggctgctgatcatcgccgcgttggccgccggtatcggcctgcgccagccgcagccgccggacgagccgcgcttcgtgctggcggcccgtaccatggtcgaaagtggggaatggctgctgccgcaccggggcgtggagctgtacgcggagaagccgccggtcttcatgtggctgcaggcggccgcttacgaggtggtcggcagctggcaatggtcgttcctgctgccgtcgctgctgggcgccctgctcagcctgtggctggtgtcggacctggcacggcggctgtggtcaccccggcattccctgtacgccctcgcggcgctgttctgcaccctgcagttcggcctgatggccaagcgcgcgcagatcgacatggtgctggtcggcatgaccacggtggccctgtggggactgatgcgccacctgtgcgagcgccgcaacctgcccgcgctgtggctggccggtttcgccgctggcctcggcacggtgaccaagggcgtggggttcctgccgctgctgatggtgctgccgtggttcggctggtggctgtaccagcgccgccgcgggcgcagcgtggacggtccgcacccggcaacgctgctgtggctgatcccggccttcctgctgggcgtggcggtgtggcttgccccgctgggctgggcattgctgcatgagcccagcgcgtccctgcagtcctacgcccacgaactgctgttcaagcagaccggcacccgctacgccaacgcttggcaccaccgccagccggtctggtactacctgcaggtgatcctgaccttgtggctgccgggcagcctgttgctgccgatgctgttcaaaccctggtggcgccgcatccgccgtggtgactgccggcaatggctgctgttgggctgggcgctgctggtgctggtgttcttcagtgccagccccggcaagcgcgaggtctatgtgctgccaatgctgccggcgatggcgctggcggtggccccgctgttgcctggcctgctgcgacggctttgcgtgcggcgctacctgttcggctacaccgtggtgctgatgctggccaccggcgtgctcggggtcatgctgatgaccgaacatccgtgggccctggcgcagctggaacggcgggcgatgcccgattcgctgctgccggtgctgggagatggcctgctgacctttgccattgccctggccacgttgatcgtgtggctgcgggtgcgacgtgccgcaacgctggtgttgctgacccacggcatgctgtggatgctctacggcctggtgctgatcccggcgctggatccgtacgcatcagcgtcggcggtgatgcgccgggtgggcgcgcggatcggcccggatgcggagctggcactggtcgcctggcgcgaacagaacctgctgcaggcagatcggccggtgcgcgagttcggcttcaagcgcccgtgggccgaacaatggcatgacgccggcccgtggctggccgaggcgccgggcaagcgctgggtgctggtgctggacgatgcgatgagcccctgcgtggacccggccaaggtgatcgacatcggcattgccaacaggaatcgttggcaactgcttcccggtacggcctgggacccgaagtgccacgccgagcgcaccggatcgaccgccgaagaagactga

SEQ ID NO: 496305 - DNA, 714 bp, Stenotrophomonas maltophilia
atgcgtctgttggtgatcgaggacaaccgccagctggtggccaacctgttcgactatttcgagtcgcgcgggcacgtgctcgacgtggccccggatggcatcaccggcctgcacctggcaggcagccacccctacgatgcggtgatcctggactggatgctgccgcgcatggaggggccggaggtgctgcgtcgcctgcgcgccgagcacgcgtcggaggtgccggtgatcatgctgaccgcgcgcgacgagctgccggacaagatcgccggcttccgcgccggtgccgacgactacctgaccaagccgtttgccctgcccgagctggaagtgcggctggaggcgctgctgctgcgcgcgcagggccgcaatccgcgcaagcgcctgcaggtgggcgacctggtgctggacctggcgaccctggaagcccagcgtggtggccaggtgctgcatctgtacccggcctgccgcaagctgctggaagtgctgatgcgcgccagccccggtgcggtcacccgccagcagctggagttcgccctgtggggcgacgagccaccggatggcgatctgctgcgctcgcatgtctacgagctgcgccgcagcgtcgacggcccgtttgccgacaagctgatccatacgctgccgcgggtgggctatcggttggcgctgatggacgctgccgacgcaggcaggaatgctgatgagggcgcgtaa

SEQ ID NO: 496306 - DNA, 1287 bp, Stenotrophomonas maltophilia
atgagggcgcgtaagccggggccgctgtaccggcgggtggtgtggtggttgctcgggtacctggcactgctgtcgattgcagtattcagtgtcggcaactacgtgcacgaacacgccgagcacgccgcgtggcgcgcgctgctcaattccgaactggacagcatcgtcgagcatgtcgagcacgaacctcactatcgctggcaggactcggacacgctgagcctgtaccgctttgacgcagtcaatctgccagagagcctgcgctccctgcatcctgggttgcatgacggcgtgatggtcaagggccgcgagacggcggtgatggtccgtgaaacgcagtcgatgggacgggtggcgctggcgcttgacatctccgatttccatgacctggaacagttcgccacgcgctgggtgatgctggccggggtgatcatgatcttcgtcaccgtgctgatggcgtcgttcggcatggagcggatggtgcgtccgttgagcctgctggcacagcacattgccgggctgcggccgggcgtccagggccagcgtatcgaagtcgatccgcgcggcagcgctgagctgcataccatcgccggtgcgttgaacgactatctggaccgcaacgagcagttcgtcgagcgcgagcgggtcttcatcagcaccgccagccacgaactgcgcacgccgatcgcggtgatgaccggtgctgccgagctcgcgctggagcaaccgggcctgcccgagcgcgcccgccagcagatgcagcgggtgttgcgcacagcgcagagcgtggagcagctgatcgagctgctgctggtgctggcgcgtgatccggcacgcctggccgcgcgtgccgagcgcatcgccctggaccagctgctgccggagatcgtcgacgaccatcgccacctgctgggcgacaaggacctgagcatcggcatccaggcggcgccggtggatatcgttgcgccgatggcagtggtgcaggcggcgatcggcaacctgctgcgcaatgccatcgagaacagcggccgcggccatatcgagctgcagttgagtgcgtcggcggtgctgacgctgcaggacccagggcatggcatgagcccggaggagattgccgccatccacgcgcgcatggcccgtggcggacgcgccgatcgtggcagcggcattggcctggacctgatcgcgcggttgtgcgagcacctgggctggaccctgcagctgcagccctgcgagccgcgcggaacgcgtgtcacgctcgatttcagtgcctcgcgcccggcctga

SEQ ID NO: 496307 - DNA, 390 bp, Stenotrophomonas maltophilia
gtgcagcttggtgcgttctctgtcagcctgtccgtgaaggacctggccgcctcccgcgcgttccacgaagccctcgggttctcggtcaccggtggcgatcccacgcagaactggctggtaatgcgcagcaacggcacggtcatcgggctgttccagggcatgttcgagggcaacctgctgaccttcaaccccggctgggaccagcacaggcaggagctgccccacttccaggatgtgcgtgaactgcaggcggaactggatgccaagggcatcgaactggcagtccgcactgaccccgatggccaggggaccggctacctgcagctggccgatcccgacggcaacgtgatcctgatcgaccagcacgtggcgcggccgaacgggcggtaa

SEQ ID NO: 496308 - DNA, 1251 bp, Stenotrophomonas maltophilia
atgccgaccgaacccgctaccgccctgatcagcaacgacatcgttggactgggcctgattgccgccaccctggccctgatcttctgggccgccagtggtccgaccccgttgttgaagaagatcttcgcctgggtgccggcactgctgctgtgctacttcatccccgccatctacaacaccgctggtgtcatcgatggccacaacaccttgctctacaacccggtcgcgcgcgacgtgctgctgcccgctgcgctggtcctgctgacactgtcgatcgacctgaaaggcgtcatcaagctcggcccaaagctgctgatcgtgttctgtgccggtaccgccggcatcatgctcggcgccatcgtctcgttccagctgatgaagctgatccatccggaaacggtggccggtgatacctgggccggcatggccgcgctggccggcagctggatcggtggcggcgccaacatggtggccatgcgcgaggtgttcggcaccgatgccaccacctttggccagttcgcggtggtcgacgtggcctgcgccagcctgtggatggcgatcctgctgtttttggccaaccgcgcgcagcagatcgatacccgcaacggtgccgacacccgcgccatcgacgagatgaaggcgcgcatcagcgcctacgaggcacagaacgcgcgcattcccagcatgaccgacctgatggtgatcgttggcgtggcattgggtggcgtcggcctggcccatgccatcgccgcgccgttgtcgggctggttcaaggccaatgtcagctgggccagccagttcagcctcgacagccagttcgtctgggtgatcctgctgtccacggcgatgggcctgggcctgagcttcacccgtgcgcgccggctggaagccgcaggcgcttcgcggctgggcacggtgttcctgtacttcctgatcgcctgcatcggcatgcagatgaacctgctgtcgctgctggatcggccgtggctgttcctgcttggcgcgatctggatggccacgcacgtgctggtgctgtggggggtagccaagctgctgcgtgcgccgctgttcttcttcgcgatcggttcgcagggcaacatcggcgcggccgcctcggcccccgtggtggccgcagccttccatccgacgctggccccggtgggcgtgctgctgggtacggtgggctatgccaccggcaccgggctggcgtatgtcaccggcctgatcctgaagtggatggccggcgcctga

SEQ ID NO: 496309 - DNA, 225 bp, Stenotrophomonas maltophilia
atgagcacgcaactggttcccgccggccagtaccaggcgcaccgccgcatctggcggcgcctggtgcagaccgcacgactgtgctgcggcattcctgactacgacaactacgtccggcacatgctggataagcacccggaccaggagccgatggactacaagacgttcttccgcgagcgccaggaagcgcgttacggcggacgcaacggcgggcgctgctgctga

SEQ ID NO: 496310 - DNA, 2082 bp, Stenotrophomonas maltophilia
atgaaagggttttccaaactgggctgggcggcactcgccctgctcggcgcattctgtctgggcaccgtcgccctgcgccgcggcgagcacatcaacgcactgtggatcgtggtggccgcggtctcgctgtacctggtcgcctaccgcttctacagcctgttcatcgccagcaaggtgatgcagctggatccgacccgggccaccccggcggtgatcaacaacgatggcctggactacgtgccgaccaacaagcacgtgctgttcggccaccacttcgccgccattgccggcgccggcccgctggtcggcccggtgctggccgcgcagatgggctacctgcccggcctgctgtggctggtggtgggcgtggtgctggccggcgcagtgcaggacttcatggtgctgttcctgtccagccgtcgcaacggccgctcgctgggtgacctggtgcgcgaggagatgggccaggtacccggcaccatcgccctgttcggtgcgttcctgatcatgatcatcatcctggcggtgctggcgatggtggtggtcaaggcgctggccgaaagcccgtggggcatgttcacggtgatcgcgacgatgcccatcgcgatcctgatgggcgtgtacatgcgctacatccgccccggcaggatcggcgagatttcggtggttggcctgatcctgctgctggccgcgatctggtacggcggcaaggtcgccgccgacccggtgtgggggccggcgttcaccttcaccggcacccagatcacctggatgctgatcggctacggcttcgtcgcctcggtgctgccggtgtggctgctgctggccccgcgcgactacctgtcgaccttcctcaagatcggcaccatcatcgcgctggccatcggcatcctggtggtgatgccggaactgaagatgccggcgctgacccagttcgccgccagcggtgatggcccggtgtggaagggcggcatgttccccttcctgttcatcaccatcgcctgcggtgcggtctccggtttccacgcactgatctcctccggcaccacgccgaagctgctggccaatgaagcgcacatgcgctacatcggctacggcggcatgctgatggaatcgttcgtggcggtgatggcgctggtggcggcctcgatcatcgatccgggcatctacttcgcgatgaacagcccggccgccgtgatcggtgccgatgcagcctcggcggcgcactacatcaccaacacctggggcttcaccattacccccgagcagttgaccgcgaccgcggctgccatcggtgaaccgaccatcctgcaccgcgccggtggtgcaccgacgctggcggtaggcatcgcgcagatcctgcacgaagcgattcccagtggcagcgacgcgatgatggcgttctggtaccacttcgcgatcctgttcgaagccttgttcatcctgaccgcggtggacgccggcacccgcgccgggcgcttcatgctgcaggacctgctgggcaacttcgtgccggccctgaagaagaccgagtcgtggaccgccaacatcatcggtaccgccggctgcgtggcgctgtggggctacctgctctacaccggcgtggtcgatccgttcggcggcatccagacgctgtggccgctgttcggcatctccaaccagatgctggctggcatcgcgctgatgctgggcacggtggtgctgttcaagatgaagcgtgaccgctatgcgtgggtcactgcggtaccggcggtgtggctgctgatctgcaccacctacgccggcttcatcaagatcttcgacagcaacccggcgcagggtttcctggcgcaggcacacaagttccaggccgcgctcgccagcgatacgatcactgcaccggccaagtcggtggcgcagatgaagcagatcgtggtcaacgcctacgtcaacaccggcctgaccgcgctgttcctgctggtggtcggcgcggtgctggtgtattcgatcaagaccatcctggcggcacgccgcaacccgcagcgcagcgaccgcgagaccccgtacgtggcgctgaagccgcatgaaatggtggatctgtga

SEQ ID NO: 496311 - DNA, 852 bp, Stenotrophomonas maltophilia
atgagccttcccgaaccggtccgcgtgctgcgcaccatccgtggcatgcccacctccgacggtgccggcgtgcgcctgacccgcgtcatcggcggcccgacgctgccggacctggacccgttcctgctgctcgatgaattcggcaccgaccgggccgaggactacatcgccggcttcccggaacacccgcaccgcggtttcgagaccgtcacctacatgctcgacggacgcatgcggcatcgcgacaaccatggcaacgaaggcctgttgaccccgggcagcgtgcagtggatgaccgctggccgcggcctggtgcactcggagatgcccgagcaggaaagcgggcagatgcgtggattccagctgtgggtgaacctgccggcgaaggagaagatgaccgagccgaagtaccaggagttcgcgcccgagcgcattcccgtggtgcagccggcagccggcgtggaagcgaaggtgatcgccggctcggtcgacggcacccgcggcccgatcgtgcagccggccaccgagccgctgtatctcgacatcacgttggcgcccgaccgggcctggacttacacgctgccggaaggccacaacgcctttgcctatgtatttgaaggcggactgacggtgggtgaacaggacgccgcccgtgatgttgcacgccaggagctggcggtgctgggcggcggcgaacagctgcatgtttcggctggcagcgaaggcgcgcggctgatcctggtggccggccgtccgttgcgcgagccggtgatgcggcacggcccgttcgtgatgaacacgcggcaggaactgatgcaggccttcgtcgatttccaggaaggcaggttctga

SEQ ID NO: 496312 - DNA, 459 bp, Stenotrophomonas maltophilia
atgaagttcgtgcctgtcatgttgtcgagcctgctgttcgctgcggcccaggccgccgcgcaggcgccgtccgaatgtccttcgctgccagccagcagtggcctgcagtggcagcagcaggtgcaggccgatttcctggtctgccgcgccagcacccctgatggccgcgaagtactgagcctgatgctcagcgcgcgtgaccccgcaattccgctgagccgctcgctgcgccaggaaaaaggcagcttcggcggtgaatcactgtactggtaccagcccgacctgggcggccagcaaccgccgggatatgccgaacggcgcatcagcgtggtcaagatcgacaaagggcgttatgcgcagattgcgctgtatccggacagcgcgcaggaactgagctcactgcagcagctggcgcagggcatgagcctgaccccttcggccgtggccgccgggcgctga

SEQ ID NO: 496313 - DNA, 720 bp, Stenotrophomonas maltophilia
atgagcatgggtaaacgcttgtccgccgagttcctcggcacgttctggctggttctgggtggctgtggcagtgcggtgctggccgccaagttcggtggcgacggcaatccgctgggtatcggtttcctcggcgtggcgctggccttcggcctgaccgtggtgaccggcgcctatgcgttcggccatatctccggcgcgcacttcaacccggcagtcagcgtcgggctgtgggccggtggtcgtttcccgaccagggatctggtgccctacatcatcgcccaggttgccggcggcctgctggccggcttcatcctgctgcagatcgcctccggcgccactggcttcgccatcgatggcagccaggcgggtgcgttcgccagcaatggctatggcacgctgtcgcccggcggctacagcgtggcagccgccttcctgtgcgaagtggtgctgacggcggtgttcctgatcgtgatcatgggttccacccacggcaaggcaccggccggtttcgccccgctggcgatcggcctgtcgctgaccctgatccacctgatcagcattccggtcaccaacacctcggtgaacccggcccgctccaccgccgtggccttctttgccggcagcggagcagtcagccagctgtggctgttctgggtcgctcccctgctgggcggcgcgatcggcggcctgatctacaagtggatcggcagcgaccgctga

SEQ ID NO: 496314 - DNA, 864 bp, Stenotrophomonas maltophilia
atgaccaccatcatcgccccgcgcgtgcacgacatcggcggcctggaagtccgtcgcgccgtccccaccctgcaggcgcgcagcatcggctcgttcgtgttcgtcgaccagatgggcccggcactcatgcaccccggcaccgccatcgacgtgcgcccgcatccgcatatcggcctggccaccgtcacctacctgtggtcgggcgcgatcggccaccgcgacacgctgggttcggatcaggtgatccgtcccggtgacgtcaactggatgaccgccggccgcggtatcgcccattccgagcggacgccgcaaccggaccgcgaccatgacaacccgatccacggcatgcagacctgggtcgcgctgccgaagtcgcacgaggaaatcgagccggcgttctaccaccatgccgctgccaccctgcccgagcagcgtcgcaacggcgcgtggctgcgggtgatcgccggccgtgcgtacggcgaggaatcgccggtgaaggtattcgccgacaccctcaacgtggcaatcgatctcgaccccgatgcggaaatcgatatcgacgacggccaccgcgagcgcgcgttgtacatcctcgagggcgacgcgcagctggatggcgtggatattcccgcgcagcacctggtgatccccgaagccggtgcacgcggccgcctgcgcgcgaagacgccggtgaaggcgatgctgttcggtggcgagccgctggatggcccgcgccacctctggtggaacttcgtgtccagctcgaaggagcgcatcgagcaggccaagcacgactgggaggccggccgcttcggcaccattccgggcgacgacaaggaattcatcccgcttccgcagtactga

SEQ ID NO: 496315 - DNA, 2064 bp, Stenotrophomonas maltophilia
atgctctcaggcttcgatggtctccgcttcagccactggcaccccgagatccgcgacgacggcgtggtggttctctccctggatcgccaggacagcagcgtcaatgcgatgtcgcaggacgtgctgctggaactgggcgacctgcttgagcgcattgccctggacccgcccaagggcgtggtcatccagtcgctgaagaaggccggcttcattgccggtgccgacctgaaggagttccaggaattcgaccgtcgcggcaccgtcaacgacgcgatccggcgtggccaggccacctaccagaagctggccgagctgccctgcccgaccgtagcggccatccacggccactgcctcggcggtggcaccgagcttgccctggcctgccgctatcgcgtggcctccaatgacagcagcacccgcatcggcctgccggaaacccagctgggcatcttcccggggtggggtggcagcgcccgcctgccgcacctggtgggcgccccggcagcgatggacatgatgctgaccggccgcaccctgtcggcctcggccgcgcgtggcatcggcctggtcgacaaggtggtggcaccggcggtggtgctcgacacggccgttgcactggcgctgtccggcaccacccgcccgttcaagcagcgcgccacggcctgggccaccaacacctggctggcacgcacgctgctggcaccgcagatggtcaagcaggtcgcccgcaaggcgaagaaggaccagtacccggcgccgtacgcactgatcagcacctggcagcgcagtggcggcaagccgatccaggcccgcctggacgccgagcggcgtgccgtggtgaagctggccagtactccgaccgcgcgcaacctgatccgtatcttcttcctcaccgaacgcctgaagggcctcggtggcggtgattccggcatccgccacgtgcacgtggtcggcgccggcgtgatgggcggcgacatcgccgcgtgggccgcctacaagggcttcgaggtgaccctgcaggaccgcgagcagcgcttcatcgacccggccatggaacgcgcgcaggcgctgttcgccaagaaggtgcgcgacgagagcaagcgcccggccgtggccgcgcgcctgagtgccgacctggaaggcaacggcgtggccgaggccgaccttgtgatcgaggcaatcatcgagaaccccgaagccaagcgtgcgctgtaccagacgcttgagccgaagatgaagcaggacgccctgctgaccaccaacacctcgtcgattccgctggtggaactgcgcgaccacatccagcgccctgcgcagttcgcgggcctgcactacttcaacccggtagcgcagatgccgttggtggagatcatccatcacgacggcatggcgccggagaccgagcgccgcctggccgcgttctgcaaggcgctgggcaagttcccggtgccggtagccggcagcccgggcttcctggtcaaccgcgtgctgttcccgtacatgctggaagcggccaccgcgtatgccgagggcattccgggcccggtgatcgacaaggccgcggtgaagttcggcatgccgatgggcccgatcgaactgatcgataccgtgggcctggacgtggccgccggcgtcggccgcgaactggcgccgttcctgggcctgcagatcccggccgcactgcagacggtggaaccggacaagcgcggcaagaaggatggccagggcatctacacctgggagaacggcaagccgaagaagccggacgtggccagcgactaccaggccccggccgatctggaggaccgcctgatcctgccgctgttgaacgaggcggtggcctgcctgcacgagggcgtggtggccgacgcggacctgctggatgccggcgtgatcttcggcaccggtttcgcaccgttccgcggcggtccgatccagcacatccgtgcggtcggtgccgatgcgatcgtcgagcggttgaaggcgctgcagcagcgccatggcgaccgtttcgcgccgcgccccggctgggacaaccccggcctgcgcgaaccggtggtctga

SEQ ID NO: 496316 - DNA, 621 bp, Stenotrophomonas maltophilia
atggccgatgttgatacacctcaggagctggatctggagctggtccggcgcgtgcagcacggcgagagtgccgcgttcgatgtcctggtgcgcaagtaccagcatcgggtcgtggccctggtcggtcgctacatcgccgactggagcgaatgtcaggacgtcgcccaggacactttcatccgtgcctaccgcgcgatcgggagtttccgtggcgatgcccagttctcaacctggttgcatcgaatcgccgtgaataccgccaaaaactacctggcttcacacaatcgtcgtccgccgaccgatgacatcgacatcggtgacgccgagcagttcgacagcggtacccgcctgcgggacaccgacacgcccgagcgcgagttgatgcgccaggagctggaacagacggtcatgaaggccgtcaacgcgctgccggaggaactccggtcggcgatcaccctgcgcgaggtggaaggcctgagctacgaggatatcgcgcagaagatggggtgcccgatcggcaccgtgcgttcccggatcttccgggcgcgcgaggcgatcgacaccgaactccggccgctgttggacatcggcagcgccacccgtgagaagagccgcgtatga

SEQ ID NO: 496317 - DNA, 876 bp, Stenotrophomonas maltophilia
atgaccagtaatccgttcaacgaatcgcagaaccatcaatcgcccgccgggcagcgcctggaccagcgccatcgcgagcagctgtcggccctggtcgatggcgagctgggtgccgatgaagcgcgcttcctgctgcgccggatggaacacgaccccgaactggccggctgccaggagcgctggcagctgctgggcgacgtgatgcgcgggcaggccccggcgttggcaccggccggcttcagtgccgccgttgcggccgccattgcggcagagccgacgccgcaggccgagccgcgtcgccaggtgcgtcgcagtggctggcgcgcctggggcggcggtgctgcgctggccgcatctgtggccgcggtcgccctgttcatcggcggcgagaaattgaaggaggcgacgccgggtgaaccgcaggcgccgcaggtgatcgccagccaggcggaactgacgccggcaccggccgcgccgaccccagtcaccgaggcttcggtggacacggccgcagtggccgtggctgctgcgccggccgtagcgatggccgcggcgggccgccgccaggacgcccgccgtgccagcgctacgcgcagccagcaggccgcgcgtgccgcccagcgcgacgacacttcgcagcgcgccatcgccgccgtgcaggcaccgttgaccccgaccgtgccggccaaccgcaacctgccgttcggcgaggtcagcgggctgcaggcccggccatggccgcgctccagcctggcgcccaccgctggcggcgcgctcaatgccagcttcccggcccacgccggtagtgccgcgttctatccgttcgagccgcgcctgcaggatgacctgccggtgccgccgcgcccgcgcgactga

SEQ ID NO: 496318 - DNA, 1533 bp, Stenotrophomonas maltophilia
atgactccccgactccgcacgcaggccattggcctgctggccctgacccttcccctggtggcctgcgcacaggcgccggcgcccgtcgcgcagacccagcccgcgccagccgcggccgcgcgggcaccggcgcagccgctggtcagtggcctgcccgacttcaccaacctggtcgaacaggtcggcccgggcgtggtcaacgtcgataccaccatcgtccgcaacaaccgccaggccgcgcgcggcccgatgggcgacgatgacatgccggagttcttccgccgcttctttggtcccgacttcccgatgccggggcaggggccgggtgggccagacggtggccccagcatcaagggccgtggcatgggctcgggcttcatcatctcgcccgatggctatgtgctgaccaactaccacgtggtggccgacgccagtgacgtgaaggtcaagctgggcgacagccgtgagttcaccgccaaggtggtgggcagcgaccagcagtacgacgtcgccctgctgaagatcgacgggaagaacctgccaaccgtgcgcgtgggtgactccaacagcctgaagccggggcagtgggttgtcgcgatcggctcgccgttcggcctcgaccattctgtcaccgccggcgtggtcagcgccgtcggccgcagtacggggggccccgaccagcgctatgtgccgttcatccagaccgacgtggcgatcaaccagggcaattccggtggccctcttctgaacacccgcggcgaagtggtcggcatcaactcgcagatcttctccgcgtccggcggctacatgggcatcagcttcgcgatcccgatcgacctggcgatgagcgcggtcgagcagatcaagaagagcggcaaggtcacccgcggccagctcggcgcggtcgtggagccgatcgattcgctgaaggcgcagggcctgggcctgccggacagccgtggcgccctggtcaaccagatcgtggccggcagtgcggccgccaaggccggcgtgcaggtgggcgacgtcatccgctcggtcaacggcagcccggtcaacagctggtccgacctgccgccgctgatcggtgcgatggcgccgggcagcaaggtgaacctggtggtgtaccgcgacggcaagccgcatgacctcagtgccacgttgaccgccctgagtgaagacgggcaggccagtgcccgcgggccgtcggccggcggtcccgaggcggcgccgcagaccggggccaatgccctgctggggctggacgtgagcgacctgagcgcagctcagcgcaagcagttcgggctcaacggcaacgaaggcgtgcgcatcaccggggtcaagggccaggcggcgcgtgatgccggcctgtcgccgggcatggtgatcctgcaggtcggccgcgtcgcggtcggcagtgtggatgccctgaaccgggcgctgtccagcttcaagaaggacgacgtggtcatgctgctggtccgcacggccaatggcaacagcgccttcgtggcggtcaaggccggccagtag

SEQ ID NO: 496319 - DNA, 1794 bp, Stenotrophomonas maltophilia
atgcggaacatccgcaacttctccatcatcgcccatgtcgaccacggcaagtccacgctggccgatcgcatcatccagctctgcggtggcctgcaggcccgcgagatggaagcgcaggtgctcgattccaatccgatcgagcgcgagcgtggcatcacgatcaaggcgcagtcggtgtcactgccgtacctggccaaggacgggcagacctaccacctgaacttcatcgacacccccggccacgtcgacttctcctatgaagtcagccgctcgctggccgcctgcgaaggcgcgctgctggtggtcgatgcggcgcagggcgtggaagcccagtcggtggccaactgctacaccgccgtggagcagggcctggaagtggtgccggtgatcaacaagatcgacctgcccaccgccgacatcgagcgcgccaaggccgagatcgaggccgtgatcggcatcgatgcctccgacgccgtgccggtcagtgccaagaccggcctcaacgtgcaggacgtgctggaagcgatcgtgcaccgcattccgccgccggcgccgcgcgacaccgacaagctgcaggcgctgatcatcgactcgtggttcgacaactacctcggcgtggtgtcgctggtgcgcgtgatgcagggcgagatcaaggccggtgacaagctgcaggtgatgtcgaccggccgcaaccaccaggtcgacaacgtcggcgtgttcacgccgaagcgcaaggtgctgccggcgctgcgtgccggtgaagtgggctgggtcaccgccagcatcaaggacgtgcatggcgcgccggtcggcgacaccctcaccctggccggcgatccggcgccgaagccgctgccgggcttccaggaaatgcagccgcgcgtgttcgccggcctgttcccggtcgatgccgaagactacccggacctgcgcgaagcgctggacaagctgcgcctgaacgatgccgcgctgcgtttcgagccggaaagctccgaggcgatgggcttcggcttccgctgcggcttcctgggcatgctgcacatggaaatcgtgcaggagcgcctggagcgcgaatacaacctggacctgatcagcaccgcgccgacggtggtgtatgaggtcctgaagaccgatggctcgatcatcaacatggacaacccggccaagctgccggcggtgaaccaggtcgaggaaatccgcgaaccgatcatccgcgccaacgtgctcacccccgaggagtacatcggcaacatcatcaagctgtgcgaagaaaagcgcggcagccagatcggcatcaactacctgggcagccaggtgcagatcagctacgagctgccgatggccgaggtggtgctggacttcttcgacaagctgaagtcggtcagccgcggctacgcctcgctcgattaccacttcgtgcgcttcgacgcaggcccgttcgtgcgcgtggacgtgctgatcaacggcgacaaggtcgatgcgctgtcgttgatcgtgcaccgcagccacgctgaccgacgtggccgcgagctttgcgagaagatgaaggacctgatcccgcgccagatgttcgacgtggccatccaggctgccgtcggctcgcagatcatcgcccgcaccacggtcaaggccatgcgcaagaacgtgctggccaagtgctatggtggcgacgtttcgcgcaagaagaagcttctggaaaagcagaaggaaggcaagaagcgcatgaagcaggtcggacgcgtggagattccgcaggaagcgttcctggccgtcctgcagatggacaacaagtaa

SEQ ID NO: 496320 - DNA, 795 bp, Stenotrophomonas maltophilia
atgaaactgtttgagatcctcctggtcgtgctgaccctggcctcgggcctgatcctgctcgcggacaagctgtacctcgccaagcgtcgcgcccagcgcgcgggcctgctcgactccgagccggtgctggtggattactcgcgtgcgttcttcccggtgctggcgatcgtgctgatcgtgcgcagtttcatcgccgagccgtacaagatcccgtccagctcgatgatgccgaacctgctgatcggcgacttcatcctggtcaacaagttctcctacggcctgcgcctgccgatcagcaacaccaagatcgtgccgttcggcgagccgtcgcgcggtgacgtggtggtgttccacttccccggccacagcgacaacgacccggccaagggtgagaacttcatcaagcgcgtcatcggcgtgccgggcgacaccgtggtcttcgaaggcgacggcgtgatcctcaacggcgaaccgctgaagtacgacaacaagggcatctatgcaggccacaagggccagggcgagggtgccaacctgctggtcgaacacctgccgggtcgtacccacaccgtgctggagaccgactatccgcgtggccagggccagtggaccgtgccggccggcaagtacctggtgatgggcgacaaccgtgacaacagcgacgatggccgtttctggggcctgctgccggaggaaaacctgcgcggcaaggccttcctgatctggctgaactgccagggctggttctgcaaggatggcttcgagccgtcgcggatcggctcgagcatcaactga

SEQ ID NO: 496321 - DNA, 384 bp, Stenotrophomonas maltophilia
atgaagacgatgaacacgcagcgtggcatgaccctgacctcgttcctggcggtcctgatcgtggtcggtttcttcctttacatcggcatgaagctgttcccgatgtaccaggagtattacgcggtgcgctcggcgatgaagagcctggccaacgagccgggtgtgggcagcatggaaccggcccggatccaggatctgttcttcaagcggctgtacatcaactactcggaaaacgtgaagccggccaacgtgaagttcgaccgccgcgacaatggctggaccctcaaggtcaactacgaagtgcgccgtccgctggtcggcaacctggacgtggttggcaaattcgattcatcccaggacctgacccgaagcggtgccgaataa

SEQ ID NO: 496322 - DNA, 681 bp, Stenotrophomonas maltophilia
gtgccgaataaacctttccaacgtggtgacctgatcggtcatcccttccgcgacccggcgctgctgaagcaggcgctgacgcatcgcagtgccggtgcgccacacaacgagcgcctggagttcctgggcgacagcatcgtcaacatgatggcggccgaggcgttgtaccagcgctggcccaaggctgacgaaggcgcgatgacccgtgcccgcgccgagctggtgcgtgaaggcgcgctggcggtgatcgggcgcaccctggaactgggcgatcgactgatcctgggcccgggcgaaatgaagtccggcggccaccgtcgtgattcgatcctggccgacgcggtggaagccgtggtggctgcgatctacctggatgccggcttcgaggcctgccgggcggtggtactgccctggttcagcgcttcgatcgaggcactgccggcctccggccggcccgagaaggaccccaagacccgcctgcaggaatggctgcaggcccgacagaaggcgttgccgcagtatgaactggtgtcagaatccggtgacgaccacgccaagcacttccgggtacgctgcaacgtagccgacccggccgccagcaccgagggcgaaggcgcctcgcggcggcttgccgaacaacaggcggctgcggccgtcctagaacaactggattccaagtga

SEQ ID NO: 496323 - DNA, 897 bp, Stenotrophomonas maltophilia
gtgagcgaacaaactccccatcattgcggcagcgtggccgtcatcggccgcccgaacgtgggcaagtcgaccctgaccaatgccctggtcggcgccaaggtcagcatcgtctccaaccgtccgcagaccacgcgccatcgcctgctgggcatcgccacctatccggaaggccagctggtgctggtcgacacccccggcctgcacaaggtgcagaagcgggcgatgaaccgggtgatgaaccgcgccgcgcgtggctcgctggaaggcgtcgatgcaggcctgctggtgatcgaagccggtcgctgggatgaagaggacagcctggcgttcaacgtgctgcgcgacgccggcatcccggtcgtgctggtggtcaacaagatcgatcgcctgaaggaaaagggcgcgctgctgccgttcctgcagcaggtgaccgaaggtcgtgatttcgccgccgtgcacccgatctcggcgcagaaacgcaacggcctggaagcactggtgcgcgacgtgctgaagctgctgccggaagccccgccgatgttcggcgaggacgagatcaccgatcgcagccagcgtttcctggccggtgaactggtgcgcgagcagttgatgcgccagctcggcgaagaactgccgtacgcaaccaccgtcgagatcgagcgcttcaccgaggatggcaacctgctgcgcatcggtgcggtgatctgggtcgagcgcgaggggcagaaggccatcgtgatcggcaagggcggcgcccgcctgaaggagatcggcgccaagtcccgcctgcagatggagcgtctgttcggggccaaggtgttcctggaaacctgggtgcgcgtgcgtgaaggctggtccgacgacgaggccgcgctgaaggccttcggctacgaataa

SEQ ID NO: 496324 - DNA, 720 bp, Stenotrophomonas maltophilia
atgatgatcgaggacgacaccggcttcgtgctgcacgcacgggcctaccgcgagaccagcctgctggtcgaagtgttgagcgcgcagcatggccgtatcggcctgctggcgcgtggcgtgtccaccgccaagggccaggtgctgcgcgccgccctgcagccgttgcagtggatccgcttcagtgcccagcagcggggtgaactggcccagctgcggggtgccgaggcgctggatgccgcaccacgcctggtcggccaggcgatgttggccggcttctacctgagtgaactgaccctgcgcctggccccgcgccaggacccgctgccggagctgtacctcgcctacggtgaggcacgcgcgcggctggcggtcggtgccggcctggcctggaccctgcgccgtttcgagcgcgaactgctgtccgcgctgggcctgggtttcgagctggacagtgccagtgatggccagccgatcgacccggcggcgcgctacgagctggacccgcaggaaggggcgcagcgcctgctgagcgagcgtggcggggagcgccgggcggcggccactggctcggcgctgctggcccttgcggccgacgaagagcccaatgcggccgatctggccagcctgcgcctgccgatgcggcgggtgctggcccatcacctgggcgcgcgcgggctgaagtcctgggaaatgctcgagcagcttgcgccgcgcaggtag

SEQ ID NO: 496325 - DNA, 729 bp, Stenotrophomonas maltophilia
atgcagatgaccccgcgggccgcacggccccgcttcctgcttgtcgaggacgacatcatcagccgcggttttttcaaggcggcgttggaaacgttaccggcggatgtggataccgcagattcgctggccagtgccctggccagtgccgaacccggcgcgcatgatctgtggctgatcgacgtcaacctgccggatggcaatggcgcgcaactgctgcgtgagctgcgccgctcacatcccgacacaccggcgctggcacatacggccgacggcgatacctccatccacgcccgcctgcgcgaagccggtttcagcgacaccctggtcaagccgctgggccgcgaccagctgctgaaggccgtgcgccgcgcgctggtcaacagcccggcgggaatcttcgtggcacaggccccggccgcggtcgagctggccgtgcaggactgggacgagactgcggcattggccgcgctcaatggccagcgcaaccacctgatcgcactgcgcgagctgttcctggccgagttgcccggtgtgcgcgacgcggtcgagcaggcggtggaccagcacgacgagcgccagctgcgcagccagttgcaccggttgcaggcgagctgtggcttcgtgggggcggcacggttgggccgggcggtgcgccagctgcatcatgcacccgagtccgggcaggcccaggacgggttccgcgccgcggtggctgccctgctgcattga

SEQ ID NO: 496326 - DNA, 1449 bp, Stenotrophomonas maltophilia
atgtcagctggcccaatcatcaagcacgacggccacgggcgcaagcgggtccaggccccgtcggtcaggatctgcgacaatacgcccccatttttgcccgcagcctgttgccacgtggcccgatcccgttcccgcactgaccgtaccccattccagaccgagatcctcgacctcagccatgatggtcgcggtgtcgcccgccgtgaaggcgagggcggcaaggtcaccttcgtcagcggcgcgctgcccggcgaggtggtgatggctgagcagactgcccgcagccgccatttcgacgaggcgcgcaccctggaggtgctgcaggcctcgccgcagcgggtgacccccaagtgcccccatttcggcacctgcgccggctgcgtgctgcagcacctcgacgaagaccagcagatcgtggccaagcagcgcgtgctgatggacaacctggagcggatcggccatgtgaagccgggcaccgtgctcgcgccgctggtcggcgagagctggggctaccgccgcaagggccgtttctcggtgcgccgggtcgaaaagaaggacaagaccctggtcggcttccgtgaacaggatccgcgcttcgttgccgacctcagccagtgcctgaccgtgatccccgagattggtaccaaggtcgaggcgctgtccaccttcatcgagtcactcgatggcaagcgtgacatcccgcagatcgaattcatcgccggtgaccaggccgtggtcctgaccgttcgccatctgcagccgctcagcgatgccgaccgcgcggcctgggcggccttcggccagcagcatggcttcgtgatctacctgcagtccggcggcgtggataccgtgcggccgctggacgggcaggatgtgccgctgtcgttccgtctggcgccgtgggatgtcgagctggcgttccgcccgctggacttcatccaggtcaatgccaagctcaacgagaagatgatcgcccacgccctggacctgctggaaccgggtgaggacgagcgtgtactggacctgttctgtggcctgggcaacttcaccctgccgctggcgcgccgcgtgcgcgaggtggttggcgtggaaggcgatgccggcctggtggcgcgtgcgcgtgagaacgccgagcgcaacggcctggccaacgcgcagttcttcagcgccgacctgacccaggaccagcgcagcaccccgtggatgcgccagggctttgacaagctgctgctggacccgccgcgctcgggtgcgatcgaagtgctgcagcagctgccgctgaagcagttcaagcgcattgtctacgtcagctgccacccgggctcgctggcgcgcgatgccggctatctggtcaacgaacagggcttcaccctggtcagcgccggtgccatggacatgttcccgcataccgcgcacgtggaaagcatcgcggtgttcgagaagcgctga

SEQ ID NO: 496327 - DNA, 486 bp, Stenotrophomonas maltophilia
atgggcatcgaaatcgaacgcaaattcctcgtcagcagtgatggctggcgcaccgccgcgcatcgggtgatcccgatggcgcagggctacatcaacgacatgggcgcgctcgaccgcggcacccagaacgcctcggtgcgcgtgcgcatcgaaggcgaccacgccgcgctgaacctgaagtcgcgcaccatcggccatacccgccaggagttcgactacccgatcccggtggaggatgcgcgcgccctgttggcgctgtgcgtcggtggcctgatcgacaagcgccgccacctggtcgaacacgccggcctgacctgggaggtggacgagttcctcggcgacaacgccggcctggtcgtggccgaagtcgagctggacagcgccgaccaggcgatcgaactgccggactgggtgggtgccgaagtcaccgacgacgcgcgctactacaacgtcgcactggccagtcacccctattcacagtggtga

SEQ ID NO: 496328 - DNA, 705 bp, Stenotrophomonas maltophilia
gtggtggggatgagaatcgacatctactccgacgtggtctgcccctggtgctggatcggcaagcatcgcttccagcagggtgtgcagttgctcggcgccaatgcgcctgaactcgatatccactggcagccgttccagctggacccggacgcggacgccaccccggtgccgctgcgcgaggcctatgtgcgcaagttcggtggcgtcgagcgcaccgagcagatcctcggccagacccagaccaccgcgcgggccgagggcctgccgatggatttcagccagggccaggtgcgggtgaccacgctgccggcccatcgggtgttgtggctggccggccagcacggcgtgcaggatgcggtcggcgaagcacttttccgtgcccacttcgagcatggccagaatctggccgatactgcagtgctggtgaaggccggcgtggctggcggcctggacggtgctgaaatcgcgcagatgctgggctccgaccgcggcctggccgaggtcgaagccaggctggcgcaggcccatgcactgggcatttcctcggtgccgactttcgtcatcgatgggaagtgggccatttccggggcccagccgccagaggccttcgccaacgcccttcgccagatcgcagtcgaacagggcgccccggcagcttcggctggcggcgacgaggcctgcggcccggacggctgcaaggtctga

SEQ ID NO: 496329 - DNA, 1008 bp, Stenotrophomonas maltophilia
atgctgctgatcggcgttgccggcaccgaactgaccgcccaggaacgtgactggctgcagcacgacgccgtggccggggtggtgctgttcaagcgcaacttcgcctcgcgccagcaggtgaccgatctgagtgcggcgatccgtgccgccgccccacgcccgcagctgatctgcgtggaccaggaaggcggccgtgtgcagcgtttccgcgagggctacagcgcgctgccgccgctgcaggacatcggcgcgctgtacgccgccgacccgcagcaggcgctggccctggccgaacagcatgcctggctgatggccagcgaagtacgtgccagcggcctcgacctgagtttcgcgccggtggtcgaccttggccgcggcaaccgcgccatcggcaaccgtgccttcagtgaagacccgcaggtggtggccgcgttcaccgccgcctatgtgcgcggcatgcatgcggtcggcatggccgccacgctcaagcatttccccggccacggcaccgtgctggaagacacccacgtcgataccgcgatcgacccgcgcgcgctggacgaactgcgtgggcaggacctggtgccgttccaggccggcatcgccgccggtgccgatgcggtgatgatggcgcacgtgatctatccgcaggtggcgccggagccggccggctattccccgcgctggatccaggacatcctgcgtggcgagctcggcttccgtggcgtggtgttctccgatgacatcggcatggccgcctcgcacagcgccggtggcgtgccggcacgcgtgcacgcgcatctggatgcgggctgcgacgtagtgctggtctgccacccggaactggtcgatgaagccctgcacgcggtgcagggacgctccctcaatactgctgcgctgctgggcctgcttggccgcggcgcgctcggctgggacggcctgctggccgacgcccgccatggcgacacccaatcccgtctgcttgaaacccttggaagaaccgtctga

SEQ ID NO: 496330 - DNA, 555 bp, Stenotrophomonas maltophilia
atgcccaacctcaccatttcccaggccctggcccaggctgacctgctggtcgaccgccccaccatcgacaaggccatcgctggtatcgccgacgccatcgcgcgcgattacaagggcgaggtgccgctgttcctgtccatcatgcatggtgcgctgccgttcgccggccagctggcgctggaactgggcgcgcgcggccaggacgtgcagttcgattacctgcacgcgacccgctaccgcggtgaaaccaccggcggagacctggtctggaagcacaagccggccacctcgctgttcggccgccgcgtgctgctgatcgacgacatcctcgacgagggctacaccctgcagggcgtccgcacctggtgcctggagcagggcgcgaccgacgtgcgcatcgccgcgatgaccgtgaagaagcacgaccgcgcactgccggacgtgaccgccgactacgccggcatcgagctgccggaccgctacgtgttcggcttcggcatggacgtcaacgagaccctgcgctgcgtgccggcgatctacgcaatgaaggagtaa

SEQ ID NO: 496331 - DNA, 747 bp, Stenotrophomonas maltophilia
atgcaacagatcgccctggccgtgatcggcggtaccggtgtctacaacctggccaagctcgacgacgtgcagatccacgaggtcgacacccgctttggccgcccgtccggcccggtgcgcgtgggcacgctgctcggtcatcgcgtggcgttcctggcgcggcatggcgaggggcactcactgccgccgcacaagatcaactaccgcgccaacctggccgcgctgcagcagctgggcgcgcagcgcgtgctggcattgaacacggtgggtggcatcaccgaagacttcggtccgcgcgtgctggcctgcccggaccagatcatcgactacacctggggccgcatcagcacgatctgtgaagaagaaggcaccgacgtggtccacgtcgatttcggccacccctatacgccgatgctgcgcagcaagatcctggcggcagcgaaagtgaccggcgtcacggtccatgacggtggctgctacggcgcgacgcagggcccgcgcctggagaccatcgccgagatcgcccgcatgcgccgtgacggctgcgacctggtaggcatgaccggcatgccggaggccgcgctggcacgcgagctggggctggattacgcctgcctggcaatcatcgccaactgggccgccggctgcggtgatggcgaggagattacgatggccgaagtactggcgaacgtgcaggcggccagcaacggacttccggaactggtgggcgaattggcgcgggggtga

SEQ ID NO: 496332 - DNA, 207 bp, Stenotrophomonas maltophilia
atgccgaacggtaccgtcaagtggttcaacgacgccaagggatttggcttcatctcgccggaggatggcagcgccgacgtgttcgcgcacttctccgccatcaactccaagggcttccgcagcctgcaggaaggccagcgtgtcacctatgacgtgacccagggcccgaagggtgcccaggcttcgaacatcacgccggccgagtga

SEQ ID NO: 496333 - DNA, 1269 bp, Stenotrophomonas maltophilia
atgaaggaacgactgcgcatcgccgtgatcggctacggcaccgctggacaggcattgtccatcctgctctcccgtgatggtcacgaggtggagatcttcgaacgcgtgccctcgccggggccggttggcgccggcttcctgctgcagcccagcggcctgcaggtgctgtggcagatgggcctgcttgatgccgtgcgcgcgcatgcggcgccggtgcaccgtctgtatggcgatacgccgtgcgagcgcacggtgatggacatgcgctatgacggcctggatgcgcgcctgcacggcctcggcatgcagcgtggggcgctgttctcgctgctggacggggcgcgtgcgggtgcgggccagctgcatgccggcgtcaccattgccgcagtggatgccgcacagggccgcctgcatgacagtgagggccgcatgcatgggccgttcgacctggtggtggccgccgatggtgcggcttcgacgctgcgcggctcgatcgaaggcggcaccgggctggaccgcgtgtatccctggggcgcactgtggtgcctgctgccggccgaggactggccgcacctgcaggagctgcggcagcgctacgtggccgcgcgcaagatgatcgggctgctgccggtcggtacgcggccaggtgatgacacgccgcgcctgagcttcttctggagcctgccacgcgccgacttcgaacgatggcaggccgatggcatgacgccctggctggacgagctgcacgcgctgtggccgcaggccagcgcgcgctttgcgcatctgcatgatgccggccagctggcgcgcgcggtctaccgtgacgccgtgatgacgcgctggcattgcggccgcatggtgctggccggcgatgccgcacatgcgatgagcccgcagctggggcagggcgtgaacatggcgctgctcgatgcgctggcattgcgcgatgccgtgcgcgcacatggcgggggaggcgctgcattgcaggcctaccaggcgcagcgcagggcgcacgttgcggtctaccagcgctggagccgttggctgacgccgctgttccagtctgatcgcgatgcctgggcaaaggcgcgcgacgtgctgctcgggccgatggggcgcctgccgggtgggcgtggccacatgctgcgcgtgctcagcggtacgcagcatggctggttcggttcgcttgcgctggatccggcatttgtcgacgcgttggctgcaggggcgcagatgcctggcatcagcgcgatcactgcgaatgcgtga

SEQ ID NO: 496334 - DNA, 270 bp, Stenotrophomonas maltophilia
atgtggttcgcggtcgaggagctggaatcggaaatctgcaagctgcgcggactgttgcagatgctgcacgaggaccagcccgacgtactggaggacgtgttcgaattccatgtgggcagcttgatcagtcatgcatcgccggagcaccacggacgcatccgcgcctgcgcacaggagatgctggcggcaatccaggccttgccgcggcgacgtgaagttgacacgcctgagttccagttgatgccgcagctggacattcgtccggcctga

SEQ ID NO: 496335 - DNA, 642 bp, Stenotrophomonas maltophilia
atggccgatgagataccgctgctgcttgccggcgaaccggtgaccctggcgggcgcacgcgcactctactggccggcgcggcaggcgctgctgatcgcggacctgcacctgggcaaggccgatgtgttccgccgcgccggcatcgcgctgcccagcggcggaaccggcgaagacctgcaacgcctgcagggtctgctggacaggcacgcctgccgcgaactgtggatcctgggcgacatcctgcatgggccggcgcatcgcgccgcctggtaccagcaatggctcggctggcgcgaacgcaacaccgcactggacgtgcatgtcctgcgcggaaatcatgaccggcagctaccgcatgcccagctgcaggtgcagatccacgaggaggtgcggctggcgccgttcctgctgcgccatgaaccgtgcgcagacccggcgtggcacgtggtcgcaggccacctgcatccgcaggtcgcactgcccgcattgcgccggcgcttcccggccttctggctgcgcgagcggatgacggtcctgccggccttttccgcgttcaccgccggaatcgtgcctgctcccgccagcggcgaacagatgatcgcctgcgtggaaaacggcctggtggaactgccagtggcttga

SEQ ID NO: 496336 - DNA, 2460 bp, Stenotrophomonas maltophilia
atgaaccgcagccaggcactacgccggctggaagactggttcgcgtcgaaaggctggcgctcgttgccgttccagcgcgcgatgtggcggcactatctcgccggcggatccgggttgctgcacacgcccacaggcagcggcaagacactggcgatgttcgggggaccgctgctgcaggccatgatcgacccaccgccttcgccccgccgcgccggtgcggtacgcccgctgcaggtgctgtgggtgacgcccttgcgcgcgttggccagcgacaccgcgcgtgcgctgcaggccgtggtcgatgggttgcagcttggatggcgtgtcggcctgcgcagcggtgacgccagcaaccgcgagcgacgacaggcacgcgagggccgcatcgacgtactggtcacgacgccggaatcgctggcgctgctgttgagctatccggatacgctgccgcgcatgcgccagctgcgctgcgtggtggtggacgaatggcacgaactgctgggcaacaagcgcggcgtcctgctgcagttgaatctggccgtgctgcgcgatgccgcgcctgcattgcagctgtgggggctgtcggccacgctgggcaatctggatgaggcgcgcgacgtgctgctgcccggacagcccgacgcgccgatcgtgcagggcgtgcgcccgcgtgcgaccacggtgcgcagcctgctgcccgaacccggtgaacgctttccctgggccgggcacctgggcctggcccaactgccgcgggtgctggacgcattgatgcaggcacgcagcagcctgctcttcaccaacacccgtgcacaggcagaactgtggcatcaggcgctggcgtcggtttggcccgagcaacacgacacgcttgcgctgcaccacggttcgctggatccggcgctgcgccagcaggtggaggacgggctgcgtgcaggaacgctgcgctgcgtggtcgccacctccagcctcgacctcggcgtggactttcccgaggtcgaacaggtactgcagctgggcagcccgaagggcgtcgcgcgcctgcgccagcgcgccggacgtgcgcgccatcgtcccggtgccagtggcgcgatcctgtgcgtgcccagccatgcgctggaactggccgagtacgcagccgtgcgtcgcgcactggccgaaggcgtggtcgaagcacgcaggccgccgatgctgtcgctggacgttctggcccagcatgcggtcagccgtgccctggccggtggattccacggtgatgcgctgctggcgcaggtccggcgcacccatgcgttcgcatccctggccgaggaccagtggcaggccgtgctgactttcatcgtgcaggggggccaggccctggcccagtaccctgacttccacaaggtcgtgcaggacgtcgatggccgctaccggatgcacgaccggcgccaggcactacgccaccggctgtcgatcggcaccatcagcagcgatggcagcgtgcgcgtgcagttcctgcgcggggccggcctcggcgccgtggaggaacagttcgccagccgcctgcgccgcggagaccgcttccagttcgccgggcgcctgctggagctggtgcagctgcgcgacatgaccgccttcgtgcggctggcacgagggcgcggtgaaggtgtcgtgccccgctggcagggaggccagctgccgctgtcgatggcactcggcagcgaactggagtcggtgctgtcaggcgccgacgacagtgcggaagcgcgctggctggcaccgctgctggcacttcagcagcaggtgtcggcgcttcccggcccggaccacctgctgctggaagacgtacgccgccgcgaaggccagttcctcttcgtctatcccttcgccggacgccacgtgcacgaggcgctggccgccctgttggcactgcgctgcacccgccagcaacgcaacagcatcggctatgccgtgaatgatcacggcctggtgctggcaccggcgcaggcgatcgacctggacgcggcgcaatggcatgcgttgttcaccaccgatcagctgctggacgatctgcgtgcggcggtgaacctgggcgagcttgcgcggcgccagttccgtggcatcgcgcgcgtcgcaggcctgctggtacccagcctgccggggggcatgccgcgatcgctgcgccaactgcaggcctcggcgggcctgctgtacgacgtattgcgcgagcatgaccccgagcacttgctgctggcgctggccgaacgcgaagtgctgcatgacagcctcgacctgccggggctgcgccaggtgctggtccggatcggcgcgcgacgcatgtcgatgcagcgccctgcatcgctgacgcccctgggctttccgctgtgggccgaacgcctgcgcggacagttcagcaacgaggactggcgtacccgcgtgcaacgcgcggcccagcaactggaacgtcgccatggccgatga

SEQ ID NO: 496337 - DNA, 1608 bp, Stenotrophomonas maltophilia
atgaaggccttcgcggcactctaccagcgcctggaccgcagcaccgccacgctggacaagcgtgcggcattgatcgattacttccgccaggcaggcgcgcacgatgcggcgtgggcgctgtacctgctcagcggtggcaaggtgggcggcgcacgccgcaagatcgccgccagtggcgaactgcgcgcctggattgccgaagaatccggcttgccgccatggctggtggaagacagctatgcgcaggtcggtgacctggccgaaacgttgaccctgctgctggatgatccatcccagccggccgccgaccgtgcgttggcggattggatcgaacagcatctgctggcggtggccaaccagcccgaagcggtacgccgtgcggcggtcgtcgcgggctggcagcagctgtgcagcagcgaacgcctggtgttcaacaagctgctgaccggcgccctgcgcgttggcgtctcgcagcggctggtgcagcaggcactggcggagtggtccgggctggacatcgcgcgcatcgcccagcgcatgcttggcgagtgggtgccctcgcccgcactgctgggccagctgctgtcgccggatgagctgccactggaccggcagcaaccctacccgttcttcctcgcctcgccactggaaggcgatcctgccgaacgcctcggccccatcgaagattggctgctggaatggaagtgggatggcatccgcctgcagctgctgcgccggcgcggcgaggtcgcattgtggtcacgcggcgaagagcggctggatggtcgcttccccgaaatcgaacaggcggcgatggcgcttcccgatggctgcgtgctggacggagagctgctggcgtgggacgaagccacggacctgccgcgtgcattcaccgcgctgcagacccgcatccagcgccgcaagcccggtgcggctaccctgcgcaacacgccggtgcgcgtgctcgcctatgacctgctggaacacgatggcgcggacctgcgtgagttgccgttgcgggaacggcgtgcacggcttgccgacgtcgtcggtgccctgggtgatgcacggatccagctctcacccgacgttgccgccgaagactggccgcaggcggcggcgatgcgcgatctggcacgcgaacgtggcgtggaagggctgatgctgaaacgtcgtgcctcgccctaccaggccgggcgacgccgcggtgactggtggaaatggaaggtcgatccgctcaccatcgatgcagtgctcctgtacgcgcaggccggccatgggcggcgcagcacgttgtacaccgactacaccttcggcgtctgggacggcgacacgctggtaccggtggccaaggcctattcgggcctggatgacaaggagatcctcgcgcttgatcgctggatccgcgccaatacccgcgagcgctttggcccggtgcgcagcgtacgccccgaacacgtcttcgaactgggcttcgaggcggtcaaccgcagcagccggcacaagtccggtatcgccgtacgctttccacgcatcctgcgctggcgccacgacaagccagccagcgaggccgatcagctggctaccctgcaggcgctggcgcgatga

SEQ ID NO: 496338 - DNA, 1638 bp, Stenotrophomonas maltophilia
atgagtggacccagcttcagcagcaatgcgccctacgaaacccatgtggtgctgaaccagccgccgtcgttcgcggggcgccagttgtggaccgatgacgtggcgctgatggaggcggtgcagcgcgaaggcgctggcggctttgcgccgcggctggcggtctatggcgcgctggcgggtgacgaactgtaccggctcggcttcgatgccaaccgcgatcggccgcgcctgcgcacgcatgatgcgcagggccatcgcatcgatacggtggagttccatccggcgtatcaccagttgatgggcacagcgaaatcgcacggggtcgccgggttgtcctggcacgagccgcaaccgggcgggcacgtcgcgcgcgcggtgttgagctacctgcaccaccaggccgaggctggcaccagttgcccgttgacgatgacccatgcggcagttgcagtgctgcacacgcagccgcacctggccgagtgggcgcgcaaagccgcagcgccggtctatgacccgcgcgatgtaccggtggcggacaaggccggcatcacgctgggcatgggcatgaccgagaagcagggaggctcggatgtgcgcgccaacagcacgcgtgctgaaccgatcgatggccagcgctatcgcctggtcggtcacaagtggttcttttccgcaccgatgtgcgatggcttcctggtgctggcgcaggcgccgggaggactgacctgcctgctgatgccgcgccggctggccgacggcgaccgcaacgcattccggttgatgcgcttgaaggacaagcttggcgattgggccaatgcctccagcgaagtcgagttctgcggggcacaggcgtggcgcgtgggcgaggaggggcggggcgtggccaccatcatcggcatggtgatgatgacccgcctggactgcatgctgggcgcggcggcggaaatgcgcatggcgctggcgcaggcgctgcatcacgcacgtcatcgccgcacgttcggcaagctgctggtcgagcacccgttgatgaccaatgtgctggccgacctggcactggagtcggaagcggccacagtgctgtcgatgcgcatcgcgcgtgcggtggaccgggccggcgtggatgccaacgaagccgcgttggcgcgtgtggggacggcgctgggcaagtactggttgtgcaagcgcgcgccggccttcgtcaatgaagcacaggaatgcctgggcggcgcgggctatgtggaggaatcgatgctgccgcggctgtaccggcaggcaccgttgaattcgatctgggaaggaagcggcaacacccagtgtctggacgtgctgcgcgcgctggcgcgcgaaccggaggcgctggcggcgctgcgcgctgaactggcggcggtggccgatcgtgatgcgcgctacgcagcggctttgcagcggtgggcagcagcaccgccaccggatgagtcgcaggcgcggctgttctgcgagcgcacagtgctgttgttgcaggccgcgctgctgttgcgtgcgcaaagtccgatggcagaggcattcgtgcgcagccggctgcaagcggagcatgggctggtgttcgggaccctgccgacgggcgtggatctgtcggcgatgctggtgcgcgcgctgccgtag

SEQ ID NO: 496339 - DNA, 411 bp, Stenotrophomonas maltophilia
atgaagattcgcccgatcaccaccaccctgctggccgcctccctgctgctggccctggccgcctgcaagggcccggaagccgaacaggccaagcaggacgcgcagcaggccgctgacagcgccggcgcggctgcccgcgatgccgtcgacaaggcggcagaagctacccgtgacgccgccgacaagaccgctgcagcctccgagcaggccgccgccgatacccagcaggcgctggacaaggctgcagacgccaccgccaacgctgccgacaaggccaaggacgccgcaaccgacgccgccgcacacgccagcgacgcgactgccaacgccgcacagaaggtggccgacaaggcccgcgatgtcgccaatgacgcgaaggcgaacgccgccaaggaagaagccaagcactga

SEQ ID NO: 496340 - DNA, 342 bp, Stenotrophomonas maltophilia
atgagcatcaacaagctgctggtcgcgatgtccctggctctggccctggccgcctgctcgaagcaggaagctgcccaggacgccgctgcttcggccaacgaagccgccaccgaagcccaggctgctgccgaccaggccgccgctgccggcgcccagaccgccgacgctgcccagcaggctgccaacaccgccgccaccgctgctgacgctgcgaccgacgctgctgccaacaccgctgctgccgcgaccgacgctgctgctggcgaagccaaggacgctgccaaggctgccgaagctaccgctgagcaggccaaggacgctgctgaagaagccaagaagtaa

SEQ ID NO: 496341 - DNA, 1176 bp, Stenotrophomonas maltophilia
atgtccaacatcgtcatcgccgccgccaagcgcaccgccatcggctccttcctcggccagttcaacggcgtgccgacccccaccctcggcgcggccgccatcgctgccgccctggaacagtcgggcgtaccggccagcgacgtctccgaggtcctcatgggctgcgtgctgccggccaacctcggccaggcgcccgcccgccaggcggcgatcgccgccggcattccgctgtcgaccggcgccaccaccctcaacaaggtgtgcggctcgggcatgaagaccatcatgctcggccatgacctgatcaaggccggttcggccagcatcgtggtcgccggtggcatggaatcgatgtccaacgccccgcacctgctgccgaactcgcgtaccggcaaccgcttcggcaacttccaggcggtcgaccacatggcccacgacggcctggtcaacgcctatgacggcaaggccatgggcgaattcgccgaatgcgccgtggacaagtaccagttcagccgcgaggagcaggacgcctacgcgatcgaatcggtcaagcgcgcgcaggccgcacaggccaacggtgcgttcgccgacgagatcgtcgcggtgaaggtagccacccgcaagggtgacgtcgaggtcgccaccgacgagcagccggggcgctcggatatcgccaagatcccgaccctgcgtccggccttcaagaaggacggcagcgtcaccgccgccagttcctccagcatctccgacggcgccgccgcggtggtcctgctgaccgaggaagacgcggccgcccgtggcatcactccgctggcccgcatcgtcggccacgccacccattcgcaggaaccggagtggttcaccaccgccccgatcggcgcgatccacacgctgctggccaagaccggctggtcgctggaccagatcgacctgttcgagatcaacgaggcctttgccgtggtggcaatggcgccgatgcgtgagctgggcatcccgcacgacaagctgaacgtgaatggcggtgcctgcgcgctgggtcatcccatcggtgcctccggtgcacgcctggtggtgaccctggtcaacgccctgcgcacgcgcggtggcaagcgcggcattgccaccctgtgcatcggtggcggcgaagcaacggcaatcgccatcgaattgatttaa

SEQ ID NO: 496342 - DNA, 1299 bp, Stenotrophomonas maltophilia
atgagaccggccccgctgctgctggcgctgctgctggcctgggctgccctgggcggcctggtgctgggcgggtggctgccgcgctggagctgggcgctggcagccgtcgtcatcgcgctgcccgccttgtgggatctgtggcggcagtcgcggcgtccgtcgccgcaggtacagcgcgagctgcccgaagcgctggcgctgggcgtgcgccgcgaggcggcgctgcgcctgcaggccgagcaatcgatgacggtgcaggtgttcgacctggtgcccggcggctggccgctggaagcgctgccgcagcgcgtgcgcctgcaggccggtacggcgtccaccctgcactaccacctgcagccgctgcagcgtgggcacttccgcttcgagggggtgcacctgcgcatgcgttcgccgtggcgcctgtggtggcagcaacgcacgctgccgccggcgctggaggtgcgggtctatccgaacttcgtgccgctcacccgcttcgcattgttcagtgccgaccaggcctcgcggctggtcggtgcgcacgtgaagcgccgccgtggcgaaggcaccgatttccatcagatgcgcgagtaccgcatcggcgacagcctgcgccagctggactggaaggccaccgcacgtgcatgcaagctgatctcgcgggagtaccaggacgagaagaaccagcagctgctgctgatgctggacagtggccggcgcatgctggccagcgaaggcgggctctcgcacttcgaccatgccttgaacgcctcgctggtggtggcttacctggcgctgcgccagggcgacgctgccggcctgtacgctgccggtggcgaacgccgctgggtggcaccgcagcgcggcatgggtacggtcgagcacctgctgcgcgccagctacgacctgcagccacgcgcggtggccaccgattacctggccgccgccaccgaggtgtcgctgcgccagcgccggcgtgcgctggtgatgctggtcagcaacgtgcgcgatgaggacatcgaagacctgctggcggcagtgcgcctgctgcagcggcgccacctggtgtgcgtggccagcctgcgcgaacgcgagctggacggcgcactggaaggcgaggtgcagacactggaagacgccacccaggccggtgccgccgcgctgtacctgcagcaacgcgcgaaggcgcatgaggccctgcgcagcgaaaaggtgatggtgctggacgtgaccgccgatgccctgcccggcgcgctggtggaacgctatctggcggtgaagcgcgaagggttgctctga

SEQ ID NO: 496343 - DNA, 987 bp, Stenotrophomonas maltophilia
atgaccgaagtccccgagctgccggcggccgccaacgcccgcctgatcgaacgcgtcgatgccatccgcaccgccgttggacacgccttcatcggccaggccgatgtactggaccagatcctggtggcgctgctggccggtggccacgtgctgatcgaaggcgtgcccggtctgggcaagaccctgctggtgcgtgcactggcacaggccctggagctggactacgggcgcgtgcagttcacccccgacctgatgcccagcgacgtcagtggccacgcggtgtacgaccccaagagcgagagcttcaagatccgtcgcggcccggtgttcaccaacctgctgctggccgacgagatcaaccgtgccccggccaagacccagtcggccctgctggaagtgatgcaggaaggccaggtgaccatcgaaggcaaggccttcaccctggcgccgccgttcatggcgctggctacgcagaacccgctggaacaggaaggcacctacccgttgccggaagcacagctggaccgcttcctgctgaaggtgctgatcgactacccgcagctggaggacgagaagcgcatggtgaccgcgatcaccagtggccgtgccgccagcgatttcgacctgagccaggtgccgcgtgtattgggggccggcgagctgctggaactgcagcgcgcgaccgcggcgatcaccgtcgatgacgaagtgatcgactacgcggtgcggattgtggcggccacgaggcagtggccgggcatcgcggtcggcgctggcccccgcggcagcatcgcgctggtgcgtgcctcgcgcgcgcaggcggtgctggccggccgtgacttcgtcacgccggacgacgtgcgcgacattgcgcgcccggcgctgcgccaccgcattgcactggccccggagctgcagatcgaaggccaggacgccgacgacgtgctgggcgcgctgctggccaaggtggaagcaccgcgccgatga

SEQ ID NO: 496344 - DNA, 1185 bp, Stenotrophomonas maltophilia
atgagtccgcgcctgttctggtcgctgctgctgggcgcgctggtgctgttcggcgtgccgctgacgatcctttacctgcgcacgcacgaacgcgtgaccgagaccgtgcagctgccgccgcagggcgaagctggctacaacccgctgtacgtgctgggccaggccctgcgtgccgatggcatcgaggtgcactcgcggccgcggctggacctgcagcagatggcgctgggcccgcacgatacggtggtgctgctgcaggacagcagcgagctgccggcgcccgcggccagggccctgctggcctgggttgatggtggtggccatctgctggtgcgtacgccgccgccagccgaggacgacgccagcagcacgcagggccccctgctggaccagctgggcgtggacagcctgtatcagcagagcgactgccagccattccacgtcatcgatgatcccagccacgtcgagttctgcggcggccgtcgcttcacgctgggctttgccgccaatgcgcgggccgaacggcgctggggcaacgagcacagcctggtgttcgcacgcctgcaccatggccagggcaaggtgagcgtgctggccgacatggaattcatgcgcggcgaggtggattcgccggcggcacgcctggcgtcggccgcgggcaaggccagtgatggcctgcacgatctctcgcaccgcgacctgacccgttacctgctcgacccgaattacggcaagggtgcgttctggctggtctatgccagccgcccgccgtcactgtgggcgcgcctgttctaccagggctggccgctgtgggcgccgctgctgctggccctgctgggctggttgtgggcccgctcgcagcgcttcggcagcctgctgccgtcgccggtgctggaacgccgctcgctgctggagcacgtgcgtgccagtggcgagctgctgctgcgcttcggccacggcacgcgcctgtacgacgccgtgttcgccctgttcctgcatcgcctgcgcctgcgcgcaccagtagccgctgcactggacggtgcgccgcgcgatcaggccatcgccgagctgctgaaatggccgcaaggccgtattgccagcgcgctcacgcccccgccaccgcacgattcctccgccctgcgcgagcgcatccgcttgctgctccagatgagatccctgctatga

SEQ ID NO: 496345 - DNA, 1617 bp, Stenotrophomonas maltophilia
atgcgcattgaccacctggacgtggtgctgcgcgcgcgcagcggctgggaagcaatggagctgggcagtgccctgtcgcgccgccacgcacgcgcggtatggggcagctggctgctggccagtgcgccgctgttcgtggtcttcaacgcgctgggttggtggctggatgcattcggctgggcgtggctggcgatgtggtggtgcaagccgctgttcgaacgggcgccgctgtacgtgctgtcgcgtggcatcttcggcgagccggtcggtacgctggcggccctgcgcgcgcaacacagctggggcaatgcaggtttctggggctacctgggctggcgccgtttcagcgtgctgcgcagcctgtgcctgccggtgaacctgctggagggcaatgcgccggcccagcgcggtgcacgccgccgcgctgtggccgctggtgcggcgggtgccgccgccgtgctgaccgtggcctgcatggcgtttgaagcggtgctggtgtccggtgcgatcggcgcggtgttcatgttcatgccgctggagctgatgtccgaatcatggcgtgccgcgtgggacatgatcggccaggacacacccgcctgggcgcgggccggcttcaacctggcgtgctggctggcctcggtgctgatcggtccgttctacgtcggcgccggcttcggcctttacttgaaccggcgcactcagatggaagcgtgggacgtggagatcgccctgcgccgcctgcgcgagcggctgctgccggcggcatccacgctggccctgctgctgtgccttgccctgccgctggcctacgcgccagtgcatgcgcaggacgcgcagacggccgcagaacaggcagacgatgccggagaggacgaggacagcgcggaggaaccggccactgcggcgaacgatccggccaatgcaccggccatgatcttcggtgcagcgccagtggacaccgccggcttccgccaggcggtgaaccgcgcctatgaagatccgctgcagcgcccgacccgccaggtcacgcgctggaagccgatcgagcaggccgaggaaaaaaagaaggaagacaagcagctgcagcgtgacaccaacagcaagggtgaacgcaaaacgcgcaaggacggcatcgcctggctggcacgcctggccgagtggggcctgtggggcctgctgggcgtcctgctgctggtgctgctgctgaccgcacggctgtggctgccgtggctgcgcggcagtggccggcgcaaggccgaggccgcaccggaggtagtggaagaaccggtggaactgccggtcgtgctgccgccggacgtggccacccaggccggcctgctgtgggaccaggggcggccgcggcaggcgctggccctgctgtaccgcgccagcgtgcgcacggtgggcgagcgcagcggcatcgcgcttccgcccggtgctaccgaagcgcaatgcctgcgcgcgtcgcggcgcatgcccgatgccaccgaccgtgacctgttcgcgcgcatcgtgcgcatgtggcagtacgccgcctacggtggccgcctgcccagccgcgccgatttcgatgcattggccgataccctgcgccggcagtacaggtggctggcatga

SEQ ID NO: 496346 - DNA, 993 bp, Stenotrophomonas maltophilia
atgaagcaggaacagttcgtcgcccgctaccagcaggaatggcaggacctggaacactggctgctgctgcgcgccggtgcttcgcgccgcacgcggcgcaaggccagcgcgctcgcgctggacgataccgccttcccgcagcgctaccggcgcctgtgccagcagctggcgctggcccgcgagcgcggctacagcccgcagctggtgcagcgcctgcagcagttgatgcagcagggccacagcgtgctgtaccgcacgccgccgacgcgctggcgcggtgcgctggaattcctggtggccgacttcccgttgctggtgcgcagccaggcgcgcagcatgtgggtggcgctggcgatgttcgcgctgccggcgctggcctgcttcgtgctggtgcaggtctatccggacctgatccacatggtgatggacaaccgccagatcgccgagatggagcgcatgtacgatccggccgccgagcgcctgggacgcgacagcggcaccgactggatgatgttcggccactacatcctcaacaacatcagcatcgccctgcgtaccttcgccagcggcctgctggccggcttgggcacgctgctggtgctgctgttcaacggcgtgatcatcggttcggtggcgggccacctgcagcacatcggccatggtgatccgttctggcgcttcgtcgcaggccatggtgccttcgagctgaccgcgatcgtgatcgccggcggtgccggtctgcagctgggcatgaaactgctggcacccggccggcgcagccgcctggaggcactggtcgagggcggccgcatcggtgcgcgcctgtgcctgggcgtggcgttcatgctgctggtggccgcgttcatcgaagccttctggtcgtcgattgccgacgtgccggcgtggggcaagttcagcgtggccggcatgctgtgggccggcgtgctgctgtggctgtggcgcggcggacgcggaggcggccatgcgcattga

SEQ ID NO: 496347 - DNA, 690 bp, Stenotrophomonas maltophilia
atggccgcaccgatgctcgatacctaccgcgaggtggtgacgccggagggtgtgccgctgcagttgccggcggccggcccggtgccccgggcgatggcctggctgatcgatctgggcgtgcgcatcgcggtgctggtgctgatgtcgattccgctggcactgctggattcgttcggctccgggctcggcctggtgctgatgttcctggtctactgggcctacccgatcgtctgcgaagcgcggtggggccgcaccctgggcaagcgcgcactgggcctgcgcgtgctcgcgcgcgatggcgcgccggtgggctggatggccgccatcacccgcaacctgctgcgcaccgtggacatgctgccgttcggctatgcactgggcctgatcagcagcctgttcgattcccacggccgccgcctcggcgacctggtggccggtaccgtggtggtgcatgcaccggtgctgtacctgccgcctccgcccaccatcgacagcgtgctggccccgccgcagccgctgcgaccggaagaacaggcggcgctgatggccttcgccgagcgcgcgccgcggctgtcggcggcacgccagcaggaactggccggcattgccgagccattgaccggcacccacggccaggtcggcgtgctgcgcctgtatgccatggccaactggctgctggggcggcgatga

SEQ ID NO: 496348 - DNA, 531 bp, Stenotrophomonas maltophilia
atgaacccgctgcgccccttccgcgacaagatgcccgtcctcggccagcgcgtgtacatcgatccggcctgcaccctcatcggtgacgtggaactggccgaggacgtgtcggtgtggccgggtacgatcatccgcggcgacgtcaattacgtccgcatcggtgcgcgcaccaatgtgcaggacggcaccatcatccacgtcagccaccacagcccgtacaacaaggccggctacccgaccctgatcggcgaaggcgtgaccgtcggccacggctgcatcatccacgcctgcaccatcggtgattacagcctgatcggcatgggcgcctgcatcctcgatggcgcccgtgtggaacgccatggcttcgtcggtgccggagcggtggtcggcccgggcaaggtggtcggtgaaggtgagctctgggtgggcaacccggcccgcccggcgcgcacgctgagcgacaaggagatcgagtcgctgcactattcggccgaccactacgtgcggctgaaggacgaatacctgggctga

SEQ ID NO: 496349 - DNA, 822 bp, Stenotrophomonas maltophilia
atggacgacatccacccgatcgcgccggacaagcgcgccgccattctttccagcctcgccgacatcgaacagcgacacgacgtgcgcgttctgctggcgtgcgagtccggcagccgtggctggggcttctcttcgccggacagcgattacgatgcacgcttcatctacgtgcatcgccagccgtggtatctcaccgtcaacgagagcaccggccccggcgatgcgcagcgggacgtgatcgagctgccgatcgacgatgagctcgatgtcagcggctgggacctgcgcaaggcattgcgcctggtttcaaaatccaatccgacactgattgaatggctgcgctcgccgatcatctaccagcaggatcacaccgcagtgtcgcagctttggaaggcagctgagtcgttctattcaccactgggcacgtggtggcactacttcaacatggcgcgctcgaaccatcgcggttacctgcgtggcgaaacggtacgcacgaagaagtacctgtacgtgctgcgcccactgctggcctgccagtggatcgagcacgaacagacccccccgccgatggccttcgaggacctgctggaccggctgctgacgcacggcccggtgcgtgaagccatcgatgccctgctggccgttaaacgcgccagtgccgaggtcagtgccgggccacgcatcgcggcgatcagcgatttcatcgatcgtgaactggccatccggactgcgcaggcgccgcagctgcccgctggacacggtgatgcggcgtggctggatgagctgttccggcagatgctgggcgagcacgcgccgatctga

SEQ ID NO: 496350 - DNA, 690 bp, Stenotrophomonas maltophilia
atgagcctgtcccccgccgcgtccgcgaagatcctgatcgtcgaggatgagccacgcctggcctcggtgctgcgtgactacctggccgccgccggcatgaccagcgaatgggtggacgatggcggccaggtgatcgacgcgttcgcccgctaccagcccgacctggtgctgctggacctgatgctgccgcaacgcgatggcgtggacctgtgccgcgaactgcgcgccggcagcgacgtaccggtgatcatggtcaccgcgcgggtggaagagatcgaccgcctgctgggcctggacatcggtgccgacgactacatctgcaagccgttcagtccgcgcgaggtggtggcgcgggtggtggcagtgctgcgccgttaccgcccggaccccgctgcacgcgccaacagcgggctgcatatcgacgaaccggcggcacgcgccacctggaacggcaagggcctggacctgacgccggtggaataccgcctgctgcgcaccctgctggccacgcccggccggatctgggcgcgcgatgagctgctcgaccgcctctacctggaccaccgcgtggtggtcgaccgcaccgtcgacagccatgtgcgcaacctgcgccgcaagctggccgacgccggcatggaaggcgaaccgatccgttcggtgtacggcatgggctacagctacgaaccctag

SEQ ID NO: 496351 - DNA, 1392 bp, Stenotrophomonas maltophilia
atggcgaagattcgattcaaattcggcctgaccgcgaagaccttcctcgcgatcttcaccgcctgcctgctggtgctggcagtgaacggcattgccagccgcgtggcgttccagaccggcttcctggactacctcaacgaccagggcgacctgcgcatgcagcgcgtgatgccacacctgcagcgcgagtaccgcacgcacggcggctgggagcatctgcgcggcgacagtgaccgctgggcgcggctgctgcgcccggacctgggccatgggcacgaggggcccgtgccgccgctgtccgaccagaccggcgttccctcgcggctgggcctgttcgacgcgcagcatcggttcgtggccggcaacccggacgcgatcagcgacgacgagccgcatccggtgcagctggacgggcacaccgtcggctggctgggcatggtgccgttccagaccgtcatcgccaccaacgacctgaatttctacaacacccagatgcgcgcatggtgggtgatcggcatctcactgctgctggtgaccgtagtgctggcctggctggtgtcgcgcgcgctgcgccagcgcctggccaagctggccgccgccacccaccggctcgccgccggcgactacgccacccgcatcgagcgcaccagcgatgacgagctggatgcactggtcaacgacttcaaccggatggcgcaggcgctggacgacaccgagcgcaaccgccgcgccttcatcgccgacatctcgcacgaactgcgcacgccgctggcggtggtgcgcgccgaactggaggcgatcgaggacggcatccgcccgctggaccgcgccaacctgggtgccctgcagggcgagatccgccagctgggcaagttgatcgacgacctgcacgacctgtcgatgacccagtccggcggcctggcctaccgcttcgcaccgctggacctggtggcgctgctgcgtagcgagctcaatggcatgcgcgtgcgcttctccacggcggggctggcactggaagaagcgctgcccgccacaccgctgcaggtgtccggtgacgagcgccgcctgcagcaggtgctggccaacctgctggaaaatgcgctgcgctatacccatgtcggcggccgcgtgcgcgtgcaggctgcgcgcgtgcccgccggcgtgcagctgatcgtggaagacaccgcgccgggcgtaccggccgacaagtgcgcgctgctgttcgagcgcttctaccgggtggagagttcgcgcaaccgcgccagcggcggcagcgggctgggcctggccatcagccacaacatcatcctcgcccaccacggccatatccacgccgatccctcgccgctgggcgggctgcgcgtggtcgtcacactgccggagtccgcatga

SEQ ID NO: 496352 - DNA, 1197 bp, Stenotrophomonas maltophilia
atgtcactcctgcgtccgctgttccgctccccccgtgcgttgttgttgcccctgctgctggccctggcggcctgctcggcgggcaggaccgaggccccggccacccccgaagtcggcgtcatcaccgcccgggcgcaaccgctggcactgcagcagaccctgcccggccgggcggtgccgttcgaggtgtccgaggtgcggccgcagatcggtgggctgatccgccagcggttgttcaccgaaggccagcaggtcaaggccgggcagctgctgtaccaggtcgatccggcgccgtaccaggccgccttcgataccgcgcgtggccagctggcgcaggccgaggccgctgtgctttcggcgcagccgaaggccgagcgcacccgcacgctgctgggcatggacgcggccagcaagcaggacgccgacgatgccacctcggcactgaagcaggcccaggccaacgtgattgccgcgcgcgcggcattgcaggccgcccgcatcaacctggactacacccgggtgaccgcaccgatcgacggccgcatcggtacctccagcgtcaccgccggcgcgctggtcgccgccggccaggacgcggcgctggcgaccattcaacggctggacccggtctatctggatgtgacccagtccagcacgcagatgctggcgctgcgcaagcagctcgacgccggcctggtgaaggccatcgatggcaaggcccaggtgaaggtgctgctggaggacggcagcacctatgcccatgagggcacgctggagttcgtcggcagcgcagtcgatccaggcaccggcaacgtggtgctgcgcgcggtcattccgaacccggagggcctgcttctgccgggcatgtacctgaaggcggtgttgccgatggccaccgatgcgcgtgccctgctggtgccgcagaaggcggtgctgcgcaatgaacgtggcgagccgctgctgcgcctgctcgacgcaaaggatcgcgtggttgagcggcgggtcagtaccggccaggtggtgggcaaccagtggcagatcacgcagggcctgaaggctggcgagcgggtgatcgtcagcaacggcagtgcggtagcgctgggccagcaggtgaaggcggtggcggccaccacggcgcagctggcggcgatgccggcggtcgacccgaacggcaacaccgacgaaaagtcgcactga

SEQ ID NO: 496353 - DNA, 3150 bp, Stenotrophomonas maltophilia
atggttcgtttcttcatcgaccggccgatctttgcctgggtgatcgccatcgcggtcagcctgctcggcctgctcgcgatcctgatcctgccggtggaccgctacccgcagattgccccgcccaccatcaccatccgcgccacctacaccggctcctcgtcgcagaccgtggaaaacgcggtcacccaggtcatcgagcagtcccagcagagcctggaccacctgatgtacatgacctcgaccagtgcttccgatggctcggcgcaggtcaacctggtgttcgccaccggcaccaacccggacaccgcgcaggtgcaggtgcagaaccagctgcaggccgcgatggccacgctgccgcaggcggtgcagcagaacggcctgaccatcaccaagtccagtggttcgatcttcgaggtgctgtcgttcaccagcgaagacggcagcatggacaacttcgatgtcgccaacttcatggaagcgcgcatcgacgaccagatcagccgcgtcagcggtgtcggcaacatccagccgatcggccaggaatacgccatgcgtatctggctggacccggaaaagatgcgccagtacgcgctgatgccgtcggacatcgaaaccgcactgcaggcgcagaacaccgacgtgtcggccggtgaactcggtggccagccggcgctgaagggccagcagctggacgcgaccgtgaccgcgcgcagccgcctgcacacgcccgagcagttcgcgcaggtggtgctcaaggccgatgccaatggcagcgtggtgcacctgggcgacgtggcgacgatcggcctgggcccggaaagctatgacagcatcagcacgttcaacggcaagccgtcggcctcgctgggcatcgagctcaacgccggtgccaacgccatcgccgtctccaaggccgtcgaggcacggctgcagcagctgcagaagtactggccgcatggctacacctaccacgtggcgttcaccaccacgccgttcgtgaccatctcgctgaaggaagtggtgatcaccctgatcgaggcgatcgcgctggtcgtgctggtgatgtacctgttcctgcagaactggcgggccacgctgatcccgaccatcgcggtgccggtggtgctgctgggcaccttcggcgtgctggccgccttcggctattcgatcaatacgctgaccatgttcgcgctggtgctggccatcggcctgctggtggacgacgccatcgtggtggtggagaacgtggagcgggtgatgaccttcgaagggctggcaccgaagccagccacgttgaaggcgatgggccagatcaccggcgcgctggtcggcatcgtgctggtgctgaccgcggtgttcctgccgatggcgttcttcagcggtgtcaccggcgtgatctatcgccagttctcggtgacgatcgccgctgcgatgatcctgtcggtgctggtggcgatgaccatcaccccggcgctgtgcggcagcatcctgcaccagattcccaagggcggccatccgcatggcgaccacgctggcgagccgggcctgctgggcaagttcttcatctggttcaaccatcgcttcgagcgcacctccaaccgactgcgccatcgcgtcgaccgcttcctcggccggcgcacgctgggcgtactgttctacctggtgctgagcgtggccaccggcctgttgttgtggcacctgccgggcgcgttcctgcccgatgaagaccagggcatgctcaacgcgctggtgaagctgcccgccgggtccaccctggagcagacccgtgccgtgatggatcgcctgagcgccgccgcggtgaaggacgacagcgtactgtcaatccaggccaccgcaggtttcagtgtcagcggcagtggccagaacgtcggccaggccttcatccggctgaaggattgggacgaccgcaaggacgatgccgataccatcgccgcgcgcttgaccgcggccatggccagcgtgcccgatgcgcaggtgttcatcacctcgccaccggccatcctcggcctcggcgatgccggtggcttcaccctggaactgcaggacgaaggcggtgccggccatgccgccgccgtggccgcgcgcaacacgctgctgaaggaggctgccaaggatccgaagctggtcaacgtgcgctacgccagcctggaagacgcgccggtgtacgcggtgaaggtggacgacgccaaggcgcaggcgatgggcgtgaatccgcaggacatcaatgacaccttgaacgccgcgctgggtggcgacttcgtcaacaacttcatctacaagggccgcatcaagaaggtgttcatccagggcacggccgaagcccgcatgcagccgcaggacatcgagcgctggagcgtgcgcaaccaggccgggcagatggtaccgctgtcgtcgctggtcagcgcgcactggaccagtgcgccggccgcgctgcagcgctacaacggcgtctcggcgatggagatcaccggccagccggcaccgggcgtcagttccggcgaggcgatggccgagatcgcacgcctggccgacacgctgccggaaggcttcagccatgcctggtcggacatggcctaccaggaacagctgtcggggaaccaggcgccgatgctgtatgccatctcgctgctgttcgtgttcctgtgcctggccgcgctgtatgaaagctgggcggtaccgttcgcggtgatgctggcagtgccggtgggcgtgttcggcgccgtgctgatgatgaacctgcgtggcctcaacaacgacgtgtacttccaggtcggcctgctgaccacgattggcctggcagcgaagaacggcatcctgatcgtcgagttcgcgcgcatcctcgagcagcagggcaggagcacccgcgacgcgatcctgcaggcggtctacctgcggctgcgaccgatcgtgatgacctcgctggcattcctgatgggtgtgctgccgctggtgttcgccaccggcgccggttcggccgcgcgccgttcgctgggtaccggcgtggccggcggcacggtcgcctcgatggtgctgggcatgttcttcgtgccgttgttctacctgctggtgcgccgcctgttcccgggccgcgcgccggccgacgccactgccccggaggcacgcccatga

SEQ ID NO: 496354 - DNA, 1416 bp, Stenotrophomonas maltophilia
atgaagccgatgctgctgcgcgcgctggcggccgcaacgatgaccaccgtgctgggcggctgcgtgagcatggccccgcactaccagcgccccgaggcgccggtgccggcacagttcgccaatgccgccaccggcgagaccgggccagcactggcgatgccggcctggcgcgaggtgttcctggagccgcgcctgcagcaggtcatcgcgctggcactgcagaacaaccgcgacctgcgcgtggcggtgctgcaggtggagaaggaacgcgcgcagtaccgcatccagcgcgcggcgctgctgccgtcggtggatgccagcggcagcatcacccgctcgcgggtgagtgatgccaacagcgagatcggcgtcagccaggtgaccgaatccgataacgtgcaggtcggcatcagcagctgggaactggacctgttcgggcgcatccgcagcctgaagaacgaggcgctgcagaactggctggccagtgccgagaaccagcgtgcggcgcgcaccagcctggtcgccgaagtggccacggcctggctggcgctggcggccgacgagcagtcgctggcgttcacccggcagacgctggacagtcagcagcagaccctgcagcgcaccgaggcccgccatgcacaaggcctggcctcgggcctggacctgtcgcaggtgcagaccagtgtggacgccgcgcgcgctgcgctggcccggctgcagacccagcaggcgcaggattgtgatgcgctgcagttactggtgggtgctccgctggacgcggcattgctgcccagcgcacaggcactggacggcaccgtggcgctggcgccgttgccttccaacctgccctcgagcgtgctgctgcagcgtccggacgtgctgtccgccgaacacgcgttgcaggcggccaacgccgatatcggcgccgcgcgcgccgcgttcttcccgacgctgacgctgactgccaactacggccacagctccaccgcgttgtcgacgctgttctcggccggcacccgcggctggtcgttcgcgcccagcatcacggcgccgatcttccacgccggtgcgttgaaggcctcactggatgcctcgaagattggcaaggacatcggcatcgctcagtacgagaaggcgatccagcaggccttcagtgaagtggccgatgccctggccacgcgcgatcacctggccgcgcaggtggaggcacaacgggcactggtcgccgccagccagcgcagctacacgctggccgaggcgcgctatcgcaccgggctggacggctatctgcaggcgctggatgcgcagcgcagcctgtttgccgcgcagcaggacctgatcgcgctgcagcagcaggaagcgggaaaccgggtgacgctgttcaaggtgctgggcggtggcgcagacgcacggtaa

SEQ ID NO: 496355 - DNA, 1890 bp, Stenotrophomonas maltophilia
atgaacccgtccttccatcgttacgacgtcatcgtcatcggcggtggccacgccggcaccgaagccgcgctggccgcggcccgtaccggcgtgcgcaccctgctgctgacccacaacatcgaaacggtgggcgcgatgagctgcaacccggccatcggaggcatcggcaagggccacctggtcaaggaaatcgacgccctcggtggtgcgatggcgcatgccgcggaccgtgccggcatccagtggcgcaccctcaacgcctccaagggcccggccgtgcgcgccacccgctgccaggccgaccgcaacctgtaccgcatggcgatccgcgccatcgttgaaggccaggccaacctgaccgtgttccaggcggccgtcgatgacctggtcatcaacggcgacgccgtgcgcggggtcatcacccagaccggcctgcgcttcgatgccgaggccgtggtgctgaccgccggcaccttcctggccggcaagatccatgtcggcccgactcagtacgccgccggccgcatgggcgacccgccggccaccacgctggccgcgcgcctgcgcgagcgcccgttccaggtggaccgcctgaagaccggcacgccgccgcgcatcgacggccgctcgctggactacagcgtgatggatgagcagcccggcgactcgccgcgcccggtgatgtccttcctgggttcggtggacgagcatccgcagcaggtcagctgctggatcacccacaccaccgaacagacccaccagatcatccgcgacgcgctgcaccgctcgccgctgtacagcggccagatcgaaggcatcggcccgcgctactgcccgtccatcgaggacaaggtggtgcgcttcgccgagaaggccagccaccagatcttcgtcgaacccgaaggcctgggcatcgtcgagatctaccccaacggcatctccacctcgctgccgttcgacgtgcagctggagatggtgcgcagcatccgcggcttcggcaacgcgcacatcacccgccccggctacgcgatcgagtacgacttcttcgatccacgcgggttgaaggcttcgctggaaaccaagctggtcaacggcctgttcttcgccggccagatcaacggcaccaccggctatgaagaagccgccgcgcagggcctgctggccggcctcaacgccgcacgccaggtgcgtgggctggacggctggtgcccgcgtcgcgacgaggcctacctgggcgtgctggtggatgacctgatcacccacggtaccaacgagccgtaccgcatgttcaccagccgcgccgagtaccgcctgcagctgcgcgaggacaatgccgaccagcgcctgaccccggccggccgcgagatgggcctggtggatgaccagcgctggagcgcgttcgagaccaagcaggccgccgtcgccgccgagcgcgcgcgcctgggcgcgctgtgggcgaccccggccaatgcgctgggccgcgaagtgcaggacacgctgggcgtggcggtcagccgcgaaaccaacgtgctggacctgatcaagcgccccgagctggattacgcgcagctgatgcaggtgccgtcgctgggcccggccgtggccgacgccaaggtggccgagcaggtggagatcggcgtgaagtacgccggctacctggaccgccagcgcgaggagatcgagcgccagcagcggcatgaagccacgccgatcgctgaagccttcgactacgccacggtgcgcgggctgtcggccgaagccctgcagaagctggaacgcgtgcgtccgcagaccatcggccaggcgcagcgcatcccgggcatgaccccggcggcaatctcgctgctgctggtgcacctggagcgtgcacgccgcggccgcgtggcgtag

SEQ ID NO: 496356 - DNA, 492 bp, Stenotrophomonas maltophilia
atgaaaacgcgcctgatgcttgccggtggcctgttgctggccctgaccggctgcaccacctacgactatgtcggcggtggccgcagcggcagctactaccacggtgcgccgtcggtggagtaccgctacccggccggctatccctacaactacggctacccttactacggcggctatggcggctactacggcggctatggcaatccgtactactcgcgcccgatctaccgcccgccgcacaaccaccgtccgccaccgcgcccgcccggcaacggtggcgagaaccgtccgccgccgccgccgcggccgtcgtacaacggcggttcgccgtggcggaacatggactcgatgcgtcgcccgccgcagtcgaacatccagccgtcggcgccgccaccgccggcccgtccggccccggcgccgagcgcgccgaggatgaacggttccccgtggcgcaacatggatcgtgggacgcagcgcacagttgagcgctga

SEQ ID NO: 496357 - DNA, 963 bp, Stenotrophomonas maltophilia
atgagcgattcactgttgccccgtgccgacgatgtcctggctgccgctgcgcggatcgcgccgcacgccagcgtgaccccggtgctgcgctcgcgcacgcttgatgcgctggccggcgcgcagctggcgttcaaggccgagcacctgcagcgcggcggcgcattcaagttccgcggggcctgcaacgcggtgtggtcgctggatgccgatcgcgcccgtgccggcgtggtcacccattcgtccggcaaccacggcgctgccctggccctggccgcgcgcacccgtggcattccctgccacgtggtggtgcccgaaggtgcggtggcggccaagctggccaacatcgcccgccacggtgccacgctctggcgctgcccgccgaccatcgccgaccgcgaggccgcctgcgccaaagtacaggctgataccggcgcgaccctggtccatccctatgcggacccggcggtgatggccgggcagggcaccgcggccctggaactgctgcacagcgacggtccgttcgacgtgctggtagtcccagtcggagggggcggcttggccagcggtaccgcccgggccctgcagttcgccagtccccagacccggctggtgctggccgaaccggccggtgccgacgacaccgcgcgctcgctggccgcaggcgagcgccagggggctttcaccccggacaccatctgtgatggcctgcgtaccctgatcggcgcccccaacttcgcgctgctgcgcgcggccggcgtcgaggtgatcgtggtcgacgacgccgccaccatggccgcgatgcgcctgctgtgggaggtgctcaagcaggtggtcgagccgtcctcggccaccgtgctggccgcggtgctggcacagccgcagcggttcgccggcctgcgggtgggcctggtgctgtccggtggcaatgtcgacctgcccgcgctgcgttggggggcgccttga

SEQ ID NO: 496358 - DNA, 633 bp, Stenotrophomonas maltophilia
ttgagccgcgacgggcaccggccccgcaccggcctgctgggctggctgtggcggctgttcgtgctgctggtggtctggctgctgggcgtgaccgcctggatcgtctgggtgggggagcgcgaccaggcagccaaggccgacgccatcatcgtgctcggtgcggcggcctatgacgccaagccgtcgccggtattcgaagaacgcatccgtcatggcctggatctctatgaagcccggtacgcgccactgctgatcttcaccggcggctacggtggcaccggcgcgcgcttttccgaatcgcaggtggcgcggcgctatgcgctcaagcatggcgtgccggacgatgcgatcctgatcgagaccgcctcgcgcaacaccgtgcagaacctggtcgaggccaagcggctgatggaccagcgcgacctgcaccgggtgatcatcgtcagcgacccgttgcacatggcgcgcgcgctgcgcctgagcaaggcgctgggcatcgatgcgctggcctcgtccacgcccagcacgcgcttccgcagcttccacaccagctggcgcttcctggtgcaggaaatctatttcttccaccgcgacctggtgcggccgccgctgagttcgccggccaacacctga

SEQ ID NO: 496359 - DNA, 885 bp, Stenotrophomonas maltophilia
atgccgtcccacttcgatgcccgccatgtccgccgcgcgttcgcccgcgccgccaacagctacgacgccgccgccgccctgcagcgcgaggtgcaggcgcggctggtggaatcgctggactacctggaggcacgcaagcccgaggtagtgctggacatcggcgcgggtaccggccacgccagtgcgctgatgaagaagcgctggccgaaggcgcaggtgatcgcgctggacgtggcgctgccgatgctggaccaggccaagcgccaggccggctggtggaagccgttccagcgcctgtgcggcgacgccgccgcgctgccactggccgacaacagcgtggacgtgatcttcagcaacctgtgcctgcagtgggtggacgacctgccggcggtgttcgccgggttccgtcgcgtgctcaagcccggcggcctgctgctgtgctccaccttcggcccggacacgctggtcgaactcaacgaagcgttcgcagctgccgatgaccgcccgcacgtgagccgcttcgcgcagatcgcccagttcggcgatgcgctgatgatggccggtttccgcgacccggtgctggaccgcgatctgttcaccctgacctacgacgacctgccctcgctgatgcgcgagctgcgcgcgatgggcgcgaccaatgcgcgggtggaccgccgccacacgctgaccgggcgtggccgcttcgccgcggcggcagcggcgtatgaaccgatgcgacgcgccgacggcaagctgcccagcagctgggaagtgatctacgcccacgcctgggcaccggacccgggcgcaccgatccgcgaaggcgggcatgacgtggcctcggtgccggtgtcggcgatcccgatccggcgcaagcagacctga

SEQ ID NO: 496360 - DNA, 780 bp, Stenotrophomonas maltophilia
atggatctgggtatcaacggccgctgggcactggtctgcggcgcaagcaaggggctgggcctgggctgcgcgcgtgcgctggtgcgcgagggcgtcaacgtagtgatcgtggcccgtggtgaggctgcgctgcaggccgccgccgaagcgctgcgcgccctgcccggcgccgccgaagtccgcgtggtcgccgccgacgtgaccaccgaggccggtcgctccgcagcgctcgccgcgtgcccgcaggtggacatcctggtcaccaatgccggtggcccgccgccgggcgacttccgcagtttcgagcgcgacgactggatcgccgcgctggacgccaacatgctggcgccgatcgcgctgatccgcgcgaccgtggacgcgatgatcgcgcgtggcttcggccgcatcgtcaacatcacctcgtcggcggtgaaggccccgatcgacatcctggcgctgtccaacggcgcgcgcagcggcctgaccggcttcgtcgccgggctgtcgcgccgtaccgtggcgcacaacgtcaccatcaacaacctgctgcccggccagttcgacaccgaccgcctgcgcgccaacttcgcccacagtgcgggcaaggacggcaatgctgccgaagtggccgaacgccgccgccagcagatcccggccggccgcttcggcacggcggatgaattcggcgcggcctgcgccttcctgtgcaccgcacaggccggttacctcaccgggcagaacctgctgatcgacggcggcgcctaccccggtacgttctaa

SEQ ID NO: 496361 - DNA, 780 bp, Stenotrophomonas maltophilia
atgcatatcgacgtcaccggccaggggccggacctggtactgatccatggctgggccctgcagggcggcgtgttcgcgccgttggtgcaacgcctggccgatcacttcaccctgcatctggttgatctgccgggccatggccacagccgcgaggacaccacgccgctgcgcctgccgttcgtggtcaatgccattgccgcggccacgccgcctgcggtgtggtgcggctggtcgctgggcggcctgttcgcgctgcacgccgccgcgacactgccgaaggtgcgcgggctggcgatgatcgcggccacgccgcgcttcgtgcgtggcgacgactggccgcatgcggtggagccggcggtgttcgagcagttcgggcgcgagctggccaccgacttcggtggcaccctggaacgcttcctggcgctggatgtcatgggctcggcacacgcccgcgaggagctgcgcacgctgcgccagcgcctggtcgagcgcggtgcacccaccgaacgcgccctgctggaaggcctgcgcctgctggaaagcaccgacctgcgtggcgcactgccgacgctggccaagcccagcctgtggatcgccggccagcgtgaccggctggtgtctccggcggcaatgcaggccgccgcggcactggcccccggtgcgcaggcgctgaccatcgcccacggcggccatgcgcccttcctcggccatgccgacgaggtggccgccgccctgcaacacttcgttgccggcctgtcaccggccgatggcggacaatga

SEQ ID NO: 496362 - DNA, 1224 bp, Stenotrophomonas maltophilia
atggcccgccccgacctgaccgcccgcctccacgcccaacgcgccctgcgcgatgcccaaggccgtcgccgcacgcggcgcacggtcagccgtcgtgatggtgtccgcctggaggtggacggccagtggctgaccggcttctgcagcaacgattacctgggcctggcccagcagttcagcgtggtcaacgcattgcaggatgcggccgcacgcgaaggctccggcgcgggcgcctcgcatctggtctgcggccaccacgctctgcatgaggcactggagcgcgaagtggcggagtggctgggctacccgcgcgcgctgctgttcggcagtggcttcgccgccaacctggccgtgcagcaggcgctgctgagcgaagagaacgatgtgtgcgtgcaggacaagctcaaccacgccagcctgctcgatgcgacgcggctggcgggtgcgcgcctgcgccgttatccgcaccttgacgccgaaggcgcgatgcgccagctcaagcacgcgcccgacggcgcggcgatgctggccaccgacggtgtgttcagcatggatggcgacatcgcaccgctgcgtgcattgtcgctggtggcacgcctgcagcaggcgctgttctatgtggacgatgcacacggcgtgggcgtggtcggtgatggccgtggtgccgtggccgccgccgggctgggcgtggacgatgtgccgctgcagctggtcacgctgggcaaggcactgggcggttccggcgcgctggtgctgggccgcgacgacctggtcgagcacctggccgaaaccgcacgcccgtacatctacaccactgcgatgccgccggcgctggccgcagcagcactggaagcggtgcgcctggcgcgccgtgacaactggcggcgctcgaaactgaccgatctgatcgcgctgttccgcggcgaagcccgccgccatggcctggacctgatggcctcggaaacgccgatccagccgctgctgtgtggcgacgaccatcgcgccgtggcgatgtcccaggcgttggaacaggccggttggctggtcggcgcgatccgccctcccacggttcccgaaggcaaggcgcgcctgcgcgtcacgctgtccgcgctgcacacccccgagcaggtgcgtggcctggtcgaagccattgccagcgcgcgcgatcgcgtcgacctggccgcgcgtgaggccgcgccaccgccgctgcctgtctttgcctga

SEQ ID NO: 496363 - DNA, 1044 bp, Stenotrophomonas maltophilia
atggctgctgccatccgccacgactggcaacacgacgaactgcaggcgctgttcgatctgccgttccccgagctgctgttccgcgccgccgcagtccatcgcgagcacttcgacccagcgcaggtgcaggtgtccacgctgttgtcggtgaagaccggcggctgcccggaagactgcgcgtactgcccgcaggcacagcgctacagcaccggggtgaacgcgcagaagctgatggacaccgacgcggtgctggccaaggcacgccaggccaaggctgccggcgcatcgcgcttctgcatgggtgccgcgtggcgatcgccgaaggaccgcgacatcccgaaggtggcggcgatgatcgccggggtgaaggcgctgggcctggaaacctgcgccacgctgggcatgctcagtggcgagcaggcgcgtgcgctgaaggatgcgggcttggactattacaaccacaacctcgacaccgcgccggactactacgattcgatcatccacacgcgccagtaccaggaccgcctggacacgctggcgcacgtgcgcgatgccggtctgaaaacctgctgcggcggcattgtcggcatgggcgagacgcgcgcgcagcgcgtgggcctgctgctggcgctggccacgctgccggcgcatcccgattcggtgccgatcaacaagctggtgcaggtggcgggcacgccgctgcatggcagcgccgagctggatccgttcgagttcgtgcgcatgatcgcggtggcacgcatcgccatgccgcgttcgatggtgcggctgtcggccggtcgcgaggcgatgagcgacgaactgcaggcgctgtgcttcgtggccggtgccaactcgatcttctacggcgacaagctgctgaccaccggcaacccggagagcgagcgcgacctggccctgttcgcgcggctggggttgcagccgatggcggtgcaggtggatgccgagggccacgaccacggcggcaccgtgcacgctgatatcagcgccgatgcgcccgcctgtggctgcgctcacgcggcctga

SEQ ID NO: 496364 - DNA, 564 bp, Stenotrophomonas maltophilia
atgaacagctaccagtcctacccgatccgccgcgacgcggtgctgtgcagccttgccgagctgcccgacggcggcctgcgcgtggtgctggatgatctgcgccagtccgacacgccagggcagtggaagaaccacgtcttcgtgaccttcaaggactacccggcagggcagttcgatccggcgacgttgcccaaggaggaactcgaggctttcggccactatgtgctggttcgcctgttggccatcaatggctgcctgcgcgatacggacgagcgctccgacaacgatgcccatcgcactgaccaggcgcggcagaacatcgccgcgctgaccagcgaggacatcgcctcgatcgatgagcagctgttctccctctgcgacgggcagttccgaaagatcgcctacattgtgggcatggtcatgtcgctgcagccgaagtgccgatcgggaattcccgatgtgttctatgcacggcgtgtacgcatgctggtggaacggggcatgttgcaggcgcagggcgacctcacgcggatgggctgttgcgaagtgcgcgtccggcagtag

SEQ ID NO: 496365 - DNA, 561 bp, Stenotrophomonas maltophilia
atggaaccggatacgatgccgcagggcggaaagctgctgatactcgatctggatgagacgctggtgcatgccagcgagcgtgaactggagcgagccgcggatttccgcctcgtcggctaccacgtctacctgcggccccatctgcaggcattcctcgactatgcctttgcccatttcacggtgggtgtgtggacgtcgtccgggcaactgtacgccgaaccgctggtggatcggctgatgccggggcgtccgctggcattcctgtggtccgcgccgcggtgcagcacggcccgtgattgggaaaccggcggttacacctcgcagaagcggctgggcacgctgaagcgccacggcttccgtttggagcagatgatcggtatcgatgacacgcccggcaagtacgccagaaactacggaaatctggtcgcggtgcgtgagttcaccggtgatccggctgatgacgagctggcccatctgcagctgtatctggagtggctgcggcagcagcccaacgtgcgtgcggtggagaagcgccggtggcgggagcgcctgcaggcatag

SEQ ID NO: 496366 - DNA, 1341 bp, Stenotrophomonas maltophilia
atgaccgatctccatcgcctccgcggccgcatcaccgcgctggttctcagcgaggcctggcgccgccgcgccgcgctctggggcggcgctgtggccgtagcgctggtggccatcctgttcgccaaggccagcgacgcggccttccatctgttccagcgcatcaccgcgcactcgccgtggtgggccctgctgctcacgccgggcatcttcgcgctgctggcctggttgaccagtggcgtgctgaagcccacgcggggcagcggcattccgcaggtcatcgctgcgttggacaagcccgatgagccattccggaagaccaatctttcgcctgcggtctcagccggcaagctgctgctgacctcgttgtcgctgctcggcggcgcgtcggtcggacgcgaaggtcccacggtgcatgtgggtgccagcctgatgtatctgttcggccgctggttcggcttcaaggatcctcgcgagctctcgcacttcctgctggccggcggtgcagcgggcattgccgcggcgttcaacacgccgctggccggcatcgtattcgccatcgaggagctcagcggccgtttcgagcatcgcttctccggcaccctgctgacggcggtgatcgtcggtggcgtggtgtcgctgggcctgcttggcaactacacctacttcggccatgtgagcgcgcggttgccgctggggcagggctggctggcgatcctgctgtgcggcgtggtggccgggttgctgggcggcctgttcgcgcgcgcggtgctggccagtgcggcgggccgcccgcgttggctgggccagctgcgccagcggcatccggtgctgctggccgcaggctgcggcctggcggtggtggcactggctttgacgttcggcgacggcgcgttcggcaccggctacgaacaggcgcgcagcctggtgcaggggcaggcgttggtcggccacgagttcgggttgatgaagctgctggccaacctggcatcgtacgtggccggcatacccggcggcctgttctcgcccgcgttggcggtcggcgcggggctgggccacaatctggcggtgctgatgccgggcgtggatccgcgcgcgttcgtgctgctgggcatgtgcgcgtacctgaccggcgtcacccaggcaccgctgacctcggcggtgatctcgctggagctgaccgacagcggcgatctgctcctgccgatcctggccacggtgctgatcgcgcggggcgtgtccggtctggtatgccgggtgccgatctatcgtgggttggcggaggtgttgacggcgtcggccgttgcatcaaccgggcctgggcagggcggacgcctttcctga

SEQ ID NO: 496367 - DNA, 732 bp, Stenotrophomonas maltophilia
atggccgcacatgggcagcgcgatgaagcatgggcaatgcgcattgatctcctgcgttcggcaacccgtgtctcccgcgcactgctgggtgtcctgctgccactgcgctgcctggtctgcggcgatccgggccatgatgatctcgatctgtgccgcgcctgcctcgccggactgccctgggccggtcgcgcctgcctgcggtgtgcactgccgttgccggatgagggcctgatcgtctgcggcagctgccgcgaggaagcaccaccgcagacggccacgcacgccagcctgctgtacctgccgccggtggaccagctgctgctgcgctacaagttccatcaggacctggcggccggtcgcctgctggcgcagttgatgcagcgcgcaccaccgccctggtcctgcccgccgctggtgccggtgccgctgcaccgccggcgcctgcgccagcgcggctacaaccaggctgccgagctctgccggctgctgccgttgccggtctggcaggggctgtaccggcggcggcacaccgcaccgcagtccgaacgcacggccgaacagcgcagggaaaacctgttcgatgcgttcgatgtccacgggccggtgcccacgcatctgaccgtggtcgacgacgtgatgaccaccggcagcacggtgatggaaatcgccgaaaccctgcgctgcgtgggcgccagagaggtgcgggtatgggtgtgcgcgcgggtgccgtga

SEQ ID NO: 496368 - DNA, 552 bp, Stenotrophomonas maltophilia
atgaattcccccttgtctcccttgttgtcagcggttggccgcagctggtggatcctgctgctgtatggcctggtcgcgctcggcttcggcatcatcgccatcggttggccgctgtccgcagccatggcattggcctggacgctgggggtgatggccatcatcgaaggggtcatcagcctgttcgcactgatcagtggtggcagcggcgcctcgcgcggctggctggcgctgtatgccatcgcttcgctgggcttcggcatcctggcggtgatcaacccgctggccaccgccagcgtgctggtgctgttcctggcggcgtggctgctggtagccggcatctatcgcatcgtcttcgcgatccgcgtgcgcaagcagatccagggcgagtggctgctgatcctcagtggcgtgctggcggtggtgctggggctgctgttcgcggccaatccatacgcaggcgtggcggtgaccacgctgtggatcggcattggcagcctgctgtacgggctgctgcaggtgctggtggcgttcaagctgcggaagctgaaatga

SEQ ID NO: 496369 - DNA, 471 bp, Stenotrophomonas maltophilia
atgaggggcgcgcttccgctcctgctcggcgcggcgctggtgctggccggatgcatgccgggtgccacgcccggtgcgctggcaggcaaggatcatgcgccgcgcgccggcgtggacgtgcgcctgagcgcggtcgatgcggctggcaacggcactccggcgcactggcaaggtgaaaccctggccctgcgcgagccgccgattgccggcagtgcggacatcgccgatgtgcgctacgtgctggacgatgccaagcagccaggcctgcagatccgctatcggccagaagcgcatcagcgcatccacgatggcacctcggccctggtgggccagcgcgcggcgatcagcgtggacggccgcgtgctgatggtggcgacggtgaaaggccccttcggggaatcgatgatgctgagcgggctgccgagcattgccgaggcgcaggcgctggccaggcacatcaccggtcagtga

SEQ ID NO: 496370 - DNA, 1278 bp, Stenotrophomonas maltophilia
gtggatgccgccgccgaagccgtgcgctcgctgccgctggcgcagcaggcgcaggaactgttcacggtgaaggatcatgcgtggcgcaccatcttctggagttgtctggcgcccggcctgctgttctgtgccggcatcttctggctgtccgaatcgccgcgctggctggtgcgccgcggccgcgtcgatgatgcccgccgcagcctgcagcgggtgctgcctgctgccgacgtggaacccacccttgcacagatccaggcgccggaatcgagcagcagcgacggcaagcgcgacccactgctcagccgccgctacgtggtgccgttcgtgctggcctgcgtggtgctggcctgcacccaggccaccggcatcaattcggtgctggcgtacgcggtgaacatcctcaaccaggccggcctgtccggctcggtggccaacggcgccgacgtggcgatcaagctgctcaacgcggtgatgaccgtggtcgcgctgctgctggtcgaccgcaagggccgcaagttcctgctgatgctcggcagcggcggcatctgcgtggccctgctggctgccgccacgctgttcttccaggccgagcgtggccgcgccgacgtgcagccgcaactgcacgcggcggtcagcgccgatggcttgcagctggtgctggacgacgcacagtggcagcgcctgggcggtggcataatcagcgaaggccggccgatgcagctgaccgtgtcgtacgcctacggtgacttcaccaatgtgcgcgccctgcgcagcgacagcctgaccgaccgcgagctgcgcatcgagcgtgccgggaccgtgcagccggacagtgtgatcggcgcgttcttccgcaagctgcatctgaacccgttcgccgacccggccaaggccgcacaggcaccgctgcgcatcgagcaggcccgcatcggcccggtgccgccgccggcgcatggctgggcggtagccgcctgcatcctggtgttcgtcgcgttcttcgcggtcggccccggcgtctgcgtgtggctggcactgtcggaactgatgcccaatcgcatccgctccaatgggatgagcatcgccctgctgatcaaccagttcgtgtccacgaccatcgccgccatcttcctgcccacggtgggccactacggctacgccagcatgttcctgttctgggcggcgtgcacgttcgtgttcttcctggtagccgcgttctggctgccggagaccaagggcaagtcactggaggagatcgaggcacggttcgcacggtag

SEQ ID NO: 496371 - DNA, 615 bp, Stenotrophomonas maltophilia
atgctcggctcaccgcgcgaagcgcggcatggggaacctcgatatcggaacggaaagcagccgagcatggctcggctctacagaatgcactctgcgacgaaccgccgggcctggcccggcgctaccacaggaactgccgatgactgcaagcaccgccccgcgctggcccgtacgctacctgctcttcatcggcggcctcggcggcctgctgtacggcatcgacatcggcatcatcgccggtgccctgccctacctggaggcaacggccagccacgcctggcagctcagcagccagcaactcggcttcgtggtggcggcggtactgctgggcagcgtgctgtcctcgctgttcgccggcatggtcgccgacctgatcggtcgccgcggtgcgatgctgctggccggcctgctgttcaccgcgtcgattccgatcatggcgctggcctcaggctatacgccgctgctgctcgggcggctgctgcagggcatcagtggcggcctgatcggcgtggtgattccactgtacctggccgaagtgctcagccccgagcggcgtggacgcggtgcggcgatgttccagctgctgctgaccatcggcctggtgttggcggctga

SEQ ID NO: 496372 - DNA, 1116 bp, Stenotrophomonas maltophilia
atgaccgagacccgcaccctgcatggccgcatcctcaccccgctgggctggcggcgcgggcacgtccacttcgattcacgcgtgcgccagctgcaggtggacgaccacagcggcgccgacgacctgcagctgccggtgatcctgcccggcttcgtcgacctgcatgtgcatggcgcggccggcgtggacctgatgcagggcggcgacgtggcacgcaccatcgcccgcacccatctgcgcttcggcaccaccacgctgctggcgaccaccatgaccgccgggctggacgagatcgagcacgcgctgcacggcgtcgctgcggcaatggcggcgcccgatgccgacgccgccagcatcgtcggcgtgcatctggaaggaccgttcatcagcccccagcggctgggcgcacagcccaatcgtacgatcgaggcgacggtggcactggtgcagcagctgcacgcgctggcgccgatccgggtgatgacgctggcgccggagatcggcgagcacaccgcgttgatacccgcgctttcggcgatgggcatccgcgtgcagctgggccacagcgccggcacctacgaggagggcgtggcggcgctgcaggccggtgcctccggtttcacccatctgttcaacggcatgaccggcgtcgaccactatcgcccgggcattgcggcggcggcgctggcgcatgcgcagtacgccgagatcatccccgacctgcagcacatccaccccggcgttatccggctggccgcgcgcgcgatcccgcgcctgtacgcggtgaccgacgcgactgccgccaccggcatgcccgacggcgagtacgcgctgggcgagcagcgcgtgcacaagtgcggcggctgcgtgcgcctggcgacgggttcgctggccggcagcgcactgaccatggaccaggcgctgcgcaacctggtgcgcgtcggcctggacctggccgacgcctcgcagcgggtttccaccttcccggccgactatctgggcctgggtgatcgcggccgcatcgcgcccgacgcccgcgccgacctggtggtgctggacgccgaactgcgcctgcagcaggtggtcattggtgggcgcgtggtcgatctgacctga

SEQ ID NO: 496373 - DNA, 777 bp, Stenotrophomonas maltophilia
atgcgcaacacccgctcccgccggcaacagatcctgcagctgctgatcgagcacggctcggtgcaggtggccgatctggtcgagcgcttcggcgtgtcggcggtgacgatccgtgccgacctgacccacttcgaatcgcagggcctggccaaccgcacccacggcggcgcgaccctggtgcgcacgccgccgcaggaacaggacatccatgagaaggacgcgctgaacctgccactgaaggaatcgatcggtgcgcgcgctgcgcgcctggtgcagccgggtgacaacatcatcatcgattccggctcgacaacgatgacgctggcccgccacctgcgcgcgcatcgcgacgtgacggtgatgaccaacggcctgaacatcgcctgggaactggccaatgccgcgggcatcaccgtgctgctgaccggtggcctgctgcgccagcagtcgctgtcgctgcagggcagccaggccgaagccagcctcaactcgtacagcttcgacaccctgttcctgggcgtggacggcctggacctgcagttcggcctgactacccacgacgaggccgaagcccgcctcaatcaccgcatggtcgagcgtgcgcgccgcatcgtggtgctgaccgatgcctccaagttcggccgcgtcagcctgcaccgcatcgccctgctggatcagatccacgccatcatcaccgacgccggcatcgacgatgcaacccgcgaagggctgcagcggctgggcatcgaagtgatcatcgccgagcccaccgcatga

SEQ ID NO: 496374 - DNA, 1335 bp, Stenotrophomonas maltophilia
atgtccccgttgcagaccctgcttgcttcccaccgcgccggtgccaatgtcggcctgtacagcgtctgctgcagcaacgagcaggtgctgcgcgcggccatgcacgtggcacaggcacatggcaccgtgctgctggtcgaggccacctccaaccaggtcgaccagttcggcggctacaccggcatgaccccgccgcagtaccgcgattacgtcggcaccctggccgatgaggaaggcttcccacgcgaacggctgatcctgggcggcgaccatctcggcccgaatgcctggcagaagcgtccggcggccgaagcgatgacccacgcgcgcgtgctgatcgaagcctacgtcgccgccggtttccacaagatccacctcgactgcagcatgtcctgcgccgatgacccggtgccgctgcccgatgccatcgtcgctgcacgttcggccgagcttgccgagatcgccgaacgcaccgccgccgaacacggcctgccgccgccggtctacgtgatcggtaccgaggtgccgattcccggcggcgaagcctcgctggccgaaggcctgcaggtgaccacgccggctgccgccgcgcagaccctggccatccaccagcaggcgttcgacacgccacagctgcgcgatgcgtggcagcgcgtgatcgcgatggtggtgcagcccggcgtggacttcgaccacagcagcgtgcatgagtacaacccggacgccgcccatgcgctggccgacttcctcgagcggcagccgcgcatcgtgttcgaagcacattccaccgactaccagcgcgaaagcggcctgcatgcgctggtacgcgaccacttcgccatcctcaaggtcggcccggcggccaccttcgcctaccgcgaggcgctgttcgcgctggccgcgatcgaggccgaactgctgccggccgcacagtgctcgcgcctgccgcaggtgctggacgaggtgatggtggcgcagccgaagtactggcagtcctactaccagggcgatgccgccgcgctgcgcctgctgcgccgttattccttcagcgaccgctgccgctactactggggcgagccggcgctggtacaggcggtgcagaccctgttcgccaacctggagcagcatgcgccgccgctggtgctgctcagccagtacctgccggagcagtaccgcgccgtgcgcgaaggcagcctggccaacacccccaccgcgctggtgcagcaccgcatcggcctgtgcctgggtgagtacgcccgtgcctgcagcgccaaccaggccggcccccgcacgcagaacgcaggttcggctgccggcgttcctgcgaacggctaa

SEQ ID NO: 496375 - DNA, 939 bp, Stenotrophomonas maltophilia
atggctgagctgatcgcccacgcctgctacggcatcgacatcggcggcaccaagatcgagctggtggcgtgcgatgtggcgatgcaggttacctggcgccgccgcgtggccaccccacagggtgactacgacggtttcctgcaggcagtcgtggcgctggtcgccgaggccgatgccgcactgggccgcagtgatgcggcgatcggcatcgccctgcccggcgtgcgcgaccgccgcagtggccgccagctcagcgcgaacgtgcctgcgttgaccggccacagcgtggccgcggatctgcaggcgcggctgcaacgcccgctgcatttcggcaacgacctgcagtgttttgccctgtctgaagcacacggcggtgccgccgacggctaccccagcatgttcggcgccatcctcggcaccggtgctggcggtggtttctgcgtgcagggccgcctgctgaccggtttcaacgggctggccggcgaatggggccactggagcgtgcccggtcatctgctgcagcgccacggcctgccgctgatcgactgcgcctgcggcctgcagggctgcgtggagcgttatgtgtccggcagtggcgtggcgatgatcgagcgccaccttggtggcagcgccgccgacgccagcgcggtgatcgccctggccgaagccggtgatgcccgcgcgcgcaaggcgctggacatccatcgcgacctgctcggccacagcctggccgcgctggtgctggcgctggacccgcacgtgatcgtgctcggcggcggcctttcgcagtacgcgccgctgtaccagcacctgcccgccgccatcgccgcccacctgttcaagggtgtgcaggtgccaccgatcgtgccgccacgcttcggcgatgccggtggcgcacgtggtgccgccctgctcgcctgccaaccctcgttttcctga

SEQ ID NO: 496376 - DNA, 1155 bp, Stenotrophomonas maltophilia
atggacgtcaccctgctttccgatgtgtccgcctggcagcgccttggcggagccgataccgctaccgaaatcgcccagcagcctgcgctgtgggacgccctggcacaggacctgtcgcgtgcccgcgaccgcctgcaggccttcctcggcgacagcctcaacgatcccaaccaacgcgtgctgttcaccggcgccggcagctccggcttcatcgccgaaatggtggccgacgcgatcaacgcgcaatggcctgccgaggtgcgcgtggtgcacaccaccagcctgctgacccacccggcgctgtacctgcagcgcgaccgtccgaccctgctggtctcgttcggccgcagtggctccagcccggagagcgtggcggcggtggaccgcgtgcgcagcgacgtggatgacgcgcgcttcctcgacatcacctgcaacgccgatggcgagctggcccgccgtggcgccggccgtgccgacacctgcaccctgctgatgccgtcggccagctgcgaccgcgccttcgccatgaccagcagcctgacctgcatgctgctggccgcgctgaccgtgttcgatcgttcgccgtgggatgcgcgcgtgacgcgcctgaagcagatcgccgcgctggcccgcgaaggcctggcgcagtgggatgcaccggtggcgacactggcgcagcgcccgttcaaccgcatcatctacctcggcagcggcccgctggaagcactggcacgcgagtgcgcgctgaaggtgctggagctcaccgctggccgcgtgctggcgctggccaacacacccctgggcttccgtcatggcccgaagtcgacgctggatggcaacaccctggtggtggtgctgcgcagcgtggagccgctggcgcgccgctacgaacaggacctgctggaagaactgcgccgcgacggcgtggccggccaggtgctggcgatcggtccgcattcgaacatcggcgccgacgacgaatacaccctcaccgtgccggcactggacgatccgtggctggcaccggtgtggctgggttttgcgcagctgttcgcactgcagcgctcggccgcgctgggcctgaccccggacaacccgttcccggacggcaccgtcaaccgcgtcgtcaagggcgtcaccatccaccatggctga

SEQ ID NO: 496377 - DNA, 3360 bp, Stenotrophomonas maltophilia
gtggaaaactgcgttcgtcgctcgccgctgatgctggccctggtgccggccttgatgctggcgtccatgacggcccgcgccgagccggtcggcaacctgcgtacggtcagcgccagcgccagccgcgacggcgtgcagggctgggacctgcagaccgacaagggcgcgcgcatccgcattgaactgccggcgaccgacatcatccgcgtgcaggccggccgcaacggcacgttgaccggcgccggcgacaaggccgcgccgatcgtgctgccgcagcccaaggcgagcgtgcaggcgcagctggaagaagacgcacaggaaatccgcgtgcgtaccgaggcactggtactgcatgtacagcggcagccgctgcgcctgcgcctggaacggctggacaatggccagcccaccgcgctgtggcaggaactgcaaccgctggacctggatgccacgcagagcgtgcaggtgctgtcctcgcaggccgatgagggctacttcggtggtggccagcagaacggccgttaccagttcaagggccgcgagctggaggtgtcctattccggtggctgggaagaaggtgatcggccgagcccggcgccgatgctgctgagcagccgtggctggggcatgctgcgcaatacatggagcgatggcagctacgacctgcgccagagcgaccaggccacgctgctgcatcgcgaagaccgcttcgatgcgtactacttcgtgggcgccgacctgcccaagctgatcgaacgctacacccagctgaccggccgccccaacatggtcgcgcgctgggcgctgtcctacggcgatgccgattgctacaacgacggcgacaacagcaggaagcccggcaccgtgcccgaaggctggagcgacggcccgaccggcaccacgcccgatgtgatcgacagcgtggccaagcagtaccgcgcccacgacatgcccggtggctggatcctgcccaacgatggctacggctgcggctacaagcagctgccggaaacggtgaaggggctggccggctacggcttccgcaccggcctgtggaccgagaacggcgtcgacaagatcgcgtgggaagtgggcaaggccggcagccgcgtgcagaagctggacgtggcctggaccggcaagggctaccagttcgcgatggacgccaaccgccaggcattcaacggcatcctcgacaattccgattcgcgcccgttcctgtggacggtgatgggctgggccggcatccagcgctacgcggtggcatggaccggcgaccagagcagcagctgggattacatccgctggcacgtgccgaccctggtcggttcgggcctgtccggcatggcctacgccagcggcgatgtggatgcgatcttcggcggcagcgccgagaccttcacccgcgacctgcagtggaaggcgttcacgccggtgctgatgggcatgagcggctggtcgtcgaacgcgcgcaagcacccgtggtggtacgacgagccctaccgcagcatcaaccgcgactacctgaagttgaagatgcgcctgacgccatacatgtatgggctggtgcacgaggccgcgcagaccggtgcaccgccggtgcgtggcctgatgtgggacaacccgcgcgacccgcatgcgcaggatgaaacctacaagtaccagttcctgctcggccgcgacctgctggtggcgccggtgtaccgcagccaggccgccagccgtggctggcgccgcgacatccacctgccggccggcggctggatcgactactgggatggccgtcgcgtgcaggccgccgccgatggccgccagctcgaccgccaggtggacctggccacgctgccggtgttcgtgcgtgccggtgcgatcctgccgatgtacccgtcgatgctgttcgatggcgaaaaaccgctcgatgaagtgaccttcgacctgtacccgcagggcgactcgcagtacacgttgtacgaagacgatggcaacacgcgccgctatcagcagggcgagtcgagcacgcaggtaatccgcgtgcaggcgccggcgcagggcagtggcccggtgcaggtgcagatcgacgccgtgcagggccagtacaacggccagctggcgcagcgccgctacggcctgcgcgtactcagccggcaggcaccacgtgcggtgcaggccggtggccgcgcgctgccggcgctggccgatgctgccgccttcaacagcgccaacgagggctggtacttcgatgccaaggaccgccgcggcaccgtgcatgtgcgcactgccacccaggacatccgccagccactgcagctgcagctggacttcgcagtcgctgccgcagccaccgatgatgcctatccggccgcaccggtgctgggccgcgaactgccggccgacagcctgctggtggtcaaccgcccggccgaagagcctggccatgcgttggagaacgccttcgacgacgatccggccacctggttccgcagcgtgcgcaaccaggccgtgcgcaccggcgcccacgagtgggtgatcggcttcggcgagcggaagatgatcgatggcatcgacatcgcgccacgcaatgacaagaactggaagcacgggcaggtacgtgactatgaggtctacctgggcgacagcaacggtgagtggggcgagccgatcgcccgcggccgcctgcagttgaaggaaggcgtgcagcgcatcgacttcccggcccacgccggccgcctgctgcgcttccgcgtgatgagcgtgcagaaccccgaaggcgacggcgccagcagcaccgacccgatggtcaccgccgcacagggcagcgcccgcgcattcgatgcactgcagccgcgcgacgtcggcccgatcgccctgtccaccttccacatccttgaacaccaggaaccggagcgaccggcccggcagcgctatctctccgagctgccggtgccggccgcgctggccagccaggtgcgcaccgaccagtccttccgtggcgacgccggcatgcgcatgaacggcctgcagttccgccgtggcctgggggtcggcgccaacagccgcatcgacctgcgcctgcagggcggctggcacctgctgcgtgccgacctcggcatcgacgacgcctgccgcagcgccggcggcctgcagttccaggtctggggcgacaaccgcctgctgtacgacagcggcctggtgaaggcgcccggcgtggtcaagccggagctggacatccgtggcctttccaccctgagcctgcgcacgctgggtgcgcagggcagccaacccgcccaggtctgtgccaactgggccaacgccgtactgatcggccaggagggcgactccgccagcatcgtcgccccatga

SEQ ID NO: 496378 - DNA, 1428 bp, Stenotrophomonas maltophilia
atgttcaagcaactgtgggccaccaagcatccgcatgccgcccatgaagacgccaacggcctgagcctgcgtcgccaccttggcccctgggggctgaccgccctgggcatcggcgcggtgatcggcggcggcatcttcgtcatcaccggccaggccgccgccaaccacgccggcccggcgatcatgctgtccttcgtgctggccgccatctgctgcgccttctgcgcgctggcctatgccgaattcgcctcgatggtgccggtctccggcagcgcctacacctacacctacgccaccttcggcgagctctcggcctggttcatcggctggatgctggtgctcgagtacggcgtctccgcctcggcggtggcggtcagctggaccggttatttcctcagcctgctcagccagttcgacatccatctaccggcggcactggtcagcgcgccactggacgcgcagctgcgccccaccggcgcgatcgccaacctgcccgccgccgcactggtgctgctgctgacctggctgtgctacgtcggcatcagcaagtcctcggcgatgaacatggcgatggtcgtgctcaagaccggcctgatcgttctggtcatcgtggtcggttggaaatacgtggacaccagcaactggaccccgttcattccggccaatgaaggcccgggcaagtacggcatggaaggcgtgctacgtggcgcggcgatggtgttcttcgcctacatcggtttcgaggcggtatcggtggcggcgcaggaatcgaagaacccgcagcgtgacatgccgatcggcatgatgctgtcgctggtgatctgcaccgtgttgtatatcgcaatggccgcagtgatgactggcctggtgccgttccagctgctgggcaccgacgagccggtggtgactgccgtggccgcgcacccacagctgggctggctgcgctgggtggtcgaggtcggtgcgctggtcggcctgtcctcggtggtgctggtgatgatcatcggccagccgcgcatcttcatgatcatggggcgcgacggcctgctgccaccggtgttcacccggatccacccgaagtaccgcacgccgcacatcaacaccgtgatcaccggcatcggcatcgcgctgctggcagcgctgttcccgctggacatcctcggcgagctgacctcgatgggcacgctgatcgcgttcgccgcagtctgcgccggcgtgctgatcctgcgccgcacccagccggacctgccgcgcccgttccgcatgccgatggcgtggctgatctgcagcctgggcgtgctgagctgcctggcgctgctgtcggcgatgacgatgcacaactggatgctgatgggggtatggacgttcgtcggcttcgtgatctatttctgctacgggttccggcacagccgcctgcggggtcagtaa

SEQ ID NO: 496379 - DNA, 1476 bp, Stenotrophomonas maltophilia
atgctgaaagctctgttgagggtcaagccggtcgagccggccgggcacgtcgatgccggcgaacccatcgaaggcagcctggacggcgaagccacgttgaaacggaccctcacggctaaacacctcatcctgctgggcgtgggtgcggtgatcggcgcaggcatcttcgtgctgaccggccaggccgcagccaaccacgcgggcccggcggtcatgctgtcgttcgtgctggccggtttcgcctgtgcgctggcaggcctgtgctatgccgagttcgcggcgatgatgccggtctccggcagtgcctactcctattcctacgccaccctcggcgaaggcatggcctggttcatcggctggtgcctggtgctggagtacctgttcgcctcggcctcggtcgcggtgggctggtcggcctacctgatcagcttcatcaccaccacgctgcacatgcccttcccggacatgctcagcgccgcgcccatcgcctggaccggcagcgagttcgtctcctccggcaagctgttcaacctgccggcggtgctgatcgtggcggcggtgtccggcctgctgtacgtgggcgtgacccagtcggcgttcgtcaacgccatcatcgtggcgatcaaggtcaccgtcatctgcctgttcatcggcatcggcgcggcccacatcgacccggccaactggcacccgttcattccggaaaacaccggggtgccgggtgagttcggctggagcggcatcttccgcgccgccaccatcgtgttcttcgcgtacatcggcttcgatgcggtctccaccgctgctggcgagaccaaggacccgcaacgcaacatgccgatcggcctgctcggctcgctggccgtatgcacgatcgtctacatcatcgtctgtgcggtgctgaccggcatgatgccgtaccacctgctgggcaccgacaagccggtggccaccgccctggagccctacccgaccctgtcctggctgaagacgttcgtggaagtcggcgccatcgccggcctgtcctcggtggtgctggtgatgatgatgggccagacccgcatcgcctataccatctcccgcgacggcctgctgccgaagttcttcggcaaggtccatgcccgattccgcaccccgtacgtcgccaccatcgtggtcggcgttatcgccgccgcgctggccggcctggtgccgctgaacgtgctgggcgagctggtctcgatgggcaccctgctggcctttgccacggtctgcatcggcgtgctggtgctgcgctattccaagccggacctgcaccgcccgttccgcgtgccgatggtctggatcatctgcccgctcggcgcggccacctgcctgttcctgttctggcaggcgttcgtggtgcattggcacctgttcgttggctggacgctgctcggcctgctgatctacctgggctacggcatccgcaacagcaagctcgccaagtcgccctga

SEQ ID NO: 496380 - DNA, 615 bp, Stenotrophomonas maltophilia
atgaacggcgataatgagcagtatttttccgaaccgcccccattcatgagccagaccgccgaaacccttgccgcgcttgacgatcgcctgcgcggcctgctccgggactacgcgcgccgcgaacccgcccacgacgccctggctgccgaattcggcacattgctggatgatccggaagatccgttccgccgcgagcgcctggccggccacttcaccgccagctgctggctggtcagcgccgatggccagcgcctgctgctgacccaccaccgcaagctgcagcgctggctgcagctgggcggccacgccgacggcgaccgtgacctggcccgggtggcgctgaaggaagccgaggaggagtcgggcctgagcggcctggtactggaagacccggccatcttcgatctggacaagcactggattccggagcgcaaggacgtgccggggcactggcactacgacgtgcgtttcgtgatacgggcgctggggggcgaggccttcgtgctcagcgaggaatcgctcgacctggcctggcggccggtgaccgaggtcgcggccgaccccgaatcggatgaatccatgcagcgcatggcgcgccgttggctggcgcgttga

SEQ ID NO: 496381 - DNA, 1242 bp, Stenotrophomonas maltophilia
atgtcgccgaagaagacctcgttcccgaagcaggatatccgcgtactgttgctggagggggtcagccagaccgccgtggaggtgttcagcgccgccggctacagccagatcgaggcgcacaccaaggcgctgcccgaggacgaactgaaggcgcgcatcgccgaggcgcacatcgtcggcatccgctcgcgcacccagctcagcgccgaggtgctggccgaggccaagcgcctgatcgcggtgggctgcttctgcatcggcaccaaccaggtcgacctggacgcagccgagctggccggcatcccggtgttcaacgcgccctactccaacacccgcagcgtggccgagctggtgatcgccgaggcgatcatgctgacccgcggcattccgcagaagaacgccgaatgccatcgcggcggctggtcgaagtcggccagcggcagccatgaagtgcgcggcaagacgctgggcatcatcggttacggccacatcggcacccaggtcggcgtgctggccgaatcgctgggcatgcaggtgatcttccacgacgtggaaaccaagctggcactgggcaatgcccgtgcagcggccagcctggacgacctgctggcacgcgctgacatcgtcaccctgcatgtgccggagacccctgccacgcaatggatgatcggcagcaccgagctggcgaagatgcgcaagggcgcgcacctgatcaatgccgcgcgcggcaccgtggtcgacatcgatgcactggatgcggccctggccagcggcaacgtcggtggcgccgcgctggacgtgttcccggtcgaaccgaagggcaatggcgatatcttcgaatcgccgctgacccgccacgacaacgtgatcctgaccccgcacgtcggcggcagcacgctggaagcgcaggacaacatcggcgtggaggtggcggccaagctggtgcgctacagcgacaacggcagcaccctgtcggcggtcaatttcccggaagtgaccctgcccgaacacgaagacagcctgcgcctgctgcacatccaccagaacgtgccgggcgtgctgtccagggtcaacgagatcttctcgcgccacaacgtcaacatcgacggccagttcctgcgcaccgacccgaaggtgggttacgtggtgatcgacatcaccgccagcgaggcgcaggccgccgccgtccgcgacgaactggccgcgattccaggcacgctgcggacgcgcatcctgtactag

SEQ ID NO: 496382 - DNA, 1389 bp, Stenotrophomonas maltophilia
atgaccgattcccgcattgcctcgctgcagcaggcctgtcccggcctgaagctgaagatcgacccggctgacctggagcattacgggcgcgactggacccggcgctggacgccagcgccgctggcgatcgcactgccggccacggtcgaggaagtgcaggcggtgatgcgctggagtgcgggcgaggacgtggccgtggtgccgtccggcggacgtaccggcctttccggtggcgcggtggccgccaacggcgagctggtgctcagcctggaacggatgaacaaggcactggcctacgacgcggtcgatcgcaccctggtggtgcaggccggcatgccgctggaggccgtgcacaacgccgcgctggaccacggcctgatctacccggtggacttcgctgcgcgcgggtcgtgcacgatcggcggcaacatcgccaccaatgccggcggcatccgcgtgatccgctatggcaatacccgcgagtggatcgccgggctgaaggtggttaccgccagcggcgagctgctggaactcaacaagggcctgatcaagaactccagcggctatgacttccgccagctgctgatcggttcggaaggcacgttgggcgtgatcgtcgaggcgacagtgaaactcaccgatccgccgccggccagcaacgtgatgctgctggcagtacccagcttcgaggtgctgatgcaggtgttcgccgcgttccgcgcgcgcctgcagctgcaggccttcgaattcttcaccgaccgggcgctggagcacgtgctggcgcatggcgcgcaggcaccgttcgacgaggtgcatccgtactacgtcgtcaccgagttcgcggccaacgacgaggcacaggaagccgcggcgatggcggccttcgaggactgcatgggcaacggctgggtcagcgacggtgtgatcagtgccagcgatgcccaggccgcccagctgtggcgcctgcgcgaaggcatcaccgagtcgctggcgcgctacaagccctacaagaatgacgtctcggtgcggatctcggcgatgccggcgttcctggccgagacccaggcactgatcgggcaggcctacccgcacttcgacgtggtctggttcggccatatcggcgatggcaacctgcacatcaacgtgctcaagccggacgacaccagcgacgccgacttcgtggcgcagtgcgagcacgtgaccaagctgctggcgcaggtgctggcccgcttcgatggcagcatctcggccgagcacggcatcggactggtcaagaagggctacctggacagcacccgcggccccgccgagatcgcgctcatgaaggcggtcaaacgcgcgttcgatccccaagcgcggctgaatcccggcaagctgttcgacgcctga

SEQ ID NO: 496383 - DNA, 300 bp, Stenotrophomonas maltophilia
atgacccgtccgctcctgctgctcgccctgctgtccctgccgctggccggcttcgcttccagcttcgctggcacctcggccggttcggcgaccggtgcctcctccggttcctcgggcagcagctcgggcgacgacaaggtggtgcgggccgcgcacgacgatgccgctgcgttcgtcgccagcgacggccagatccgtggcgcccgcctgcaggccgcgctggtccacctgcgcgagcagagcgctgccgcacagcagcagagcgacctggaactggcccgcgcgctgctggcacgttga

SEQ ID NO: 496384 - DNA, 1896 bp, Stenotrophomonas maltophilia
atgacctcggcgtcatcgctttctgcagagccgagccatgcccggctggatgcccggcgcacccggatcgcaacagcagccgagcaaggctcggctctacggaagcacaacgggcggtgcgggtggatcgccgcattggcatggctgctcatcccttccgtccacgcggctgatcggctgcagctcgatccctccggtctcgatccggcgcagcagcagctcgccagccagaccctggccgacgtgcagtccctgctgccggaaggcctgctgcgcgttttgccggctcaggtgcaggtgcgctggagtgatgaccttcccgccgaggtgcacgggcgcgctttcgccggccgcattacgttgcgccgcaccctgctggatgacggcatgcccggcaaccgccgtgcgcgccgcagtgcgctggtgcatgaactgacccacgtcgccgaccgtggcggtgcgaactggtcgcagagcgtgcgatggcgtgaccttgcgggctggcagcgcaagccctggcacctcggccggggcgacaacgatttccgtgatcgcagcccggatgtctatgaactgacgaacccggccgagtacctggccgtgaatgccgagcatttcgtcctcgacggcgagttcgcctgccggcggcccgcattggcgcagtggtaccaggcgcatttcggaacgccaccgtcgctgccacagccgcggtgcgccacgacgctgcccctgctgcaggccgaatcggaggagggcgctgcatcgctgctgcagctcgacccggcgcgcgtctacgcggtggactacctgttcgccgaaggcagtgcgcagccgatgagtcgctggggccacagcatgctgcggctggtggtctgcaagccgggccgcgtacctgggccggactgccgcctggacctggagtaccaccgcgtgctgtcgttccgcgcgttcgtgggcgacgtgcagatatccaactggcgtggcctgaccggcggctatccgtcgcggctgttcgtgctgcccctgcagcaggtggtggacgagtacaccaaggtcgagctgcgcgggctgcagtcgctgccgctgcagctgggccgcagcgaaatcgccagcctgctcgagcgcaccgcgcaggtgcactggagctatgacgggcgctattacttcgtcagcaacaactgcgcggtggaaaccgccaagctgctgcaggccggggtgccgcgccttggcgaggcgggcctggcccaactgagcccgcgcggcctgaagcggcgactggtgcggctggacgtgctcgacgagagggtactggcggaccgcactgcagcgcaggcgcagggctactacttcgcctcggcgcgcgaccattaccagcagttgttcgcagtggccgcggcccagctggccttgcccgctcgtgatgtgcgcggctggttgaagctgcctgcacagcaacgcgcaccgtggctgctgcagggtgacctgcgtgccagcgccggcctgttgctgctggaacaggccgcgcagcggcgcgccgagctgcgcgcacgcgatgtgctcaagcggcagctgctggccgcaccggacagcgctgaaacgcgcagcctgcgcgggttgctggaacagagcgggcagtggctgcgcccggggacgctgctgcaggatgacggctatggattgcctctgggcgacgagcaggcgctgctgtccgcggccgtggccactgccagtgcgcaggcggtcccggcgtggcaggcattgcgcgtccagctgcgccagcagctgccgatccgccaacgcgaggaaatggatgcgatcgacgccaatctggccgcactcggtgcacacctgcgtacgcaggcagcccgcccggctactggcgcggcagttcgatga

SEQ ID NO: 496385 - DNA, 1077 bp, Stenotrophomonas maltophilia
atgccctccctgcgccgctccgggctgagccgccacatcatcgtttcgatgtcgctgatggtgatcggcgtcatcgtgatgatgatcctgtcatcgtggctgctgtacgcggtgctggtcgagttcttccccggcagtgccgaggagccggaaagctggctgccgaccggcccggaactggcatggatggtgggcgtgatcctgaccgggctggcgctggccatcgccgcctcgttccgcctcgcccaccgcatcctgtcgccgctgaattcactggtggacagcgtgcgtgcgctcgcgggcggcgacctgggtgcacgcgccagcgtcgaggaaaattcgccgggcgaagtggcgaccctggtcgaggacttcaatgcgatggcgcgccgcctgcagcacatggagagcgagcgcgcgatgtggcacgcggccatcgcccatgagctgcgcacgccggtgacgatcctgcgtggccgcctgcaggggctggcagagggtgtgttccagccagacgagtcgcagttccgcagcctgctggcccaggtcgaagggctgtcacggctgatcgaggacctgcgcgtgctgagcctgtccgacaacgcgcggctggacgtgcgtcgcgcgcgcaccgacgtggtggccgaggtgcattcggtgatgaccctggtcgatccgcagttccgcgccgccggcttcgtgctggagctggaaaccagccgcgaggaacacaacgcgcactgcgacccgacccgcctgcgccaggcattgctggcgctgctggagaacgcgcggcgctatgccagcccgggcaaggtgcggattgcagtgcatgacacgcccggccacgtgcaggtggcgatcgaagacgagggtccgggcatcgacccggaactgcatgcggatatcttcaccccgttcatgcgtggcgacggttcgcgctcgcgccagggcggcggcagcgggctcggcctggcggtggtcaaggccatcgccgacgcgcacggtggccgcgtctactgcagcccgggcagcgccggcggcagccgcttcgtcatcgaactgccgcgccagtag

SEQ ID NO: 496386 - DNA, 750 bp, Stenotrophomonas maltophilia
atggaggcaagcaccttacggccccgcccctgcatgcatgcctcccctgccctcgccgccctcgtcctgatcgtcgaggatgaggccgagatcgctgacattctctgcgcctacctggaacgcgaaggactgcgcacgctgcgcgccgccgatggccacagcgcactggacctgcaccgcagcgcccggcccgacctggtcctgctcgatgtgcagctgccgcgcctggacggctggagcgtgctgacccagctgcgccagcgcggcgagacgccggtgatcatgctgaccgcactggaccaggacctggacaagctgaccgcgctgcggatgggcgctgatgactacgtggtcaagcccttcaacccggccgaggtggccgcgcgcgtgcgcgccgtactgcggcgcacgctgcgcgccgcgcgcgtggacgcacccaccgcgttgcgcgtcggcccgctgctgatcgactcggccacccacgcggtgcacgtggagggcgaaggctacagccacgaagtgctgctcaccctcaccgagttcaagctgctgcactgcatggcgctggcgccgacgcgcatcttcagccgcagcgagctgatgcacgaatgcctgccggaaagcgaagcactggagcgcaccgtcgacagccatgtcagcaagctgcgccgcaagctggatgaagtgggcatggtcaacgtcccagccagcgtgcgtggcgtcggctaccggctgatggccgatcgctga

SEQ ID NO: 496387 - DNA, 1122 bp, Stenotrophomonas maltophilia
ttgatcgcggccctcgccttggccatgacggcctgctccactcccgaagccacccccgaggcggcgccgcgcgtcagcgtgatcagcgtcggcccgcaggtggtgcaacgtgacgacgaactgccaggccgcgtcgcggcggtgcgcaccgcgcagatccgcgcacaggtgggcggcatcgtgcagcggcgcctgttcgaccagggggcggaagtcagggcaggccaggccttgttccagattgacccggcagcgttccgggccgacgtcgattcggcgctggccgcactgcagcgcagtgaggcggcgttgggccgcagtcgcgtgcagtcgcagcgcctgcacgccctggctgccgcgcaggcggtcagccagcagcatcgggacgacgccagcgccgagtacgagcaggcacgcgcggcagtgaatgaagcgcgcgcgatcctgtcccgtcgccagctcgacctgcgctatgccacggtcagcgcaccgattgccggtcgtatcgatcaggcattggtgaccgaaggtgcgctggtcggcgtggccgatgccgagccgatggccgtggtacagcagatcgaccaggtctacgtggatgtgcgccagccggcggcgcagctggagtcgctgcagcgcagtgcggccggcggcgacaagctgccggtgaccatcatcggtgccgccggcaagccgctgcccgagcgtggccagctgctgttctccggtatcaatgtcgatgcacggacgggtgatgtgatcctgcgcatcctggtggacaacccgcggcggcagctgctgcccggcatgtatgtgcgcgcgagggtgccgcggggtgccccggccagcgcgatgaccgtgccacagcaggcggtgctgcgcagcgccggtggccaggcctatgcctgggtgataggcgccgacggcagggcggtgatccgcacgctggaggtggacggcagcgtcgatcgccagtggctggtgcgcgcgggcctgaaggccggcgagaaagtggtggtcgagggccaggagcgcctgcaggaaggcgtggtggtcgatgcgcgcgactggcagaagccggtcgccagcgccggtgcggtgcaggccggcagcaagggctga

SEQ ID NO: 496388 - DNA, 3150 bp, Stenotrophomonas maltophilia
atggcacgtttcttcatcgatcgcccggtgttcgcctgggtgctggcgatcttcatcatcctggccggcgcgctggcgattccgcgcctggccgtggagcgctatccggcggtcgcgccgcccagcgtcagcatctatgccagctacccgggtgcgagcccgcagacgttgaacgatgcggtggtcggcctgatcgagcgcgagctgtccagcgtcaagcatctgctttacttcgaatcgtcggtggacacctccggcgaagcctcgatcaccgccaccttcaagcccggcaccaatccggaactggcccaggtggacgtgcagaaccggatcaaggcgatcgagccgcgccttccgcgcagcgtgcggcagaacggcctgttcgtggaggccgccgattccggcttcctgatgctggtcggcctgcgttcgccggatgccagcgtcagcgaggccgcgctgggcgatttcatggcgcgcaacatcatcgaagagctgcgccgcatcgatggcgtcggtcgcgtgcagttgttcggtgccgagcaggcgatgcgcgtgtggctggacccgacccggttgaccggctacggcctgaccatgggcgatgtggccactgccatcgagcagcagaacctggagatctcgccggggcgcatcggtgattcgccgggtgttccaggccagcgcatcaccgtgccgctcagcgccgacggccagttgtccacgccggaacagttcgcggcgatcgtactgcgcgccggggccgacggttcacgggtggtgctgggtgatgtcgcccgcgtcgaactgggcgcgcagagctatgcctggggcacccgcgaggatggccatccggccaccgccgccggggtgcagctgcggccgggcgcgaatgcggtgcgcacggcgtcggcggtccgtgagcgcatggcggaactggcgccgctgttgccgcgcggcgtggaggcgagcatcccgttcgacaccgcgccgttcgtgaagatctcgatccagaaggtggtgcagacgctgctggaggcgatgctgctggtgttcgcggtgatgtacctgttcctgcagaactggcgctacacgctgattcctgcgctggtcgcaccgatcgcgctgctcggtaccttcgcggtgatgctggcgctgggcttctcgatcaacgtgctgaccatgttcggcatggtgctggcgatcggcatcatcgtcgacgacgcgatcgtggtggtcgagggcgtggagcggatcatggccgaggagggcctgccgccgcgcgaggcgaccatcaaggcgatgcgcgagctgaccggcgcggtgatcggcatcaccctggtgctgaccgcagtgttcattccgatggccttggccagcggctcggtgggcgcgatctaccgccagttcaccgtggcgatggcggtgtcgatcctgttctcggcgctgctggcactgagcctgacaccggcgctgtgcgccaccctgctgcgcccgaacacccacggccatcatggtcgtggcgggctgttcggcgccttcaatcgtggcttcgaggcgttgaccgggcgctaccagcgtggcgtggcctccgcgctgcagcgaagcggccgggtgatgggcgtgttcgccgcgctggtggcggcgctgctgctgggcctgcactggctgccgggcgcgttcctgccggatgaggaccagggctatttcatgacctcgatccagctgccggccgaagccaccgccgaacgcacgctggcggtggtcgaagcctacgaacggcacgtggcctcgcgcccgggcatcggctccaaccagtcgatcctcggttacagcttctccggttccggcccgagcgcggcgctgacctacaccatgctgaaggactggggtgagcgtgctggcgccaccgcggccggcgaggtggaggccgcgcagcaggcgatggccacggttgccgagggtgaggtgatgagcgtgatgccgccggcgatcgacagcctgggccgttcgtccgggttctcgctggccctgcaggcgcgtaccgggcagagccaggccgagctgcgcgcagccctgcagcagctgctgaagctggccgaggccagtccgctgctgtcggaggtgcatgccgatggcctgccggcaggtatcagcgtgcggctggacattgatcgtgccaaggccgaggcgatgggcgtgggcttcgagcacatcagcagcacgctgtcagcggcgatgggctcgcagtacgtcaatgatttccccaacaagggccggttgcagcaggtgatcctgcaggccgacgcgccgcatcgcatggaactggaggacgtgctgaaactgtacgtgcgcaacagcgagggcggcatggtggcgttgtcggaactggtgaccccgaactggaccgaggcgccgctgcagctgcagcgctacctcggcttcccggcgttgaatctgtccggcgcaccggcctccggcgtgtcgaccggccaggccatggcggagatggagcggttggccgggaagctgccgtccggttttgccctgcagtggaccagccagtcgctgcaggagcgtgagtcgggggcgcaggcgccgtggctgctgttgttgtcgatgctggtggtgttcctggtgctggcggcgctgtacgagagctggtcgattccgctggcggtgatgctggtggtgccactcggcctgctcggtgcggtcgccgcggtgctgttgcgtggcatgcccaacgatgtgttcttcaaggtcggcatgatcaccgtgatcgggctgtctgcgaagaacgcgatcctcattgtcgagttcgcgcggcagctgcagcagcaggggcgcggcctggtcgaggcggcattggaggcagccaggctgcgcctgcgcccgatcgtgatgacctctctggcattcgcgctgggcgtggtgccgctgatgctggcgcagggcgcgtcgaaggaaacccagcaggcgattggaaccggtgtgttcggcgggatggtcagtgcgaccgtgctggccgtgttcttcgtgccggtcttctatgtagtggtgcagggcgcgcggcagtggatcgcgcagcgcctgcgcaggcgccggccgatgccgggaggaaccgtggatggaacggaacatcgttga

SEQ ID NO: 496389 - DNA, 393 bp, Stenotrophomonas maltophilia
atggaacggaacatcgttgaagatctgcatgagcaacagttgatggcgctggagcagcgcctgtgcgcggcgctgctggaaaatgaccacgatgcgttgaacgcgctggtatcgccggccttgttcatgatggaaggccacggcggccgcatgctcgatctgccatggctgggcgattggctggccggcagcctgcaggtgcgaagcctgcagctgcacgcggtggagacgctgctgtgtggccgcctggcgttgctgtccagcgacgtgcggttgtccgtgtggcggcagggccgggagcgtgaagtgaagctgcgcctgctgcgggtctggacctgcagttccggcggcagcggtgcgcagctgttgtcgatggcggtactggccgcgtga

SEQ ID NO: 496390 - DNA, 702 bp, Stenotrophomonas maltophilia
atgcgtgtagttcccagtctgttggcagcctcgctcgggttggtgctggccgcgtgccagccggcccaggcacccgctgcgggcggcaccgatgccgcgccgccggcggcgcccgaaccggctgccagcaccagcgccggtaccggcagccagaccacgtaccagtgtggtgatctgagcgtgcgcgcgaccttcaatggcgaggatgcggccacggtggtgatcggcgaacgtaccttcgccatgacctccgaacgtgcggcgtcgggtgccaagtacggtgatggccagggcaacagcttctggaccaagggcagcgatgacggcctgttgagcctgaagggcgaggcggaccgcgagtgccatgcggtcgaagcgaccgaaggcgatggcagcgcgggcacggccgcgttccgcgccacgggcaacgagccgggctggttggcggtcgtcgatggcgacgcgccgggcctccaggttgaagttgactatggcgagcgtcgcttggacgtcgccacgcccaccgaaggtgctgacggttggagtggcaaggcgtccgacggtaccgacgtcaagctcagcttccagcgcaccacctgccaggacgacatgagcggcgaggcgttcgatgccaaggtgaacctgaccatcggcacccgccagtatcacggctgcggcaactttggcgcgaagcagccgtaa

SEQ ID NO: 496391 - DNA, 567 bp, Stenotrophomonas maltophilia
atgaaagccaacgacatcaagaagggcaacgtcgtcgagtacaacaacggcgtgtaccagatccgcgacatcgagcgcagctcgccgcagggtcgcggcggcaacgtccgcttccgcttcatcatgtacagcgtgccgggcggcaacaagctcgacgccagcttcgatgccgacgacaacctggtcgaggtcgaactgctgcgccgccagtccacctattcgtacaaggacggcgatgccttcgtgttcctcgatgacgaggactacaccccctacaccctggacgcggacgtgatcggcgatgacgctggctacatcaccgacggcctgaccggcatctacgtgcaggtgatcgacgagcagccggtggcgatccagctgccggcctcggtggtgctggaagtgatcgagaccccgccggaactgaagggcggcactgccaccaagcgcccgaagccggccaagctcaacaccggcatcgagatcatggtgccggaatacatcgtcaacggcgaacgcgtgctggtgaacaccgccaccggcgaattcgccggccgtgccgactaa

SEQ ID NO: 496392 - DNA, 771 bp, Stenotrophomonas maltophilia
atgcagctgtcttccgtacgtgccgtgatcactggcggcgtctccggcctcggcctggccgtggcccagcacctcgtcgcccagggcggcaaggtggctctgttcgacctcaacgacgacaagggtgcagctgccgttgccgggctgggtgccgacaaggcccgctatttcaatgtcaatgtcagcgatgaggcggccgtggctgcagccatcgaccaggcccacgatttcctcggcggcctgaacgtggcgatgaactgcgccggcatcctcggcgccggtcgcgtgctcggcaaggaaggcccgatgccgctggccggcttccagggcacggtgatggtcaacctggtcggcagcttcaacgtcgccaaggccgcggccaaccgcatgcagcacaacgacgccggcgaagacggcgagcgcggcgtgatcatcaacaccgccagcatcgctgcctatgaaggacagatcggccaggccgcgtatgcggccagcaagggcggcgtggtgtcgatgacgctgccgatggcgcgcgagctgtcgcgcttcggcatccgcgtcaatacgattgctcctggcgtgttctggacgccgatggtcgatggcatgcccgaagccgtgcagcagtcgctggccgcctcgatcccgttcccgtcgcgcctgggcaagccggaagacttcgccagcctggtcggcttcatcctcggcaacacctacctcaacggcgagaccatccgcctggacggcgctacccgcctcgctccgaagtga

SEQ ID NO: 496393 - DNA, 897 bp, Stenotrophomonas maltophilia
atgagcgactacgtccgcatcgtcgaggtcggcccgcgtgacggccttcagaacgaaaagcaatcggtgtccaccgccgacaagatcgaactgatcaaccgcttgtcggccaccggcctgcgcagcatcgaggcgaccagtttcgtcagcccgaagtggattccgcagctggccgatgccgccgaggtctacgctggcatccagcgccggccgggcatccactacccggtactggtgccgaacgaacagggctacgaccgcgcccgcgcggtgggcgtggaggaagtggcggtgttcaccgctgcgtccgaggccttcaaccgcaccaacaccaatgccggcatcgacgaatcgctggcccggttcgagccgatcctgcgccgcgccgccgccgatggcgtgcgcgtgcgcggctacgtctccaccgtgctcggctgcccctaccagggcgaggtgccgctggccgacgtggtgcgggtggcgcgcgcgctgcaccagatgggctgttacgaaatctcgctgggcgacaccatcggcgtcggcaccccacgcaaggcacgggcgatgctgcaggcggtcgctgccgagatcccgatggaagccttggccgtgcacttccacgacacctacggccaggccatcgccaacatcgccacctgcctggaagcaggcgtgcgcgtggtcgacagtgcagtctcgggcgccggtggctgcccgtacgcgaagggggccagcggcaacgtcgccagcgaggacgtggtctacctgctgcagggcctgggcctggacagtggcgtggacctgccggcactggccgagaccggccgctggctggccggcctgctcggccgcgccaccgccagccgcaccggccaggcgctcgcagcgaccggctga

SEQ ID NO: 496394 - DNA, 402 bp, Stenotrophomonas maltophilia
atgctcgatcatcttggtttgaccagcgccgacctggcgcgcagcaagaccttcttcctgcaggcgctggcgccgctgcagatcggcgtggtgatggaagtgagcgccgaacagaccggcgaccacgaccacatcggcttcggcagcgacggcaagccgttcttctggctcggcaatggcggcaccgccagccacggcgtgcacgtggccttcgcctgcgccagccgcgcgcaggtggacgccttccacgccgccgccctcgccgccggtggccgcgacaacggcgcgccgggcctgcgcccgtggtaccacccggattactacgccgccttcgtgctcgacccggacggcaacaacatcgaagcggtctgccatcgccccatcggtgaggtggctgcatga

SEQ ID NO: 496395 - DNA, 789 bp, Stenotrophomonas maltophilia
atgaacgatgctttgcagatcgagcgccgtggcgccgtcctcaccctctggctgaaccggccggagctgcacaacgcctttgacgccagcctgatcgcccggctgaccgccgcgctggaagccgccggccgcgatgattcggtccgggccgtggtggtggccggtcacggcgcctccttctcggccggtgccgacatgcagtggatgcgcggcatggcggcggccagcgaagccgacaaccgcgaggactcgctggcactggcacggctgatgcgcaccctggacgagctgcccaagccgaccctggcccgggtccacggcgcggccttcggtggcggcgtcggcctggttgcctgctgcgacattgccatcgccagcacctcggcccgcttcggcctgaccgaaagccgccttggcctgctgccggcggtgatctcgccttacgtgatcgaggccatcggcccgcgccaggcgcggcgctggttcgccaccggcgagcacttcgacgccgataccgcactgcgcatcggcctggtccaccagctggtcgagcccgagcgcctggacgaagcgctggagcgccagctggccctgctcgacaaggccggcccgatcgcctcgtccaccgccaagcagctggtccggcaggtccgcgacagcgatgaccgcgatgcgctggatcgggacaatgccgctctgatcgcgcgcctgcgggtgtccgccgaaggccaggaaggcctgggtgccttcctcgacaagcgcgccccccattgggtcacggaagcctga

SEQ ID NO: 496396 - DNA, 255 bp, Stenotrophomonas maltophilia
atgacgctgtccgaactgccgctgcacacctcggccgtggtcgagtccgtgcaggacctgcatgccaacgatgccattgcccgtcgcctgcgcgagctgggtttcgtgaacggcgaggaagtgcgcctggtggccaagggcccggtgggcggcgagccgctgctggtgcaggtcgggttcacccggttcgcgctgcggatcagtgaagccaagcgggtcgtggtcgacgccgccagccaggaacgacgtgcatga

SEQ ID NO: 496397 - DNA, 1866 bp, Stenotrophomonas maltophilia
atgaccgcaatcgctgccaccgcccccctgcgcatcgcgctggtcggtaaccccaacagcggcaagaccgcgctgttcaaccagctgaccggcagccggcagaaggtcgccaactacaccggcgtcaccgtcgagcgcaaggagggccgcctgcgcgcgccgtccggccgtgaattcgccgtgctcgacctgccgggcgcctacagcctgcatccggccagcctggacgaggcaatcacccgtgacctgtgccggggcttctacccgggcgaggccgcgccggacgtgctgctgtgcgtgatcgacgccaccaacctgcgcctgcacctgcgcttcgcgctggaactgcgcgagctgggcaagccgatggtggtggccctgaacatggtcgatgcggcccagcgccgcggcatccaggtggatgtggccgcgctggagcgcgaactgggcgtgccggtggtggagaccgtggcggtgcgcaagcagggcgccaaggccctggtcgagcgcctggacgagatggtgccgcacctggatgcaccggtgccgggcccggaaagtggcatcgattaccacgccaaggtgcgcgggatcctgtcagtcgccgtgcgcatgccagcacggaccgcgaagatcgacgacgcgctggaccgctggctgctgcacccggtgttcggcctggtcagcctggcgatggtgatgttcctgatcttccaggcggtgtacgcctgggcgacgccgctgatggacggcatcgaggctggcttcgcctggctcggcacctttgttggcagcgtgctgccggaaggcccgctggccagcctgctgaccgacggcatcatcgcaggcgtcggcggcgtggtggtgttcctgccgcagatcctgatcctgttcttcttcatcctggtgctggaggagtccggctacctgccgcgtgcggcgttcctgctcgaccgcatgatggcggccgccggcctgtccggccgctcgttcatcccgctgctgtccagcttcgcctgcgcggtgccgggcatcatgtccacgcgcagcatccaggacccgcgtgaccgcttggccacgatcctggtggcgccgctgatgacctgctcggcgcgcctgccggtgtacgcgctgctgatcggtgcgttcattccgcagaagacggtgtggggcgtgttcaaccagcagggcctggtgctgttcggcctgtatgcggcgggcattctcagcgcgctggcgatgtcgtggatcatgaagaagtggcgtcgcgacaagagcgagcacccgctgatgctggagctgccgtcgtaccgcctgccgcatgtgcgcgacctggcggtggggctgtacgagcgcggcatgatcttcctcaagcgcgtcggcggcatcatcctggcgctgaccatcctgctgtgggtgctgctgtcgttcccggcggcaccggccgacgccacgatgccagccatcgactacagctacgccggccagatcggccatgcgatggcggtgttcttcgcgccgctgggcttcaactggcagatctgcatcgcgctgatcccgggcctggccgcgcgcgaggtggcggtgtcttcgctggccaccgtgtatgcgctgtcggccgccgatgacgatgccgccagccaggcgctgaccccgctgatcagcgatggctggtcgctggcgaccgcgctgtcgctgctggtctggtacatctacgccccgatgtgcatctcgacgctggccaccatcaagcgcgagaccaattcgtggaagcagatgggctttgccgcgttctacctgttcgcagcggcttatgtggccgcactgatcacctaccaggtgaccagggcgctgggaggcggctga

SEQ ID NO: 496398 - DNA, 246 bp, Stenotrophomonas maltophilia
atggataccggcctgctgatccagtacctgatcatcgcggtggctgtgctggtcagtgcctgggtggtgctgaagaagcagttcccgggcaccgtgcgcacgctgcgcggtgcgttggcgttggccctgttgaagccgggccgcgccgcctggctgcaggcgctggggcggaagatcgcgccgccggcaacgggcggtggtggtgcctgtggcggttgcgacagctgcgggccgaccaagaagtag

SEQ ID NO: 496399 - DNA, 462 bp, Stenotrophomonas maltophilia
atgaaatcctcgaccgtcttcagcaagtgcgccaggaagaccggctttgccgggacgtcgacgacccgctaccgcttgctggatgccgcgctgcttgtcgtgaatcaccagcgcgccagcgaaagccgcggcttctatgtgaatgctggactctactttccggaactgctcgcgtatccgctcgcgcctgacgatcttgaaacggctttccggtaccgctccagcatccccacgccccatgtcgactggcggatcgaagaaacgccgggcctgcgccggaccttcatccagcaggatcttgaagatctgctggaggccggtaaccgcgacgcgttgaaggccctgctgctcgatgccctggccgacgtggcgggtttcgcggcagcccatgggaacagggaatcggtgcggcgattgaaccgggacgggagcttccgggcaatcatccgcagagaagtctga

SEQ ID NO: 496400 - DNA, 582 bp, Stenotrophomonas maltophilia
gtgtcccgttccatcctgatcctgctcggccatcccgaccgcgacagcctgtgcggtgccctcgcccagcgctacgccaccgccgccgagaatgctggccatcgggtgcgcctgatcgcactggtcgaactcgagttcgatccggtgctgcgccatggctaccgccagatccagccgctggaagccgacctgcaggacactgcggatgcgatcgaggcctgcgaccatctggtgctggtctatcccacctggtggggcgcgatgccggcgctgctgaagggcttcttcgatcgcgtgctgctgccggggtacgccttccgctaccggcgcgattcagtgtggtgggaccggctgctggccggtcgcagcgcacgggtgatcaccacgctggatacgccgccctggtattaccgctggatctaccgcgacccgggcatcacccagatccgcgccactattctggaattctgcggcatccgcccggtgcgggtcagccgactcggtgcggtgcgcagcagctcgccggagcaacgcaaccggtggctggcgttggcagcggagctgggctcacgggccaactag

SEQ ID NO: 496401 - DNA, 396 bp, Stenotrophomonas maltophilia
atgcgcatttccgaggtcagccgcctgaccggcgccagcgccaaggccatccgcctgtacgaggcgcgcggactactgccgccggtgcctcggctgaaccgctatcgcgactacagcgaacaggatgtggcctgggtgcagctgatccgccaggcgttggcgctgggcatcaccctggccgcgatctcccgcctgcagggccgcgacggacggctcgactggcccgcggtgctggccctgcttgagcaacaacgcagccgcatcgccagcgagcgggcacggctggcgcaggtcgagctggacctgcagcaggtcagcgacgagctgcggcagtggctgcactccggtagcggtgactgcatcccggaacccagcggctgcgccgctggtcgttga

SEQ ID NO: 496402 - DNA, 780 bp, Stenotrophomonas maltophilia
atggatggcagccccttcatgcagatcagcgaacagctggtgctgatcaccggcgccggccgcggccttggccagcacatcgcccgcgcgttcgcggcgcagggtgcgcgcgtcatcgtcaactaccaccgcagcgaaggccccgcacgggcgctggccgccgagctgggcggacaggcgatcgcgctgccggccgacgtcaccgaccgcagccaggtcgatgcaatgctgcagcacgccctggcccacttcggccagggcgtcaccaccgtggtcaacaacgcgctcgccgcgttctcgttcaatggtgatgcccgcgatggtgccgccaccatcggctggccggccttccaggcgcagttcgagggcagcgtgcgcggcgcgctgaacaccgtgcaggccgccctgcccggcatgcaggcccgccgcttcggccgcatcatcaacatcggcaccaacctgttccagaacccggtcgtgccctaccacgactacaccgccgccaaggccgcgctactgtccctcacgcgcacgctggccggcgacctcggcccacatggcatcaccgtgaacatgctgtccggcggcctgctgcgcaccaccgatgccagcgctgccacgccggaggcagtgttcgactacatcgccgccaacacgccactgcgcagcgttaccacgccagcagaattcgccgatgccgcgctgttcttcgccagcccctggtcgcgcgcggtgaccgggcagaacctggtggtcgatggcgggctggtgcgggactga

SEQ ID NO: 496403 - DNA, 720 bp, Stenotrophomonas maltophilia
atgaaccagactcccctgcgattgctcattcacggcgcctccgggcgcatgggacaggccctgctgcggctggccgccgaacatcccgaaaccctgcagatcgtggccgcagtgaccggccgtgcgccggcacagcgcgtggtcgacggcgtgccgttcttcggcgccagtgagctgcccggcgcgccggggttcgatgtggcgatcgacttcagcctgccggagggcttcgacccgatgctggcgctgtgcgtggagcggggtgccgggctggtgtcgggcaccaccggtatctccagcacgcagcgccaggcgctggaggccgcggcggcgaagatcccgctggtatgggcctcgaacttcagcctgggcgtggcggtactggacgagctggtggagcgcgcggcgcaggcgctggccggctgggactgcgacatcgtcgaatcgcaccacacccagaagaaggatgcgccatcgggcaccgcgctgaccctgggcgcggccgcgcaacggggcggggcggagccgcactacgccagcctgcgtgccggtgacatcgtgggcgagcacctggtgcagttcaccggtctgggcgagcgcatcgagctggtgcatcgggccaccaaccgcgacatcttcgcccgcggcgccctgttcgccgcccgccagctgcaggggcgggcgccgggcagctaccgggtgcgggacctgctgcagtag

SEQ ID NO: 496404 - DNA, 1320 bp, Stenotrophomonas maltophilia
atgcgcaatcgcctgttcatgaagcgcgataaccgctggcgcgagcgccccggcagcgctacaattcgcactcgccgaatcacgaaagccggaccggtcccagaccgtacgtccgcgcttttttgcaaccggatttccgtgaagcgcaggcgtgacttcggcagccccctcggtagccaaagtgagattcccgtgacccaagccgcaatcctcgtcctcgaagacggcaccgtattcgagggcgaatccgtaggcgcgcccggcctgtccgtcggtgaggtggtgttcaacaccgccatgaccggctaccaggaagtgctgaccgacccgtcctacgcccggcagatggtcacgctgacctatccgcatatcggtaacaccggcatgaccgaccaggacaacgaagcgtccaaggtgtggtcggccggcctgatcgtgcgcgacgttccgcgccgccccagcaactggcgcagccaggtgtcgctgcaggactggctgatccagcgtggcgtggttgccatcgccggcatcgacacccgcaagctgacccgcatcctgcgcgagaagggcgcgcagaacggtgcgctgatggccggcgacatcgacgtggaaaaggcactggaagccgcccgcaagttcccggggttgaagggcatggatctggccaaggtcgtcactaccgagaagacctacacctggaccgagggccagctggacctggatgccaacgctttcgtcagcgtgccggcccggttcaaggtcgtggcctacgacttcggtgtgaagaccaacatcctgcgcatgctggccgagcgtggctgcgaagtgaccgtggtaccggcgcagaccccggccgccgaagtgctggccctgaagccggacggcgtgttcctgtccaacggcccgggtgacccggagccgtgtgactacgccatcgaagcgatcaagaccttcatcgatgtgaagatcccgaccttcggcatctgcctgggccaccagctgctgggcctggcctcgggcgcgcagaccatgaagatgggccatggccaccacggtgccaatcacccggtgcaggacctggacagcggccgggtgatgatcacctcgcagaaccacggtttcgcgatcgatgaagcgaccctgccgccgaccctgcgcgtgacccaccgctcgctgttcgacggcaccaaccagggtgtcgcccgcaccgacgtgccggcgttctcgttccagggccacccggaagcgtcgccgggcccgaccgatgtcggtccgctgttcgaccgcttcgtggtgctgatggagcaggccaaggcgtga

SEQ ID NO: 496405 - DNA, 3243 bp, Stenotrophomonas maltophilia
atgcccaagcgcactgacctcaagaccatcctcatcatcggtgctggcccgatcgtcatcggccaggcctgcgagttcgactactccggcgcccaggcctgcaaggccctgcgtgacgagggttaccgcgtggtgctggtcaacagcaacccggcaacgatcatgaccgacccggagatggccgacgccgtctacatcgagccgatcaactggcagacggtcgagaagatcatcgccaaggaaaagcccgatgcgctgctgccgaccatgggcggccagaccgcgctgaactgcgcgctggacctggccgacaacggcgtgctggagaagtacaacgtcgaactgatcggcgccaagcgcgaagcgatccgcatggccgaagaccgcgagctgttccgcgtcgccatgggtgagatcggcctggaatgcccgaccgccgccgtcgcccacaccctggacgaagcgctggaaatccagacccgcgtcggctatccgaccatcatccgccccagcttcaccctgggcggcagcggtggcggcatcgcctacaaccgcgaagagctggtcgagatcgtcagccgcggcctggagctgtcgccgaccaccgaagtgctggtggaagagtcggtgctgggctggaaggaattcgagatggaagtggtccgcgacactgcggacaactgcatcatcgtctgctcgatcgaaaacctggacccgatgggcgtgcacaccggtgactcgatcaccgtggcgccggcgcagaccctgacggacaaggagtaccagcgcctgcgcgatgcctccatcgccgtgctgcgcaagatcggcgtcgataccggtggctcgaacgtgcagttcggcatcaacccgaagaccggccgcgtggtcgtcatcgagatgaacccgcgcgtgtcgcgttcctcggcgctggcctccaaggccaccggcttcccgatcgccaaggtcgccgccaagctggccgtgggttacaccctggacgaactgaagaacgagatcaccggtggcctgaccccggcctcgttcgaaccgtcgatcgactatgtcgtcaccaagatcccgcgtttcgccttcgagaagttcccggccgccgacgcccgcctgaccacccagatgaagtcggtgggtgaggtgatggcgatgggccgcaccttccaggagtcggtgcagaaggccctgcgtggcctggaaaccggcaaggtcggcttcgacccgaccggcctggacctggccaacgaagacgacctgcagaccctgcgtcgcgagctgaaggcgccgggcccggagcgcctgttcttcgtcgccgatgcgttccgcgccggcatgagcgtggaagagatctacgcactgtcgttcatcgaccactggttcctggaccagatcgaggaaatcatcgctgcagaaggcgaagtcgcggccggtggcatcgacgcgctggacgccgcacgcctgcgcaagctgaagcgtgctggcttctccgatgcgcgcctggcgcagctgaccggcaccaatgaagccgccatccgcgcgctgcgtcgtgcgcacaaggtgcgcccggtctacaagcgcgtggactcctgtgcgggtgaattctccaccggtaccgcctacctgtactcgacctacgaggacgagtgcgaggccgcgccgagcaaccgcgacaagatcatgatcctgggcggtggcccgaaccgcatcggccagggcatcgagttcgactactgctgcgtgcacgcggcactggcgctgcgcgaggatggctatgaaaccatcatggtcaactgcaacccggaaaccgtgtcgaccgactacgacacctccgaccgcctgtacttcgaaccgctgaccctggaagacgtgctggagatcgtcgaactggaacagccgaagggcgtgatcgtgcagtacggcggccagaccccgctgaagctggcgcgcgcgctggaagccaatggcgtgccggtgatcggcaccagcccggactcgatcgacctggccgaagaccgcgagcgcttccagcagctggtcgacacgctgggcctgaagcagccgccgaaccgcatcgcccgcaacgaccaggaagccctgctgctggcccgcgagatcggctacccgctggtggtgcgcccgagctacgtgctgggcggccgtgcgatggaaatcgtctacggcgaagccgacctggcccgctacgtgcgcgacgcggtgaaggtgtccaacgattcgccggtgctgctggaccgcttcctcgacaacgccgtggagtgcgacgtcgacatcattgccgatgcccagggcaacgtcctgatcggtggcgtgatggagcacatcgaagaagccggcgtgcactcgggcgattcctcgtgctcgctgccgccgtactcgctgtcggctgaaacccaggccgagctgcgccgccaggtggtggagctggccaaggccctgaacgtggtcggcctgatgaacacccagttcgcgatccagaccagcgacgagggtgccgacaccatctacctgttggaagtgaacccgcgtgcctcgcgcaccgtgccgttcgtgtccaaggccaccggcatgccgctggccaagatcgccgcccgctgcatggccggcaagacgctggccgagcagggcgcgaccaaggaaatcgtgccggactactactcggtgaaggaagcgatcttcccgttcgccaagttccagggcgtcgacccgatcctcgggccggagatgcgctccaccggtgaggtgatgggcgtgggccgcaccttcaacgccgccttcgcgcgggcgcaggaagccggcggcatcaaggccccgccggttggcaaggccttcgtctcggtgcgtgatccggacaagaagcgcgtgctgccggtggccaaggcgctgctggcgcgtggctacagcctggtcgccacccgtggcaccgccgcctggctgcagcagcacggcatggactgcgagatcatcaacaaggtggtcgaaggccgtccgcacatcgtcgactcgatcaagaacggcgagatcgtctacatcgtcaacacgaccgaaggtcgttcggcgatcaacgactcgttctcgatccgtcgcgaggcgctgcagcatcgcgtcacctactcgaccaccattgccggcgccaaggcgctggtggattcactggaattccgcggcaccggtcccgtctggtcgctgcaggagctgcacaaggagttgaatgcatga

SEQ ID NO: 496406 - DNA, 477 bp, Stenotrophomonas maltophilia
atgagagcccccatcaccatgaagggcgcgcagaagctgcgcgacgaactggatcacctgaagtcggtcaagcgcccgaaggtgatcgccgccatcgccgaagcgcgtgagcatggcgacctgaaggagaacgccgagtaccacgccgcgcgcgaggaacagggcttcatcgaaggccgcatcaagcagctggaaggcgagctgtcgcacgccgagatcatcgacgtgagcaagctcaacgccggctccaaggtggtgttcggcgccagcgtgacgctggccgacgtggaaaccgacgaagagaagaagtaccagatcgtcggtgacctggaagcggacatcaagctgggcctgatcgcgatttcctcgccggtggcgcgcgcgatgatcggcaagctggaaggcgattcgatcgtgatcgacgccccggccggccagcgcgagtacgagatcgtcagcgtcagctacgtggactga

SEQ ID NO: 496407 - DNA, 918 bp, Stenotrophomonas maltophilia
gtggcaacggcgaccctgctgttgccggcccgcagccgctttgccgcggctgcgttgccggacgatgtggcacgtgcgctcggccgtgccacgaccgtgcaggtcgcgccgggcgaacgcgcgcagctgacgcgccatttcgcggttgccgcgccgcactggccggtggccgcgttgacccgccagcgcgacgtcggcgatgcggccggcgccagctggctgcgtgccgatccggcctgcatggtgccggacatgcatggcgcgcggatgatggcctacggcgaaacgctgcggccgacgctggccgacagcctggccctgctgccggtgctgcagcccttgtttgccgatgccgggttcgtgcttgacgcaccggacccgtcgcgctggtacctgcggcttccaatcgacctggtgctgccggacttcaatagtccggacgaggtgctgggcgatgacctgttctcgcatctgccggagggcgagggcggccgtcgctggcgggcgctgatgaccgaagcgcaggtactgctgcacaaccattcctggaaccagcagcgcgccgcgcagggacaacagccgatcaattcgctgtggttctggggcggtggcgtgatgccggtgtcggtcagcacgccgcacgcacaggtgcgcagccgcgatgccctgctgcagggcctggccctggcggctggcgtagccgtggatggcgagcaggcggtggatgcactggtcgacctgcgccagctgcgttcgctgcagcagctcggcaatgatgcaatccggccgctgctggccgcgctcaagcgtggcgagctgcagcggctggtgctcgatttcgaggacggcctgcagttccagctggaccgcggccagcgctggcagttctggaagaagccgcggcagcttcacgattga

SEQ ID NO: 496408 - DNA, 1041 bp, Stenotrophomonas maltophilia
atgcatcgcacgctccttcccgcgctgctgggcatcgccctggccccggccgtccacgccgccacgcccgaaccgaaggccggcgtgcagttccagcacaacgactggtcgctggcctgtgacaacacccgcacctgccgcgccgccggctacagtccggaacaacccggcaatctgctcagcctgatgctggaacgcgcgggcggcccgggtacgaaggtgctcgcgcggctgcgcaatggcgaggatggcgaaagcccgacgccgaccggggcgctgcgcctgcgcctgaacggcaaggacctgggcccggtgcacgacaccggcgacggggacaacgtgttgttgcagcaggcacagaccgatgcactggtcgccgcactgccgcgccaggcacgcatcgagatcatcgacggcaagggcaaggcgtggccgatctccgacagcggcgcagcggccgtactgctgaagatggacgaggcccagggccggctgggcacgcccggtgcgctggtgcggcgtggcgacaagcccgaagcgagcgtgcctgcggcattgccggtaccagtgatcgtgcgcggcacgctgatggcaccgcgcgcctcggacgcggcgctggccaaggcaacgggcctgcgcaaggcgctgatcgccagcctgccgaagccggatgagtgcggccgcctgagcgatggcgggacagatgagatcgagatccagcgactggacgcccagcatgtactggcaagcaccagttgcttcgtgggtgcctacaacatgagcaacgcctactgggtggtgcgagacagatcgccgtaccaggcgacctttgtcaccaacctggccgaagattttgaccgcgatgacgctacgctgcgaggccgctcccgaggccgcggtgtcggcgattgcatctccgccaatgactgggtgtgggacggggagcgcttcgtgaagagcagcgatttcacgacgggccagtgtcgcaatatgctcggcgggcactggacactgccgacggtggtcagcgaggtccgttga

SEQ ID NO: 496409 - DNA, 1758 bp, Stenotrophomonas maltophilia
atgtcccttgccgccgatgctgcgcactcctcctccgatacgccgatgatccgccgccgcgatgcggtcgtacccggcagctggccagagggcacgctgccactgctggcgcgcctgtatgccagccgtggcgcaggtacgccagagctggcgctgccgaaactgggcagcctccacgcgcccgagttgctgaccggcatcgatgatgcggtgggtctgctgatcgaggccatcgccaatgacaggcgcatcctggtggtcggcgatttcgattgcgatggcgccaccgcctgtgcggtcggcgtgcgcggcctgcgcatgctcggcgcgcagcacgtcttccacgcggtgccgaaccgcatggtgcatggctatggcctgtcgccgtcgctggtggaggaactggccgcgctgcagccggacctgctggtgactgtagatcacggcatcgcctgccatgcgggcgtgaccgccgccaaggcgcgcggctggcaggtgctggtcaccgaccatcaccttcccgggccgcagctgccgccggccgatgtcatcgtcgatcccaatctcgacggtgatgccttccccagcaagtcactggccggcgtcggcgtgatcttctacgtgctgatggcgctgcgccggcacatgcgcgaggccggcgtcttcgccgatggcaaggggccggacctcaccacgctgctggacctggtggcggtcggcaccgtcgccgacttggtggcgctggatccgaacaaccgggcactggtcagcgcgggcctgcgccgtctgcgcgcggggcagggctgtgtcggcctgcgtgcgctgatccaagccagcggccgtgatgccgcgcggctcactgccaccgacattggcttcgcgctcggcccgcgcctgaatgccgcgggccggctggaagacatggcgctgggcatcgcgctgctgctgaccgaagacccgcgccaggcgcgggagatcgcgcagacgctggagcagatcaacgcagaacgccgcgcggtgcagcagtcgatgaccgatgacgccgagcaggcgttgacccgcgtggtgctcgacatgtcggggcagcgaccggtggcggcctgcctgttcgatgccgactggcatccgggtgtggttggcctggtcgcatcgaagatgaaggatcgcctgcatcgtccggtgattgccttcgccccggccgaacccggcgccgacaccctgcgaggctcggcgcgctccattcccggcctgcacatccgtgacgccctggcgctggtcgatgcgcgccacccgggcctgatcgaacgcttcggtggccacgccatggcggccggcctcagcctgcggcgtgaccacatcgatgacttcaaggccgccttcgtcgcggtggtgctggagatgctcgatccggcggcactgcagcagcaggtcctcagtgatggcgaactggcggcggacgagctggaccatcgccacgccgatgcgttgcgcctggccgggccgtggggccagggcttccccgagccgctgttcgacggccacttcgaagtggccaactggcgcgtgctgaaggagcgtcacctgaagctggaactgcgcctgcccggcgtacccggcacgatcaacgccatccatttcggcggctggcacggcaacgcgcccggtcgccatgtgcatctcgcctatcgcctcgcctgcgacgactatcgtggcggcagcgccatccagctgatcgtggagcactgcctgcccgcatga

SEQ ID NO: 496410 - DNA, 2913 bp, Stenotrophomonas maltophilia
atggtcttcgtccgttgctgcactgtgttgttgctggccctcgcggcctggcccgctggcgcgcagtcgccgccgatctcccggccgcaggccagcatgcctttgctgattgccccggccgccgagcaggcggtgcagctgcgacacgcccacatcgaaggcgaagtccaggccggcatcgcccagacccggatcacgctggaattccacaaccccaaccggcgggtactggagggcgagctgcagtttccactggccgatggccagcagatcagcggcttcgcgctggatatcaacggcgagatgcgtgacgcggtgccggtgcccaaggatcgcggccgccaggtgttcgaggagatcgcccgtcgcggggtcgacccgggcctgctggaacagaccgctggcaaccagttccggttgcgcatctacccgctgccggccggcggtagccggcgcgtggagctggtgattcgcgagccgttggccttcgccggccaaggctggcagtggacactgccgctgcagttcgccgccggtgcagcctcggttgagctgaaactgcaggcccccgacacggccaccgcgggtacggcgccattccgcatcagcgcgggccagctgcagtggcagggcaggggcgcgcagctgccgcagcagctgcagtggagcctgccggcagcccgacaggcacaggtgcaggtggcgccctggcaggacggccattacctgttggcgcagctgccggtggtggccagcagcacgccgcgcacgttgcccagcgagatcggcctgctgtgggacggctccggttcggcgggacagcgcgatcgctcgcgtgagttcgccctgctggatcgctacttcgctgcgatgggtgacggcaccgtggccttgaccgtgctgcgcgatcgcgccgagccggtgcgtcgattccgcatccgcgccggcaactggaacgagctgcgcgcagcactgcaggccgtgcgtccggacggcgccagcgcactggcgcagtggcagccgcagccgggcgtgaaggaatacctgctggtcagcgatggcctgctgacctatgggccggaacagctgccggcgatggcgccggaccaacgcctgtttgcggtcagcagcgccggtgcgcgcaccgatgccgtgcgactgcgtggctggagcgaagcgcatggtggtcgcttcgtagcgctggggaaggatgtcgaattggccgcccgtgagctgctatcgtcgccgatggatgtgcaggtcgatgcagggcgcggcgtgcaggacgtggtgatcgatcgtcgcagtgaagcccagggctggttgtggctgcatgcacgactggcggccgacggtgtgccgatgcgggtgcgcgtgggtggcggcgaatggcaggcgctgcccgccacgcagaagagcaacgacggagaactgctggcgggcttgtgggcgcaggcgcgcctgcagcagctggccgccgatcgccgtggcaaccgcgaggcgatgcagcgcctgtcacaacagttcggcctggtcgggccggatacctcgctgatcgtgctggagacgctggaggactacctgcgctatgcgatccgcccttcgggcacgttgcgcgccgagtacgacgccaggtttgcagtgcaggtaagtgatcgcgccgcagccgatcgccagcgcctggatgaagtggccgctcgctggaaggagcgccagcagtggtggaaccgcagctggccgaagggtgtgccgccgcagccgaagggcggggcactcgaagtggcctccgcggactacgcgatggaatcagcgccggtggcgatgctcgccgcgccggccccggcggcaccacccgccccggcaccgatggccgccgccgccgagcagcgcatggaagccagcagcgcgcgtgcgcgtcgctcagcgcctgcatcgaacaaggccctggattcaatcacagtcactggtggccgtgtcgctgcgcccgctgctgccaacgacggccaactcggcatccagctggcggcctggcagccggactcggccatcgcccggcgcctgcgccagggtccgccgtcgcaactttacgaccgctatctggccgagcgcgatgcccacgccgacagcagcgcgttcttcctcgatgtggccgacctgctgctggagcagggccagcgcgaactggcactgcgggtactgtcgaacctggccgagatggatctggacaaccggcatctgctgcgcgtgctcggctaccggctgatgcaggctgatgccccggcactggcggtgccggtgttcgagcaggtgctggcgatgggccaggaagaaccgcagagcttccgcgacctgggcctggcgctggcagcggccggcaagccgcaacaggcgctggcgccgctgtaccaggtggtggtgcggccgtgggacagccgcttcgatggcatcgccctgatcgcattggatgagctgaccaacctggtggcgcgcagcacgccacggctggatacctcggccatcgacccgcgcctgctgcaggcaatgccgctggacctgcgcgtggtgctgtcctgggatgccgacaacagcgacatggacctgtgggtgaccgacccgaacggcgagcgtgcctactacggcaaccgccagacctaccagggcgggcggatgtcgcaggacttcaccggcggctatggccccgagcagttctcgctgcgcaacgccaagccgggcaagtacaaggtcgaggcgaactatttcggcagtcgccagcaactggtgaccggtgcgacgacgctgatgctgcgcctgaccacccactggggcacggccaagcagaaggaccagatggtgacgatgcggctgaaggatcgcgccgaaaccgtgctggtgggcgagttcgaggtgcgttga

SEQ ID NO: 496411 - DNA, 1200 bp, Stenotrophomonas maltophilia
atgacccgacgctacgacatcgacgccctgcgcgtgttcgccttcgccctgctgatcctctaccacaccgccatggcctacgtggacgactggggctttcacctcaagagcgtgcataccgccgaatggctgcagtggccgatgctgttcgtcaaccgctggcggatgtcgctgctgttcctgatctcgggtatcgccatcgcgctgatgcggccggaaggcaggttgctgcgcttcgccggcctgcgcacctggcggctgctgctgccgctgctgttcggcatgttcgtgatcgtgccgatccagccctattgcgaaggcgtggcaaacggccacgtggcacccggcttcggccacttcctgctgcgctactggcaggtgcggccgtggccggaaggcagcttcgccggctggcagtacggcatcacctggaaccacctgtggtacctggcctatctgtggaactacacgctggccttggccctgttgatgccattgctgggaacgacggtggttcgccgcgcgatggcgctctgcgcagcatcgccgatgctgctgatcggccttccgtccgtcctgctgctggcctgggtgatctggctggagccgatctacccgtccaccaatgccctgctcggcgactggtaccagcacgcgaagtacgcgacggtgttcctggccggctacctgctgggtcgtgaaccggtgttctgggagcgcgtggtcgccctgcgccgcacgacgctatggctggcgctggctgccgtcggctggtatctggggttgcgcatccttggccaggtactgccagctgactcctcgctgcggcaatggcccgaaccgttctgggacctgcagggccgggccagccagtcgctttacgtatggaccgcgctgctggccatcctcggctggggaaaggtcttcctcgatcgcccgttccgctggctgccgtactgcaccgaggcgatctatccctggtacatgctgcaccagagcctgatcatcgtgctgttgttctggctcaagccacttcagttgggcccgtggatggaaccggccctgctgctggccggtactgtcggcggctgcctgctgatccatgagttgctgatccgtcgcgtgcgttggctgcggcccctgttcggcctgcgtgcgaatccgccggcggcgccaatggcgcgcaccgcagtagtgtag

SEQ ID NO: 496412 - DNA, 861 bp, Stenotrophomonas maltophilia
atgacccagggccgaccatcgcgctggcgtacttcaacccgcctgctggtatgggcggcgatcctgtcggcctcggcagtgaccaatgcgctggtggaagtgatggacgccagtcgccgcggcgccgatctcgggctgtgggagccgatgatctgggagttcagcagcctcggcctggtcctgttgaccctgccgctgctgtggtggggctgcgagcgctggccgctgcatgccgatacctggaagcggcggttgccgctgtatctgctggccagcgtcggctggtcgctgctgcacgtggtggggatggtgctgctgcggcacctggcctacgggtcgctgggccatcgctaccaggatgatgccggctggctggagcgttttgcctacgaatacctgaaggatgtacgcacgtttgcgatgttcgtggcactggagcactttgccagctggttcggccggcgcaggcagggcgaggcgagcctgctggccgagccggacgtcggcccgccggtggagccggtcgagcgcccccagcacttcctggtgcgcaagctgggcaaggagttcctggtcgccacggccgacgtggagtatgcccaggccgcggggaactatgtgaacctgcgggtacgcggccacgactatccgctgcggatcaccatggcggtgctggagcagcggctcgacccgggcgagttcctgcgcccgcaccgcagctggctgatccatcggggccagctgcgctcgatcgagccgctggacggtggcgaggctctgctgcacatggccgacggggcgaaagtgccgtgcagccggcgccagctgccgctgctgcggcaggcgctggggacagggtga

SEQ ID NO: 496413 - DNA, 927 bp, Stenotrophomonas maltophilia
gtgggcggcatcgcctcggtgctcgatggcctgaacgatgccaccgagctgctggagctggccgagtccgagcaggacgaggacaccgccctggccgtggtcgccgacctggacaagcaccaggcccacgtggagaagctggagttccagcgcatgttctccggcgagatggacaatgcggcggcgttcgtcgacatccaggccggtgccggcggcaccgaagcccaggactgggccgagatcctgctgcgcatgtacctgcgctggtgcgagtcgcgcggctggaagaccgaactgatggaagtgtccggtggcgacgttgccggcatcaagtcggccacgctgcgcgtggaaggcgactatgcctatggctggctgaagaccgagaccggcgtgcaccgcctggtgcgcaagtcgccgttcgactcggacaaccgccgccataccagcttcacctcggtgttcgtgtcgccggaaatcgacgacaacatcgacatcaccatcaacccggccgacctgcgtaccgacgtgtaccgttcgtccggtgccggtggccagcacgtgaacaagaccgagtcggcggtgcgtatcacccacatcccgaccaacatcgtcgtggcctgccagaccggccgcagccagcaccagaaccgcgacaacgcgatgaagatgctggccgccaagctgtatgaactggagatccagaagcgcaacgccgagaaggacgcggtggaagccaccaagtccgacatcggctggggcagccagatccgcaactacgtgctcgaccagagccgcatcaaggacctgcgcaccggcatcgaacggtcggacacgcagaaggtgctggacggcgacctggacgagttcgtcgaggccagcctgaaggccggcctggccgtgggctccaagcgcgtcgatgcctga

SEQ ID NO: 496414 - DNA, 783 bp, Stenotrophomonas maltophilia
atgatgcgcagcgaaagtgaacgcaaagaactcggcggctttctcaaggcctgccgcgcccgtgtcgatcctgccacgctcggcctgccggccgggcgccggcggaccccgggcctgaagcgcgaggaagtcgcgctggcgatcggggtgagcgtcagctggtacacctggatcgagcagggccgtgaagtgcgcgcctcgcccgaggtgctggagcgcctggcgcaggtgctgcgcatgagcgacgacgaacgcgcctacgcgttcgcgctgtccggctacggcgtgccgctggaatcaccggacgagagcgtgactgacggcttgcgccagctggtggaggcgatgcagccgatcccggcctatgtgcgcaacacccgcttcgacatcctggcctggaacccggccatcgccgatctgttcgtggactacagccaactggcgccgcatgagcgcaacacgctgcggctgatgttcctgtacccgccgtaccgcacgctgatcctcaactgggaagaaatgacccgcggcctgctggcaggcttccgtgcggcgatggcgcaggcgccggacaaggcgccgttcctggcgctggtcgaggacctcgccgcgcacagcgaggaattccgccagtggtggccggagcacgacgtgcgccggttcgatgagggtgcgaagaagctgaaccatcccacgcgcgggctgctggacctgcagtacgtggcactggtgccggagagccggcacgatctttccctggtgacttacctgccgcgtaggtag

SEQ ID NO: 496415 - DNA, 768 bp, Stenotrophomonas maltophilia
atgatcgccaacaccgctgcctaccatttcgccgtcatcgacgccccccaggccctgtgcgaccagctgttggcgcgtgcccaggcggccgggttgcggggcacgatcctggtggcgggcgagggactgaacctgttcctggccggtgagccggaggcggtcgaggatttctacgccgcgctgcatgccgatgcgcgttttgccgggatgcgggtcaagaccagcctgagcgagcaccagccgttcgcgcggctgaaggccaaggtgaaggacgagatcatcagcttccgccgcgatgacggccagccgctggactatccgcgtgcaccggcggtcgatccggccaccgtgcagcgctggctgcggcagggccacgatgacgccggcaagccggtggtgatgctcgatacccgcaacctgcaggaagtggagtacggcaccttcaaggatgcgctggtgctgcccatccacaagttcaccgacctgcccgaggcgttggcgccgcatcgcgaggcactgaaggacagcaccgtggtcagtttctgcaccggcggcatccgctgcgagaaggccgcactgtggatggccaacgatggcatggacaacgtgctgcagctcgatggcggcatcctcggctacttcgaggaggtcggcggcgaaggttatgaaggccgctgtttcgtgttcgacgagcgcgtggcgctggatgccgaactgaagccgatggtcgaccagccgctgccggagccgcgccccagcgcgttctga

SEQ ID NO: 496416 - DNA, 996 bp, Stenotrophomonas maltophilia
atgatcccgttgtcgatccttgacctggccccggtctgcgagggcagtgacaccaccgccgccttcgccaacatgctggaactggcccagcacgccgatgcgctgggctaccgccgttactggctggccgaacaccacaacatgcccggcatcgccagcgcggccacggccgtgctgatcggccacgtcgcgggcggcacccggcgcatccgcgtcggtgccggcggcatcatgctgcccaaccatgcgccgctgcaggtggccgagcagttcggcacgctggcttcgctgtatccggaccgcatcgatctcggcctcggccgtgcgccgggcaccgatcagcccaccgcgcgtgcactgcgccgctacttcgacagcgccgaccagttcccgcaggacgtgcgcgaactgctgcactacttcgagccggtacagcccgggcaggcggtgcaggcggttccgggcggtggcctgcgggtgccgacctggatcctggggtccagcctgttcggcgcgcgcatggccgccgcgatgggcctgccctatgcgtttgcctcgcacttcgcgcccgatgccatggacgaggcgctggctgtgtaccgccgagagttccgcccctcggccacgttgaaccagccgcacgcgatgctggccctgaatgtcgtcgccagtgacagcgaggccgaatcgcgccgcctgttcaccagccagcagcagagtttcgtcaacctgcgccgcggccggccgggcaagattccggcgccgatcgacgacatcgaagccttctgggagccgcacgaaaagctcggcgtggagcgggccctggcctgcaccgtgctcggcgatccgcagcaggtggccgatggcatcgccgcgttcgttgagcgccactcgccggacgagctgatgctcaccgccaacctgcatgaccaccgtgcgcgcctgcgttcgttcgaactggcgatgcaggcctggcatgcccgccacgcgggctga

SEQ ID NO: 496417 - DNA, 498 bp, Stenotrophomonas maltophilia
atggcggatacccgcgccgaacacatcgcccagctggccgaactgatcaaggacgtggaggtggcgatgttcaccaccaccggcgtcgacggacgactctacagccggccgctggccacccagcaggtcaccttcgacggtgacctgtggttcgtcatcaccgccgacagcccgaaggttgccgagatcgcgcttgatccgcacgtcaacgtggcctatgcctcgccgtcgaagaacacctatgtgtctgtggcggggcgcgcgcgcatcgttgacgaccgcgcgaagatcgaggaactgtggtcgccggcgatgaagctgtttttcccgggcggcaaggacgacccgaacctgcgcctgatccacgtgcgggccgactcggccgagtattgggatggtccgggcacgctgctgggcaaggcgttgaatttcgtgctgtcggcggtgcaggacgagccggcgcagttggccgacaatggcttcatcgaccttcggtga

SEQ ID NO: 496418 - DNA, 660 bp, Stenotrophomonas maltophilia
atgagctcaccgcctgaggccggccagggtccaggcgccgagcgcccggcctaccgcaacgagggcatccgcaccctgctggagatgttcgcttccggcgaccccgccgagcacatgccgctcggccagatcctgagcaacctgcagcagagcgcgttcggcgtgttcctgttcgtggcgatcctgccctcgttcatcccgatcccgggcatgggtggcgcggtcagcggcccgctggtgatcctgatcggcctgcagatgctgttctgcctgcgccggccgtggctgcccggcttcattgcccgccgcggacccaagcgcggcaccatgcaccgtttcctggaccgcatcgaccgcccactgcggcgcctggacaggatgctgaggccacgcctgccgcagctgttgacacccctccccgcccacgccttcagcggcctgctgctggtgctgctgggcctgctgctgtcgttgccgattcccttcaccaatttcctgttcggcttccagctgctgctgttctcgctggcgctgctggaacgcgatggcgcgctgatgctgttcaactggatcgccgcgttggcggcgatcgcgttcttcggtttcagttcgggacagctggtgggctacacggtggacctgttccagcgctggttctga

SEQ ID NO: 496419 - DNA, 1305 bp, Stenotrophomonas maltophilia
atgatcctgattgtcttcgcgcttgttctgctgaacggcttcttcgccatgtccgagatgtcggtcatgacctcgcgcaagagccgcctgaagcagatggctgccacctccaagcgcgcggccaaggcgctggagctgtccgagaagccggagagcttcctgtccaccgtgcagatcggcatcaccgtcatcggcgtgctgaccggctacctcggcggtgaggcgctgggcgaggccttcgccggctggatccaggggctgatgccggggtttgcgtacgcgggcaacatcggtaccgcgctggccgtcagcctgatcaccttcatcacgctgatcttcggcgaactggtgcccaagcgcctggcgctgacccgctcggaggccattgccggcttggtcgcgatgccgatgagctggctggccaagctggccctgcccttcgtctggctgctgtccaagaccacccagctggtactgcgcctgttcggcctgggcaaggacgaagtcgcctcggtgactgaagaagagatccgcatgctggtggccgagagccacgaagccggtgtgatcgacgcccacgagcgtgacatgatgaaccgcgtcatgcgtctgggcgaccgcaccgccgacagcctgatgaccccgcgcaaccgcattgcctggctggacacccaggccgggctggagcgcaacctggaaatcatggccgagcacgagttctcgcggtacccggtgtaccgcgacaacgacatggacgtggtcggcgtacttgaactgaaatcgctggccacgcgcatggcgcgcggcgacaacgcgctgttccagaccctgcgcgaaccgctttacgtgtccgaatcgacccacgcgatgaagctgctggagatcttccgcgaggaacagcagtcgatggcgctggtggtggacgagtacggcgagatccagggcctggtgaccatcagcgacctgatgggcgccgtggtcggccgcctgcaggcggtggagaatgccgatgaagatgcgctggtggtgacccgcgaggacggttcgctgctggtggatggctcgctgccgatcgaagacctgcgcgaactgatcggcagcaacgagctgcccgatgccgaggacggcgattactacaccctggccggcatgtgcatccactacttcggccgcatcccgcacgcaggcgagtacttcgactgggccggctggcgcttcgaagtggtcgacctggacggtgcgcgggtggacaagctgctgctgcgcacgctgtccgacgagcaggccgatgagctcaccgcctga

SEQ ID NO: 496420 - DNA, 627 bp, Stenotrophomonas maltophilia
atgttctctctgcagaccattttcggttccggcaaacagttctacaccctgctcgatgaggctgccgtcgcggcttccgacgccgccaaggcgctgcattccatgctgcgcgaggccgaccgccagcccgcgctggacgccttcaagctggcccgcctgcgcgaacgcgcggcctcggacaagatcagccaggcgctggtggacagcttcatgaccccgatcgagcgcgaagacatcgaagcgctgggctcggcgctgtacaagattcccaagcagatcgagaagttcgccgaccgctattcgctggccacgacgcacctggagcacatcgacttcgcgccgcgcgcggcgatgctcgaacaggccgccggcgtggtggtggagatggtggccgacctgcgccacatgaacctggaccggatgaccgcgctcaacgagaagctgcgctcgctggagaacgaggccgaccgcctgatgctcgagctgtaccgcgacatctattcgggccgcctggacaacctgcagatgttcctgctgaaggaattcttcgagatcctggaaaaggccatcgaccgctgccgcgaggctggcgtggtggcgtaccagatcgtgttgaagaacagctga

SEQ ID NO: 496421 - DNA, 1122 bp, Stenotrophomonas maltophilia
atgttgacccttgtcctggtggtgatcctggccgcgctcgtcttcgagttcatcaacggcttccacgacactgccaactccattgccaccgtggtggcgaccaaggtgctctcgcccggctgggcggtgatgctggctgccttcatgaacctcatcggtgcactgaccggtaccgcggtggcgctgaccatcgcctcgggcctgctcaacaccaacgtggtcgaggtcaccccgcaggtgatcctgtgcgccctgctgggcggcatcatctggaacctgatcacctggtggaagggcctgccgtcctcgtcctcgcacgccctgatcggtggcctctgcggcgccggcctggccgccgcccacaacaactgggacgcgctgatctggtccgagcgcctgggcagctgggcgcagaacaagggcctgctgtggaaggtgttcgtgccgatgatcacctcgccgattgccggtttcctgctcggcatcgtggtgatggtgctgctgtgggcgctgatcgccggcctggccaagatcggtggtgccatcggccgcctggcccgtccgcgcatcgtcaacgccttcttcggcaaggcgcagatcgcctcggcggcctacatgggcttcgcccacggccacaacgacgcgcagaagaccatgggcatcatcgccatgaccctgatcggtgccgaagccaccggcgcattgaacgacctgccgtcctggctggccttcatgcacccggacgcgcatgccggcgacggcatcgcgatgtggatcgtgctgacctgcgcggtggtgatggcggccggtaccgcttcgggcggctggaagatcatcaagaccctggggcacaagatggtcaagctgcacccgatccacggcttcgccgcggagaccagctcggccaccatcctgaccctggcggcccacttcggtatgccggtctcgaccacgcacagcatctccaccgcgatcatgggcgtcggcttcgccaagaacccgcgctcgctgaagttcggcgtgatcgagcgcatcgtctgggcctggatcctgaccatcccggcggccggtggctgtgcgtacctgatcctgaagctgttcgagctgttcggctggacctga

SEQ ID NO: 496422 - DNA, 1497 bp, Stenotrophomonas maltophilia
atgaagtccctgctgcacactgccgcgctctgcgtcggcctgctcatcgcccctgccagcgtgctggccgcgcccgacgccgagggcaagcccgacccgaaagacgacaagaccgaagcgcctgcgctgcccgccgacgcctcggccggccagagcatgcgcctggccggccgcaccctggactacaccgccaccgtcggcaccctgccggtacgcgatgccaagggcaaggtgatcgccgatgtggtgttcaccgcctacacgatgccgggcaaggaccggccggtgaccttcgcgctcaatggcggccccggtgcgtcgtcggtgtacctcaacatgggcgcgatcgggcccaaggtggtgaccttcggctccgagggtgacagcgcatcggcgccggccaccctgcacgacaacccgggcacctggctggacttcaccgatctggtgttcatcgatccggtcggtaccggcttcagccgcgcgcggatcggcgacgatgaagccaagaaagcgctctacaaccccagtgccgacgtcgaatacctgtcgcgctcgatctacgactggctgctgcgcaaccagcgcatggcctcgcgcaagtacctgaccggcgagagctacggtggctaccgcggcccgcgcatcacccacttcctgcagacccggctgggcgtggcgatgaacgggctggtgctggtctcgccctacctgagcccgaccctggaagacaacgccgatgtctcgccgatggcgtggatgcagacgctgccgtcgatcgccgcggcgcacctggagcgccagggcaagctgaccgatgcggcgatgcgcgaggtggtggagtacacccgtggcgattacgccaccgcgttgatgaagggccgcagcgatccgcaggctacggaagccatgctgcgccgggtcaccgcgctgaccggactggacccgcagttcgtgcgccgcgctggcgggcgcctggagacccaggcctacctgcgtgaagtgttccgcgacaagggcacgctgggcagccgctacgactccaacgtgaccgcgttcgatccgttcccgaatgatccggagcagcgcgccaacgatccactgctggacagcatcatcgcgccgaccaccacggcgatggtcgacttcgtgacgcgcgtggtcggctggaaagtagatgcgcgctaccaggcgctgaactacgacgtgaaccggctgtgggaccgcaatggcgaactgcgccagggtgcggtgacccagctgcgccaggcggtggcgatcgacccgcatctgcaggtgctgatcgtgcatggctggaatgacctgtcgtgcccgttcatgggctcgatcctgaccgtggaccagatgccgacgatgggcagcaatccggaccgggtgcaggtgcgcagttatccgggcgggcacatgttctacagccgggccgacagccaggcggcgttccgcaaggatgtacaggcgttgttccagcgtaattga

SEQ ID NO: 496423 - DNA, 657 bp, Stenotrophomonas maltophilia
atgcgctccgaccccatccgcccccatcggcaaacccggcagcgccataatgcgcgtccacccgtgtggaccatcgtattggccagccactcgctgctgttccccggcctgccgctgcacagtgcacggctggtcctgagcccgatccgtcgtgacgacgccgccgcgctgttcacgctgcagtccaacccggatgtcatgcgatggtggaaccatccagcctggacgcgactggccgaagcgcgcgagcagatcgacgatgacctcgccgcccatgccatcggcacccagctgaagctggccgtgcgcgagtcgctggaaggtccgctgctgggcatctgcgtggtattcgcggtggaccgcgatgcggcgcgcgccgagatcggctacctgctggcacccgatcgccagggccagggctatatgcacgaggccctgcaacaggtactggcctacctgttccgcaccctgcacctgcatcgggtggaagccgagatcgacccgcgcaatgcgccgtccgcgcacgtgttggaacgcctgggcttccaccgcgagggggtgctgcgccagcgctggcgcatccaggggcagctggccgactcggccgtctacggcctgctggccgatgacgacgccgcagccaccctccccgcttga

SEQ ID NO: 496424 - DNA, 1890 bp, Stenotrophomonas maltophilia
atgaacgcccgctataacgccgccgatattgaagtcctgtccggccttgacccggtcaagcgccgtcccggcatgtataccgacaccgcacgcccgaaccacctggcgcaggaagtgatcgacaactcggtggacgaggccctcgccggccatgcccgctcgatcgagatcaccctgtacaaggacggcagcgtggaggtcagcgatgacggccgcggcatgccggtggacatccatccggaagagaagatcccgggcgtcgaactgatcctcacccgcctgcatgcaggcggcaagttcagcaacaacaactacaccttctccggcggcctgcatggcgtcggcgtcagcgtggtcaacgcgctgtcgaccctggtggaggtgcacatcaagcgcgaaggtgccgaacaccgcatcaccttccgcaatggcgaccgcgccacgccgctggaggtggtcggcaccgtcggcaagaagaacaccggtacccgcgtgcgcttctggccggacccgaagtacttcgacacgcccaagttcgcagtgcgcgcgttgaagcacctgctgcgcgccaaggccgtgctgtgcccgggcctgaccgtcaagctgaccgacgaagccaccggtgaagtcgatacctggtactacgaagacggcctgcgcgactacctgaagctggaactgggcgagcgcgaatcgctgccggccgacctgttcgtcggcagcctcaagaaggacaccgaggtggtggactgggccgtggcctggctgccggaaggtgagctggtccaggaaagctatgtcaacctgattccgaccgcccagcatggcacccatgtcaacggcctgcgtaccggcctgaccgaggcgctgcgcgagttctgcgacttccgcaacctgctgccacgcggcgtcaagctggccccggaagacgtgtgggaccgggtgtcgttcgtgctgtcgctgaagatgaccgacccgcagttcagcggccagaccaaggaacgcctgtcctcgcgccaggccgccggctttgtagagggcgccgcgcacgatgcgttcagcctgttgctgaaccagaacgtggagctgggcgagaagatcgcgcagatcgccatcgagcgcgccagtgcgcgcctgaagaccgagaagctggtcgtccgcaagaaggtcacgcagggcccggccctgcccggcaagctggccgactgcatcagccaggacctgtcgcgcaccgagctgttcctggtggaaggtgactcggcaggcggcagcgccaagcaggcgcgcgacaaggatttccaggcgatcctgccgctgcgcggcaagatcctcaacacctgggaagtgtcgtccaacagcgtgctggcctccgaagaagtgcacaacctggccgtggccatcggctgcgaccccggcaaggacgacatcaccggcctgcgctacggcaaggtggtgatcctggccgacgcggactccgacggcctgcatatcgccaccctgctgaccgcgctgttcctcaggcatttcccggcgctggtcgatgccggccacgtgttcgtggcaatgccgccgctgttccgcatcgacgtgggcaagcaggtgttctacgccctggatgaggaagagaagcgttcgatgctggacaagatcgagcgcgagaagatcaagggcgcagtcaacgtcacccgcttcaagggcctgggcgagatgaacccgaaccagctgcgcgagtcgaccatccatccggatacgcgccgcctggtgcaactgaccgtggacgatggcgagcagacccgttcgctgatggacatgctgctggccaagaagcgcgcgtccgaccgcaagggctggctggagtcgaagggcgatctggcttcgctggaagtctga

SEQ ID NO: 496425 - DNA, 234 bp, Stenotrophomonas maltophilia
atgaagaagttgctgaccgttgcaatcctggccgctgccgccgttgcagtgccgctggtggtggcgcagaacgcgggccagccggccccgcagcagggtgaccaggccgacaaggcgcaggccgaggccgatgccaaggccaagcgtcgtgcccaggccaatgccgaaatgaaggcgcagggccagccggccccgcagaaggaagaagaggaagaagcgcgcaagaagcgctga

SEQ ID NO: 496426 - DNA, 1665 bp, Stenotrophomonas maltophilia
atgactcccttgattttcgtaaccggcggcgtggtgtcctcgctcggcaaaggcattgccgccgcgtcgctggccgccattctcgaagcccgtggcctgaaggtcacgatgatgaagctcgacccgtacatcaacgtcgacccgggcaccatgagcccgttccagcacggtgaggtgtatgtcaccgacgacggcgccgagaccgacctcgacctgggccactacgagcgcttcgtgcgcacccgcctgagccgcaagaactcggtcaccaccggccgcatctacgagaacgtgatccgcaaggagcgccgcggcgactacctgggcgcgaccgtgcaggtcattccgcacatcaccgacgagatccgccgctgcatcgacgaagccaccgaaggctacgacgtggcgctggtcgagatcggtggcaccgtcggcgacatcgagtcgctgccgttcctggaagcgatccgccaggtgcgcaccgagcgtggcccggagaaggcgctgttcatgcacctcaccctggtgccgtacatcggcgccgccggtgagctgaagaccaagccgacccagcattcggtgaaggaactgcgttcgatcggcatccagccggacgtgctgctgtgccgttccgagcaggccgtgccggattcggagcgccgcaagatcgcccagttcaccaacgtctccgagcgcgcagtgatcagcgtgccggacgtggacgtgctgtatcgcattccgtcgggcctgcacgcgcagggcctggacgagatcgtggtcaaccagctgaagctggccgacaaggccggtccggtcgatctgtcgatgtgggaggacgcagtcgatgcgaccctgcatccgctggatgaagtgaccatcgccgtggtcggcaagtacgtggatcaccaggatgcctacaagtcggtcggcgaagcactgaagcacggcggcctgcgccagcgcaccaaggtcaacctgaagtggctggaagcacaggatctggaaggcaccgacatggccgcgctggccgatgtcgacggcatcctggtgccgggtggcttcggtgaccgtggtttcgaaggcaaggtgctgacctcgaagttcgcccgcgagcagcacgtgccgtacttcggcatctgctacggcatgcaggcggccgtcgtcgattacgcgcgcaacgtggtcggcctggaaggcgccaacagcaccgagaacgaccgccagtcgccgaacccggtgatcggcctgatcaccgaatggcgcaccgccaccggcgatgtcgagaagcgtgacgacaagagcgacctcggcggcaccatgcgcctgggcctgcaggaacagcgcctgaagccgggcacgctggcccgtgagctgtacggcaaggacgtcgtcgccgagcgccaccgccaccgctacgagttcaacaaccgttaccgcacccagctggaagatgccggcctggtgatcgccggcaagtcgatggacgacaccctggtggaagtggtcgaactgccgcgcgacgcgcatccgtggttcctggcctgccaggcgcacccggaattcctgtccacgccgcgtgacggccacccgctgttcatcggtttcatccgtgccgcgcgcgagcgcaaggccggcggcaagctgctttccgaagcgcgcgcctga

SEQ ID NO: 496427 - DNA, 831 bp, Stenotrophomonas maltophilia
atgaaactgtgtggattcgaggtcgggctggaccagcccctgttcctgatcgccggcccctgcgtgatcgagtcgatgcagctgcagctcgataccgccggcaagctgaaggaagtcaccgacaagctcggcgtcaacttcatcttcaagtccagcttcgacaaggccaaccgcacctcgggcaccgcgttccgcggcccgggcatggaagagggcctgaaggtcctggccgaggtcaagaagcagatcggcgtgccggtgctgaccgacgtccatgagtacaccccgatggacgaagtggcctcggtggtggatgtgctgcagaccccggcgttcctggtccgccagaccgacttcatccgcaaggtgtgctcggccggcaagccggtcaacatcaagaagggccagttcctggcgccctgggacatgaagccggtcgtggagaaggccaaggccaccggcaacgagcagatcatggtctgcgagcgcggtgccagcttcggctacaacaacctggtcagcgacatgcgctcgctggcggtgatgcgcgataccggttgcccggtggtgttcgatgccacccactcggtgcagttgccgggcgggcagggcaccagttccggtggccagcgtgagcacgtgccggtgctggcccgtgctgccgtcgcggtgggcatctccggcctgttcgccgagacccatccggatccgtccaaggccctgtccgatggccccaacgcgtggccgctggaccagatggaagcgctgctcgagaccctgatggagcttgacgcggtgaccaagaagcacggcttctcgcgcttcgcgtga

SEQ ID NO: 496428 - DNA, 348 bp, Stenotrophomonas maltophilia
gtgagtcgtgacccgcgggtggcgctggaagcccagcgtcatcgccggcactggaaacagttgccctggggcctgatcgcactgggcctggccgtgctgttcaccgtgggcatgtttggcctggtgctgatcggtgcggcgtcggtgcgccccccgggtgatggcagcagcgcgcttgatctgcgcgcgtatttcattgcgctgctggtcgcggagctgctcggtgccgcggggtgcctcgcggccgcggtgctggcctggcggctgaatcgcggcaaggtggcggccggctttgcgatcatcctgctttcgctgtggcttggcgccctgttctacggattgctttga

SEQ ID NO: 496429 - DNA, 330 bp, Stenotrophomonas maltophilia
atgaatacgagcacgtcagcgtgcggctggccctggggcctggtcgcgctggggctgtccgtgctcgcctgggcgtccctgctgctgggagtaatggcctttgcggccagcttcggctcgccgggtgacggaaaccatggcatccaggccatgcagtactggatcgtggccgcgctggtcacgctgggtgtgtctttcgtcggcagcctggtggcgatggtgctcgcttggcgacgccgtcgtggacccgtcgcggcggcggtggccggtgcgttgctggtgatgctggtgtcgctggccctgatcgtgatcgggtccagctggggctga

SEQ ID NO: 496430 - DNA, 1293 bp, Stenotrophomonas maltophilia
atgagtacgatccgcagcatccacgcccgtgaaatccttgacagccgtggcaaccccacgctggaagccgaagtcattctggaggacggttcgttcggtcgtgccgcggttccctccggcgcctcgaccggcaccaaggaagcggtcgagctgcgtgacggtgacaagacccgttatctgggcaagggcgtgcgcaaggccgtcgacaacgtcaacaccacgattgccgccgcgctgaagggttttgaggccaccgaccaggccggcctcgaccgtcgcctgatcgatctggacggcaccgagaacaagggccgcctgggtgccaacgcgctgctgggtgtttcaatggccgccgcgcatgccgccgctgcatcgaacaagcaggcactgtggcagtacctggctgccaggaccggcgtgaccccggcgctgccggtgccgatgatgaacatcatcaatggcggcgcgcatgccgacaacaacgttgacttccaggagttcatggtgctgccggtcggcttcacctcgttctccgaagcgctgcgtgccggtaccgaaatcttccattcgctgaagtcggtgctgaagggccacggcctgagcaccgcggtcggcgacgaaggtggcttcgcgccggacttccgcagcaacgtcgaagcgctggacaccattctcgaagcgatcggcaaggcgggctacaccgccggtgaagacgtgctgctgggcctggacgtggcctccagcgagttcttcgagaacggcaagtacaacctggtcggcgagaacaagcgcctgacctccgagcagttcgtcgacttcctcgccgactgggccgcgcagtacccgatcatcacgattgaagatggcctggccgagaacgactgggccggctggaagctgctgaccgaccgcatcggcaagaaggtgcagctggttggcgacgacctgttcgtgaccaacccgaagatcttccaggaaggcatcgactcgggcactgccaatgcgatcctgatcaaggtcaaccagatcggcactctcagcgaaaccctggaagcgatcgccatggccgatcgtgccggctacgccgccgtggtctcgcaccgttcgggcgaaaccgaagacaccaccatcgccgacatcgcagtggccacaaccgccacccagatcaagaccggttcgctgtgccgcagcgatcgcgtggccaagtacaaccagctgctgcgcatcgaggaagccctcggcgccggcgcgcgttacgccggtcgtgacgcgttcgtttcgctgaagcgctga

SEQ ID NO: 496431 - DNA, 354 bp, Stenotrophomonas maltophilia
atgcgcgactggcgctggatgctgctggtgctggccctgttgctgggctggctgcagtaccgcttctggtttggtccgggcaattcgggtgaagtgatgatgctcgaagcccaggtcgccaaccaggagcgggacaatgagggcctgcagcagcgcaatgatgcgctcgctgcggaagtgaaggacctcaaggaaggccagtccgccatcgaggaacgcgcgcgcagcgagctgggcatgatcaagcccggcgagaagttctatcgcgtggtcgaggatgcgccggtgcacccggcgcagcctgcggcaggtgtcagtgcgcaggttggcgaccacccggcggacgtgccatga

SEQ ID NO: 496432 - DNA, 699 bp, Stenotrophomonas maltophilia
atgagtgcggcgatctgggtcgtggttccggctgctggccgtggcacccgctttggcgcgccgttgcccaagcagtacctgcaggcgggcgggcagatcctgctcgcccataccctggacgccctgctggcgcatccggccgtagccggggcaatggtagtgatcggcccggacgacgccgactggcccggctggaacgagtgggcgggcaagccggtgctcacctgcatcggtggcgcgacccgtgccgcttcggtgctggctggcctgcaggcgctgccggagacggtgcgcgctgatgaattcgtgctggtccacgatgccgcgcggccgaacctgtccctggtcgatctcggccgcctgcttgaagtcggtcgtgccgatccggtcggggcgatcctggccgcaccggtacgcgacaccctcaagcgtgcgggcgacgacggtggcatcgatggcaccgagccgcgcgagcggctgtggcgcgcactgacaccacaactgttccgccgccaccagctcagccgcgcgctgtccgaagccgccgccgccggtgttgaagtcaccgatgaggccatggccatggagcgccagggccagcgcccgctgctggtggaaggcagcgaggacaacttcaaggtcaccaccccggccgatctggaccggtttgaattcgtactttcccgccgcgccggctga

SEQ ID NO: 496433 - DNA, 498 bp, Stenotrophomonas maltophilia
atgagcaccgcaccgttcccgcccgtccgcatcggccagggctacgacgtccatgccttcggtgaaggcgaccacatcatgcttggcggagtgaacgtgccgcacagctgcggcgtgcttgcacacagcgacggcgacgtgatcctgcacgccctctgcgatgccatgctcggcgcactggcgctgggcgatatcggccagcatttcccgcccagtgacgaccgctggaagggggccgacagcagcgagttcgtgcgccactgcgacagcctgctgcgtgagcgcggctggcgcgtcggcaacaccgacatcaccgtgatctgcgagcggccgaaggtcggcccgcatgcgcttgcgatgcgtgagcgcatcggtgggttgctgcagctgccgctggacgcggtcagcgtcaaggccaccacctcggagaagctgggcttcaccggccgtggtgaaggcatcgccgcgcaggcggtcgtgttgctggtggcggcatga

SEQ ID NO: 496434 - DNA, 1032 bp, Stenotrophomonas maltophilia
atgatcccgctgccgttggcgtttggtgcgccgttgttgacggcgcgcatccgcaccacgccggacgatttccaggtggatgaactgccggcgttcgaggcgagcggtgaaggcgagcatctgctgctgcacatccgcaagcgcggcgccaacaccgtgcatgtggccaaggtactggcaaaatgggcgggcctgccggaaatggcggtgagttacgccggcatgaaagaccgccacgcggtcaccacccagcgtttcagcgtgcacctgcccaagcgcattgcgccggacctggccgagttggccagtgacgaaatcgaagtcatcgaggcaacctggcacaaccgcaagctgcagcgcggcgcactggccggcaaccgcttcaagctggtgctgcgcgaggtgcagggcgatgccgccgcgatcagcgagcgcctgcagcagattgccgcgcgcggcctgccgaactggtttggtgaacagcgtttcggccgcgacggtggcaacgtgccggctgcactggcgatgttcggtggccgccgcatgcgcaaggaccagcgttcgctgctgctctctgcagcccgttcggcgctgttcaaccgcgtgctggccgcgcgcgtggagcagggcagctgggaccagccgctcgatggcgaagtctggatgctcgatggcagtcgcagcgtgttcggccccgagccgtacacggatgtgctggccgagcggctggcgcgtttcgacatccatcccagcgcgccgttgtggggcgaaggcgagctgcgcagcaccgacgctgcgcgtgagctggagctggccgcgctggacgacgacgagtcgaaggcactgcgggccggcctggaagatgcgcgcctgaagcaggagcgccgcgcgttgcgcctgcgtccggcgctgctgcagcaccagtggctggccgacgacgtgctggaactgtcgttcgcgttgccgccaggctgctacgccaccgccgtactgcacgagctcggccccgtcgaagacgcctcgcaggcctga

SEQ ID NO: 496435 - DNA, 540 bp, Stenotrophomonas maltophilia
atgtcgcaccctgatgacgaagatccggccgccttgttccgtgcggccatcggcgaagtgaagccgctgcgcaaggatgccgagccggcacctgccgcgccccggccgaaaccgcgtgcgcgcatggccgagcgtgacgaggccgaagccgccggcgagttcgcccggctgctgcgcgacagtgcgccactggaagccggcgacgtggccagctatcgccgcgacaacctgccaccacgcctgttccagcgcctcaagcgcggccagtactcggtgcaggacgaactggatctgcacggcgccaccgccgcacaggccgaagccctgctacgccagttcctgctggaagcgcatgcacacgagtacggctgcgtgcgcatcatccacggcaagggactgcagtccgatggcggcgcaccggtgctgaagaacctggtcgatcgcctgctgcggctgcgcaacgacgtgctggcattccattcggcaccgaccggacaaggcggcaccggcgcggtactggtgctgctggcgcggcgttga

SEQ ID NO: 496436 - DNA, 780 bp, Stenotrophomonas maltophilia
atgcgaatcctggtcagcaatgacgatggtgtcgacgccgcaggcatccggatgcttgccgcggtcctgcgcgaggccggtcacgaagtcacggtggttgcgcccgaccgcgatcgttccggcgccagcaactcgctgaccctggacctgccgatccggctcaagcgcatcgaccattacaccgtttcggtggccggtacacccaccgactgcgtgcacctggcgctgaccggcctgcttgaattcgagcctgacattgtcgtgtccggcatcaacaacgccgccaatctcggcgacgacgtgatctattccggcaccgtctcggcggcgatggaaggtcgcttcctcggcctgccggcggtggcggtctcgctggtcagccgcaaccacgatccgaagcacttcgagaccgccgcgcgtgctgcggtggagattgtcgcccggctcaaggccgatccgctgccggccgacaccatcctcaacgtcaacgtgccggacctgccgtggagcgaggtcaagggcttcgaggtcacccgcctcggcaaccgccatcgtgccgaaggctgcatcgcgcagaaggatccgcgcggcaacgaggtgtactggatcggccctgccggccgtgagcaggattccggtccaggtaccgatttccacgcggtgcgcaccggccacatctcgatcaccccgatccaggtcgacctcacccgctaccaggcgctggagaaggtcgccagctgggtcggcggcctcagcgccgcgctggaccagccggcatga

SEQ ID NO: 496437 - DNA, 678 bp, Stenotrophomonas maltophilia
atgagcccacgcctgcgattgcagccggaagccgtcggtatcggcatgacctcgcagcgcgtgcgtgaccgcctggtcgaccgcctgcgcgaagccggcatcgtcgacgagccgaccttgaacgcgatccgggtggtgccgcgccatctgttcatcgatgaagccctggcctcgcgtgcctatgaagacaccgcgctgccgatcggccatggccagaccatctcgcagccctgggtggttgcgcgtatgaccgaggcagtgctccaggtcgcgccgaagcgggtgctggaagtcggtaccggttccggctaccaggccgccatccttggcgcgttgggcctggaggtctacaccgtggagcgcattggtgatctgctgcgccaggcccgcaagcgcttccgtgcgctgggcatgaacatccgcaccaagcacgacgacggccgcgtcggctggcccgagcacggcccgttcgatgccatcgtggtcactgcggcggcgccggcactggtcgacgccctgatcgagcagctggccgaaggcggccgcctggtggcgccggtcggtggccctggggcgcagtcgctggtacagctggaccgcaaggccgacggcagcatcgaacaacacgtgctggcgccggtcacgttcgtgccgctgctgtctggcatgctcgactaa

SEQ ID NO: 496438 - DNA, 615 bp, Stenotrophomonas maltophilia
atgaagattttcgggccgctgtacgagcgggcgatgaagtgggcggcgcacgaacgcgcgccgacctacctgacggtgttgagcttcttcgaggcgatcatcttcccggtgatgccggaggtgatgctggcgccgatgtgcgtggcccagcccaagcgcggctggtggtttgccaccctcagcctggccggctcgatggtcggtgcgctggtcggctacgcgctgggtcactacgctttcgaggcgatcaagccgctgtttgaagtgctgggcatgctgccggcgatcgagcagggcatcaccaccgtgcaggcgaagatggccgaatcgccgtgggcggtgttcaccttcctggtgctgggcggcttcatgcccatcccgatgaaggtcttcacgtgggcatcgggtatcgtcggcgtaccgatgccgcagtacctgttgagcatgctgatcggtcgcggcaagcgcgtgttcgtgctggctgcggtcatccgtatcggtggtgcgcgtgctgaagcggcactgcgtcgctggattgaaccgctgggctggatcgccaccgcgttggtggtggtgctgatcgcctggcttgtatggaggtcgaagttcgcatga

SEQ ID NO: 496439 - DNA, 786 bp, Stenotrophomonas maltophilia
atgagtcctgatcgtctgagcaagggagtgcgcatcggcgcgctggcgttgctggtttccaccctggccgcctgcggcaccgccactgtggttcgtcctggtggtggcagcaccggtggtggtgtgaccacgccgaagacctcggtgcccaagcccgggcagaccgtggtggtgcgcaagggcgacaccatctatgcgctggcccgcatccatgacatcaccccggccgacctgattgcctggaacagcctggacaacccctcgaccatccatccggggcaggtgatccggctgtatccggccggtgccagcggcggccgcgcgccgaccacggtggtcaccgcgccgcgctcgggtggcagcagcgccggcagcacggcgccaactccggcgccggccggtccggtgaagagcaacatcgcctggcgctggccggccgatggcgcgatcgtcggccgctacgttgccggcgatgcgaccaagcagggcgtggacatcgccggtaccagcggccagccggtcaaggccaccgccaacggtgtggtggtgtactccggcgccggcctggtcggctacggcgagctgatcatcatcaagcacagcgaccagtggctgtcggcctatggccacaaccgcaagcgcctggtgaatgaggggcagagcgtgaaggccggtgagcagatcgccgagatgggccgcaccggtgcgaaccgcgacatggtccacttcgagatccgctacaacggcaagccggtcgacccgcagcagtacctgctggcacgctga

SEQ ID NO: 496440 - DNA, 489 bp, Stenotrophomonas maltophilia
atgtctcgcccaacagcccttttcgcgctgctcatcgccgcgccgttggcgaccgccgccagcgatccacgtgacgtggtcactcgcctctacgacgccatccaggcgccgcagttgaacgaaacggcgattgctccgctgctgggtgatgccctccgctcagccatcgatgcgcagcgtgcatatgaacaggcctgcaccgcactggccgcgcccgatgagaagccgcacatgctcgaccagagcccgtatctgttggcgccggaccggccggagacgataacggtgggagcgcccggatcgagcggtgacgccacctgggtccatgtcgacatggccgtgggcgactatcgctggaccgaccgggtcctgctgcagcggcagggcccggactggaaggtcatggatatccgctgggggcagggtggcaacctgatcggtcggctgcaggcgttctccgcgttccgctgcacaccttcgggcagctag

SEQ ID NO: 496441 - DNA, 375 bp, Stenotrophomonas maltophilia
atgcagctgaaccacgaaccgccggattacgcctacagcctgcgtgccgcagatggccgctcggccaaggtgaatgaccaggtgctgggcggcagtttcttcctcaccccggaccaactggtcacgcactggccggtggcaagtgccgccgcgctgcagttggcggacctggagccgatcctggtgctgaatccggcgctgatcgtgctcggcacgggagaccgtcaggtattcccgcccgcggtggtgatggccgcctgtctgtcgcgtggcatcggcctggaggtgatgaacaatccggccgccgcgcgcaccttcaacattctggccggcgaaggccgcaaggtcgcggccgccttcatcctggaaggctga

SEQ ID NO: 496442 - DNA, 306 bp, Stenotrophomonas maltophilia
atgtccatcgccctgaccgcctcccagacccgtttcctgcgcggccaagcccacgacctgaaggccctgctgcagaccggcggcaagggtgtgaccccagccttcatcgctgagctgaacgaagtgctggagcgccacgaactggtcaaggtgaaggtcgccgcagaggatcgcgacgcccgtgacgcgatgatcggcgagatcgtcgaagccaccgaaagcgcgctggtgcaacgcatcggccacgtcgcggtgctgtaccgcccgagcaaggaacagcgccagatcgtgctgccgcgcggctga

SEQ ID NO: 496443 - DNA, 633 bp, Stenotrophomonas maltophilia
atggctacccgcagcaaaagcagccagcgctggctcaaggaacacttctccgaccccttcgtgaagaaggcgcaggctgagggcatgcgctcgcgcgccgcctacaagctcgaggagctgctcgaacgtgaccgcctgctgaagccgcacatggtggtggtcgaccttggcgcggcccccggcggctggtctcagcaggttcggagacagatcggggacaccggtcgtgtgctggcgctggacatcctggacatgccgccgctggccggcgtggagttccttcatggtgacttcagggaagaagccgtcctatcgcagtttgaagccatgctcggggatcagccggtagaccttgtgctgtcggacatggcccccaataagagtggtgtaggcgcggtcgaccagccgcggatgatgcacctggcggagctggccctggattttgccgacaaccacctgaagaccggtggggcgttcctgatcaagctgttccagggtgagggctttgacgactacgtgcgcgacatgcgccgccgttacgacaaggtctccatccgcaagccggaggcgtcgcgcaagcgctctcccgaggtgtatgccttgggtcagggaaaacgcgcccacatgaagtaa

SEQ ID NO: 496444 - DNA, 1935 bp, Stenotrophomonas maltophilia
atgaacgacttgaccaagaacctcctgctatgggtggtcgtcgccgtcgtgctgatggtggtcttccagagcttctcgccgaagtcctccggggccggcgcgcagggcgcgtcgtactcgcagttcctggaccaggtggacagcggcaacgtgcagaaggtcgccttcggcggcgacatgcgcggcggcaccagccagctgacctacaccacccgcggtgggcagtcgtccaccatcaccgcgccgttcgatcgtgacctgatcaacgtgctgcgcaccaagaacgtggagatcgtgcaggaggagccgtccagcggcatttccctgggcgcgatcctgatgaatttcctgccggtcatcctgatcatcggcttctggttgttcatcatgcgccagatgcagggcggcggcggcggtgccaagggcgcgatgtccttcggcaagtcgcgcgccaagctgcagggcgaggaccagatcaaggtcaccttcgccgacgtcgccggctgcgacgaggccaaggaagaagtgggtgagctggtcgacttcctgcgcgacccgtccaagttcaccaagctgggcggcaagattccgcgcggcgtgctgatggtgggcccgccgggcaccggcaagacgctgctggccaaggccattgccggcgaagccaaggtgccgttcttctcgatctccggttcggacttcgtggaaatgttcgtcggcgtgggtgccagccgcgtgcgtgacatgttcgagcaggccaagaagcacgccccgtgcatcatcttcatcgacgaaatcgacgccgtcggtcgccaccgtggcgcaggcctgggcggtggtcatgacgagcgcgagcagaccctgaaccagctgctggtcgagatggatggttttgaaggcggcgaaggcgtgatcgtgatcgcggcgaccaaccgtccggacgtgctggatccggcgctgctgcgtccgggccgtttcgatcgccaggtggtggtcggcctgccggacgtgaagggccgcgagcacatcctgaaggtccacatgcgcaagctgccgctggccgacgacgtcgagccgatggtgatcgcacgtggtaccccgggcttctccggcgccgacctggccaacctctgcaacgaggcggccctgttcgccgcgcgcggcaacgagaaggaagtccgcatggaccacttcgaccgtgcccgcgacaagatcctgatgggtgccgagcgccgctcgatggccatgagcgaggacgagaagaccctgaccgcgtaccacgaagcgggtcacgccatcgtcggccgcctggtgcccgagcacgatccggtctacaaggtcaccatcattccgcgcggccgtgcgctgggcgtgacgatgtacctgccggaaggcgacaagtactcgatgaaccgcgtggcgatccagtcgcagctgtgctccctgtacggcggccgtgtcgccgaagagctcatcttcggcgaggacaaggtcaccaccggcgcctccaacgacatcgagcgcgcaaccaagatggcccgcaacatggtcaccaagtggggcctgtcggagcagctcggcccgatcgcctatggcgaagaggacgacgaggtgttcctggggcgttcggtcacccagcacaagagcgtgtccaacgacacggcgcgccggatcgacgaggaagtgcgcaacatcctcgacaaggcctatgcccgcaccacccagctgttgaccgagaacatcgacaagctgcatgcgatgtcgcagctgctgctgcagtacgagaccatcgacgcaccgcagatcgacgccatcatggaaggccgcgatccgccgccgccggcgggctggagcaagtcgaacaaggacggtggcaacgacaagggcggcgacgcccgcccgctgccgccgatcgcaggcccggccgaatcgcattga

SEQ ID NO: 496445 - DNA, 186 bp, Stenotrophomonas maltophilia
atgtccgccccgaagcctgaaccgatttcccacaccgccgaaatgatcatcgccaccgtggtcggcgtgggcgtagggctgggcgccgacaacctgctgctgggctgcgtggtggggatcggtgtcggcatcgtgctgagcatcgccagaaccctgtacgtggaccgcaagcgtcggcggcgttga

SEQ ID NO: 496446 - DNA, 897 bp, Stenotrophomonas maltophilia
atgttcgatacctcgccccagctcgattgcgccggccgcatcctgcgcctcgaccgtgcccgggtcatgggcatcgtcaacgtcaccccggactccttctccgatggcggcgcgcatgacaccaccgaggctgcggtcgcccatggcctgaagctggtcgaggagggcgccgacctgctcgatatcggcggcgaatcgacccgtccgggcgctgcgccggtctcggtcgaggaggagctgcgccgggtgattccggtaatcgagcagctggccgcccgcacccgggtgccgatcagcatcgataccttcaagccggaggtgatgcgcgcggcggtggccgctggcgctggcatgatcaacgacatcttcgccctgcgccagggcggtgcgcttgaagctgccgccgaaaccggcgtgccggtggtgctgatgcacatgcagggcgagccgggccacatgcaggccgatccgcactacgacgacgtggtcgccgaggtgcacgggttcctggtgcagcgcctgttcgctgccgagatggcgggcattgcgaagaagaacctgctgatcgaccttggttttggcttcggcaagagcaccgcccacaacatgaccctgctggcgcgttcggagcgcttcctggaactgggggtgccggtgctggccggcctgtcacgcaagcgcagcctgggagaactcactggccgcgacacgccctccgaacgcgtggcggcttcggtggccgcgcacctgatcgcggtccaacgtggcgcgcgcatcgtgcgcgtgcatgacgtggcggccaccgtcgatgcgctgaagatctggcaggcagtggaggccgtgccgacgccccgtgccgacgctgcgccgacgatccgctggccggacgaagactga

SEQ ID NO: 496447 - DNA, 954 bp, Stenotrophomonas maltophilia
atgggcgtcgatcggcggccgctggcgatcgccgtgatggggccgaccgccagtggcaagaccgccaccgcaatcgctttggcacagcaactggacggcgaaatcgtcagcgtcgattcggcgctggtataccgccacctggacatcggctcggccaagcctgatgcggccgagcgtgcgcaggcgccgcaccatctgctggacctgcgcgatccgtggcagacctactcggcggccgagttcgccgccgatgccggccgggtcgtggccgacatcgtggcacgcggcaaaacgccgatcctggcaggtggcacggggctgtacttccgggccctgctgcagggcctgtcgccgatgccggaggccgacccggtgatgcgcgaagcactcagcaccgaggcggccgagcggggctgggcggcattgcacgcagagctggccgaggtcgatccggccgccgcggcacgcatccatgccaccgacccgcaacgcatccagcgggcactggaggtctatcgcctgaccggtacgcccatcactgaatggcagcgccgtccgggcgtagcgcggctgccggtgcgcaccctcaagctgatcctggccccgcgtgaccgcgtggtactgcaccagcgcatcgaggcgcgcttcgacaccatgctggcgcagggcttcctggacgaagtgcgggcactgcgcgcgatgccggaaatggccgccgtggaggccccgttggacctgccggcggtgcgtgcggtcggctatcgccaggcctgggagtacctggacggggagggggatgccgcccgtttccgtgacaaggcgatcttcgccacccgccagctggccaagcgccagctgacgtggctgcgcggcgagcttgatgcgcgctggttcgacccccatatcgaccaggagcgccttgccggcgcggtgtcggccttcgtcgcacgctga

SEQ ID NO: 496448 - DNA, 276 bp, Stenotrophomonas maltophilia
atgtccaaggggcaatcgctgcaggatcctttcttgaacgcactgcggcgcgagcgcgtgccggtttcggtgtacctggtgaacggcatcaagctgcagggcacgatcgagtcgttcgaccagttcgtggtcctgctgcgcaacacggtcagtcagatggtctacaagcacgccatttccacggtggttccggcacgcaacgtgaaggtcggtccgggcggtggttacgtgcagtcgggtgaaggtggtcaggcaggtgatgaagcagacgagtaa

SEQ ID NO: 496449 - DNA, 1311 bp, Stenotrophomonas maltophilia
atgtttgaccgctcgaaaaagggcgaacacgccctgttgatccagccccatttcggcaagctggaagacgatgtgctggaagagttcggtgatctggcccgctcggctggggccagcatcgccgcgacgatcaccgcgcgcctggaccgtccgaatccgtcaaccctgatcggcagcggcaagctggacgagatcaaggccgcggccgatgccagtggcgccgacctgatcctggtcaaccatgcgctgagcccgggtcaggagcgcaacctggaacgcttcctcgagcgccgggtgatcgaccgcaccggtctgatcctggacatctttgcccagcgtgcacacagccacgagggcaagctgcaggtcgagctggcgcagctgcgtcacttggctacgcgattggttcgcggctggacccacctggagcgccagcgcggcggttcgatcggcctgcgtggcccgggtgaaacccagctggaaaccgaccgccgcctgttgcagaagcgggtcgagcagctgcagaagcgcctggagaaggttgaagtgcagcgcacccagatgcgccgtgcgcgtgtgcgcagcgagctgccgcgcgtggccctggtgggctacaccaacgccggcaaatcgaccctgttcaacgccatgaccggcgccgaggcctatgccgccgaccagctgttcgccacgctggatccgaccgtgcgccgcatcgcggtcccgggcggcagcgtggtgctggccgacaccgtcggtttcgtccgcgacctgccgcatgatctggtcgccgcgttccgctcgacgctgtccgaggcacgcgaggccgatttcctgctgcatgtggtcgacgccgccgatccgcaccgcgaggagcgcatcgcccaggtggacgaggtgctgaccgcggtcggtgccggtgacctgccgcagctgctggtgttcaacaagatcgaccgcatcgacggcgccgacgtccgccacgatggccaggatggcgtgcccgacgagtcgcgtcgtgaacgtgtctggatttccgcgcgtgacgggcagggccttgagctgctgcaggcagtgctgggcaagcgccttggcctgcagcacgtgaccggtgaattgcgcctgccgccggatgccggccgcctgcgtgcgcgcctgcaccagctggaagtgatccgcagcgaacaggccgatgaagagggctggctgctgcaggtggacctgccgattgccgaagccgagaagctggccgccagtgccgatggcgcgccgatccgggcgctgctgccggagaaactgccggagtggtga

SEQ ID NO: 496450 - DNA, 495 bp, Stenotrophomonas maltophilia
atgtccatccccaccgacgccgatctcaatgcccagtccgccgcgctcgggcagcgcctgcaacaggcctcgctgcagctggtcacggccgaaagctgcagtggcggctggatcgccaagtgcatgaccgacatcgccggttcttcggcgttcttcgactgcggcatggtggtctacagctatgaagccaagcagcgcctgctgggcgtgcgtgcgcagacgctggaacagttcggcgcggtcagtcgcgaaaccgttctggagatggtgtccggtgcgctggtcaattccggtgccggcatcgccgtggcggtgaccggtatcgccggccccggcggtggcagtccggacaagccagtcggcagtgtctggatcggctggaagcgccgcggtggctacgcccgcgccgagctgttccagttcgatggcgaccgcgaagccatccgccggcaaaccgtggcggcggcattgcgcggtatcgacgcccagctgtga

SEQ ID NO: 496451 - DNA, 1686 bp, Stenotrophomonas maltophilia
atgatgtgggaaacgctgggcacggtccgtgacctgggccgactgcaggaaatcgccgttgtcctgatccgctacggcttcggcgacgtggttcggcgcatcggcctggccagcacgctggagcgggcagggcgcctgttgcactggaacgaggaccggcaggaactgctgcggatgaccgcaccggtgcgcgtgcgcagtgcgatgcaggatcttggcccgaccttcgtcaagcttggccaggtgctggcaacgcgcgtcgacctgttgccgccggagtggattgccgagctgtccgaactgcagaacgcggtgccggccctgccgtacgccgagatccgcgggcagctcgaagccgacctgggcgcgtcgccggcggaggtattcgccttccttgacgaaaccccgatggccgccgcctcgctggcgcaggcccatcgcgcccggctgcacgatggtcgtgaggtggtgctgaaggtgcggcgtcccggcatccgcgacgtggtcgaggccgacctgcggctgctggcgcggctggccgagatcgtcgaggcccggttgccggacctgcgtcgctatcgcccggccgaggtcgtgcagcagttcaccgtatcgctgcgccgtgagctggattttgccgccgaatgccgcaatgccgaacgcatcgcgcgccacttcagcggccgtgacgacatactgattccgaaggtgcactggcagtggacctgcgagagcctgaacgtgcaggacttcgtcgacggcattcccggccgcgatctggccggcgtcgatgcggcgggcctggaccggcgcgagctggcgcggcgtggtgccggcatcgtgctgaagatggtgctggaggacggcagcttccacgccgatccacaccccggcaacatcatctacctgcgtgacggccgcatcggcgtgatcgatttcggcatggtcggcgcgctgtccgaagtgcgccgcttccaggtcgcgcaactgctgcacggcctggtcgagcaggacccgcagggcgtggccgacgtgctgctggactgggccggcggcgtggaagtggacgagaaccggctgcagcacgacatcagccagttcgtcgaccagtaccgtggcgtgccgctgaaggacctgcgcatcggcctgatgctgggcgacatcacccagctgctgcgcagctacagcctgaccctgccggccgacctggcactgatgatcaaggccttcctgaccctggaaggcatgggccggcagctggatccggatttcgacatggccagcgccgcccgcccgttcctggagcgtgtggtgctgcagcgttatgcgcccagggcgctgctcaagcgcggccggcgcagcctgttgggcctggtcgacttcgctggcgagttgccgcgcgacctgcgcaagctggtccaggcggcgcgccgtgggcgcctccagctgaaggtggagaccaccgcgctgcagggctttggcgagcaggtgaaccgggccgcgaaccgactggtggtgggcgtgatcacggccgcgctgatcatcggctcgtcgatcgtgatgcacagcgtcggcggggtttccagccgctggttgctggcgctgggcgtgtgcggattcatcggcgccggcttctgcggcgtatggatcctggtttcgatatggagaagcggcaagcacacctag

SEQ ID NO: 496452 - DNA, 636 bp, Stenotrophomonas maltophilia
atggacctgaccgacacccagcacgcgatcctgcagttgatcgccgagcgtatcgagagcgaaggcgcaccgccgtcgcaggctgaaatcgcacgcgcattcggcttcaagggcgtgcgcgcggcccagtaccacctggaagccctggagcaggccggtgcgatccgtcgcatcccgggtcaggcccgcggcatccgcctggtgcaggcaccgccggtcgagaagctggccgagccgggcctggccgacagcgtgctgcggctgccggtgctgggccgggttgcggccggcctgccgatcggtgccgacatcggctcggacgatttcgtggtgctggaccgggtgttcttctcgccggcgccggactacctgctgaaggtgcagggcgactcgatgatcgatgagggcatcttcgacggtgacctgatcggcgtgcaccgcacccgcgacgcccattccgggcagatcgtggtggcccgcatcgatgacgagatcacggtcaagctgctgaagatcgccaaggatcgcatccgcctgctgccgcgcaatcccgactacaagccgatcgaggtgctgccggatcaggacttcgcgatcgagggcctctattgcggcctgttgcggcccaaccgttga

SEQ ID NO: 496453 - DNA, 1101 bp, Stenotrophomonas maltophilia
atggcaaagaagacccccaaagacagcacctccaacgacacgacctctgcaaggaccaatccgatggacgagaacaagaagcgcgccctcgctgcagctctgggccagatcgaaaagcagttcggcaagggctcggtgatgcgcatgggcgaccgcgtggtcgagcccgtcgaagccatcccgaccggttcgctgatgctcgacatcgcgctgggcattggtggtctgccaaagggccgtgtcgttgagatctacgggccggaatcctcgggcaagaccaccttgaccctgcaggccatcgccgaatgccagaagatgggcggcaccgcggccttcatcgacgccgagcacgcgctggacccgatctacgccgccaagctgggcgtgaacgtggacgacctgctgctgtcgcagccggacaccggtgagcaggcgctggaaatcgccgacatgctggtccgttcgggttcggtggacatcctggtgatcgactcggttgccgcgctgaccccgaaggccgaaatcgaaggcgagatgggcgaccagctgccaggcctgcaggcccgcctgatgagccaggcgctgcgcaagctgaccggcaacatcaagcgctccaacaccctggtgatcttcatcaaccagctgcgcatgaagatcggcgtgatgatgccgggccagagcccggaaaccaccaccggtggcaacgcgctcaagttctacgcctcggtccgcctggacatccgccgtatcggcgcgatcaagaagggtgacgagatcatcggtaaccagaccaagatcaaggtcgtcaagaacaagctggcgcctccgttcaagcaggtcatcaccgaaatcctgtatggcgaaggcatcagccgtgaaggcgagctgatcgacatgggtgtggatgccaagctggtggagaaggctggcgcctggtacagctacggtgaagaacgcattggccagggcaaggacaacgcccgcggctacctgcgcgacaacccgactgtcgccgccaagctcgaggccgagctgcgcgagaaattccagccggccgaagcggcccgcgaggaaggcgacgacgaaggcgaagacgaataa

SEQ ID NO: 496454 - DNA, 492 bp, Stenotrophomonas maltophilia
atgtccgacgccgaagacattccgaccggccgcaagcgccggcctcgtgagcagacccccgtgcaacgggcgttgggcctgctggtccgccgcgagcactcgcgcaaggaactcacccgcaagctgacggcccgtggcatcgaagacgaagccgcgcaggccgctgtcgccaagttgaccgaggccggctggcaggacgacacccgttttgccgagaacctggtgaggatgcgcgccaacaccggttatgggccgatccatgtccgcgccgagctggggacccatggcctggacagtgccgcgattgccgcagcgatggacagctacgaaggcgactggcaggaaaacgcccgtgatctggtccgccgacgctttggcgaggccggcccgcaggacctgacgcagcggcgcaaggctgccgatctgctggcccggcggggcttcgacggcgacagcatccgccgcgcgacccgctacgacccggatgactga

SEQ ID NO: 496455 - DNA, 2649 bp, Stenotrophomonas maltophilia
atgaacgcatccgccaaattcacgacatcccagatccgcagcgacttccttgaattcttcaagggtaaaggccacaccatcgtgccgtcggcgccgctggtgccgggcaatgatcctaccctgctgttcaccaactccggcatggtgcagttcaaggacgtgttccttggcgcggaaaagcgcagctacgtgcgcgcggccgacgtgcagcgctgcctgcgcgcgggcggcaagcacaacgacctcgaccaggtcggctacaccgcgcgccaccacaccttcttcgaaatgctgggcaactggtcgttcggcgactacttcaagaaggacgcgatcgcctgggcctgggagctgctgacccaggtctggaagctgccggccgaacgcctgctggtcaccgtgtaccagaccgacgacgaagcctacgaactgtggcgcgacatggtcggcgttccggaagagcgcatcgtacgcatcggcgacaacaagggcgcgccgttcgcttcggacaacttctggcagatggccgacaccggcccgtgcggcccgtgcaccgagatcttctacgaccacggtgatcatattgccggtggtcccccgggttccccggacgaagacggcgaccgtttcatcgagatctggaacctggtgttcatgcagttcgaccgccagcccgacggcaccctggtgccgctgccggcgccgtgcgtggataccggcatgggcctggagcgcctggcggcgatcctgcagcacgtgcacaccaactatgagatcgacctgttccaggcgctgatccgcaaggcttccgagctgaccggcaccgccgacctggagaacaagtcgctgcgcgtgattgccgaccacatccgtgcctgttcgttcctgatcgtcgatggcgtgctgccgtccaacgaaggccgcggttacgtgctgcgccgtatcatccgccgcgccctgcgccatggctggatgctgggtgtgcgccagccgttcttcagcaagctggtgccgaccctggtcgagcagatgggcgaggcctatccagagctgccggcggcggtggacaccgtcacccgtgcgctgcaggccgaagaagagcgtttcgccgaaaccctcgacgccggcatgaagatcttcgaggacgtggccggcaaggccagcaatggcgtgatcccgggcgttgacgcgttccgcctgtacgacacttatggcttcccgctcgacctgacccaggacatcgcgcgcgagcgcgacctgaccgtcgacatcgccggcttcgatgccgcgatggaacagcagcgcgaaaccgcacgggcggccggcaagttcggcggcggcgtgaccctgccggccgagctggtggcaacgctgagcccgaccctgttcctgggctatgaccgcctgcaggccgacggcctgagcgtgctggccctgctcaaggacggtcgtccggtgcagtcggccgatgccggtgattcggtcatcgtcatcaccaaccagaccccgttctatgccgaatccggcggccaggtcggtgacaccggcgtgctggccggcaacggcgtgcgcctggcggtggaggacacccagaagttcgccggccagttccatggccacgtcggcaccttgtccgaaggcggcctgaaggtcggcgatgtactgtccggccaggtcgatggcgagcgccgtggcgccaccatcctcaaccactcggccacccacctgctgcacgccgcgctgcgcgaagtgctgggcacccacgtgcagcagaagggctcgctggtcgcgccggaccgcctgcgtttcgacttctcgcacttccagccgatcagcgcggaagagctggcggtgatcgagcgcaaggtcaaccagcaggtgcgtgccaacaacgccgctgaagtgcacaccatggccatgcaggaagcgctggacttcggcgcgatggccctgttcggcgagaagtacggtgagcacgtgcgcgtgctgaagatgggtgactactccaccgagctgtgcggtggcacccacgtcaaccgtaccggcgacatcggtctgttcaagatcacctccgagggcggtgtttccgccggcgtgcgccgcatcgaggcggttaccggccagggcgccctggactacgtggacgccgaagaggcccgcctggccgaggccgctgaactgctcggtggcagcgctgccgacgtggtcgagaagatccgtgccctcggccagcgccagaagcagctggaacgcgaactggaggccgtgaaggccaaggtcgcggccggtgccacggccgacctgtccggtcaggctgtcgaggtcgccggcgtgaaggtgctggctgcccgcctggagggcttcgacgccaaggccctgcgtgacgccatggaccgcctgaagcagcagctgggcgacgcggtgatcgtgctggccggtgcccaggacggcaaggccgccctggtcgcgggtgtgaacggcagcgcaatgggcaaagtcaaggccggggaactgttgtcccatatcgccggtcagatcggcggcaagggcggcggacgcccggacctcgcccagggtggtggcgaggacgggcccgcccttgccactgcgctggctgcagtcgtcgaatgggtcagcccccgcctgtga

SEQ ID NO: 496456 - DNA, 204 bp, Stenotrophomonas maltophilia
atgttgatcctgactcgccgcgtcggcgaaaccctgatgatcggtgactcggtgagcgtcaccgtgcttggcgtcaagggtaaccaggtgcgtatcggcatcactgcgccgaaggacgtcgctgtgcatcgcgaagagatctaccagcgcatccagcgtggtgatgaagccggtggcaccggtagcgaaaattctgccgaataa

SEQ ID NO: 496457 - DNA, 2142 bp, Stenotrophomonas maltophilia
gtgcagaacagtgctttcgggccgaacgcgggcgccccggtcatccgcagcctcagcggcaaccgcgtgcagatcctgcaggacggccagtccatcctcggcatgaacgcgatcagcggcgacatcaacattccgttcgatccactgttcgtgcgcagcgtcaccgtcaacaagtcctcggacacggtgcgctatggcggcaatgcgatcggcggcagcgtcgagatcgattcgggcctgatctcgcgcagcatggaagacaaggaccagtcgatggaactggtcctgcgcaagggcttcaatgccgccgatgcgcagggcttccgcatgaacttcaacaaccagcgcaacctctcgaccaacctgcaggtctcgcgccagcgcatctcgcactacgacatccccggcaacagcaaggcccgtgtctgcaacacccgactgttcccgccgaccggcggcgtcaactcggcgctggccgacagctgccagaaggaagcacgcgtacagcagatctacaacaaggcctcgcagccttacatcgatcagttcatgaccgagaatcctgactgggccgatggtgaattctcgttctacaccaataacccgacctcggtctggcagcgccgcacttatatcaacccggtcaatcctgcctatgtcgccggcacgccgtcatacgtgcagaagcagatcaacaatgatgtgacgcccgactaccatcatcggctgggcaacagccatgcgcgcaactcgcaggtggccttcggctcgaccctgttctttgaccgcggctacgtcggtgtcagcatcgatgccaaggacagcgagtacggcgtgccgggcttctcgatgcagaacctgtcgttcggttccaaccatgccgatagcctgccggtgggcgtggtgatcaagcagcagcgctacgcgctggaagccctgctgcgtgatccgctgccgtggttcgagcgcgcggaactccgcgtgtccagactggacaacacttcaggcgagcggctgggtaccaccagggcaaacgactacgatttcgagagcacccaggccgagttgctgctcagccatcaacgcgtcggcccgctcagcggcctggtcggtttcagccaccagtcgcgtgatgtcaccggcagcggctcgcagcgctacctgccggacgtggacacccgcagcaatgcggtattcctgaaggaaacggtggacgtcggctgggttaccttcgatgctggcgtacgccacgaacgggtcgaccacgcactacagcccagccgcttcaagaccgcgcgcaatgccgccaacacgaaactgcaggaccgcgactaccggctcaacagctacagcctcggctcgtacgtcgagctcggccccttgttcgcggccaaggtccgttactcatcctcacagcgcgccccggagatcaacgagctgtatgccagcaacgcgcactattcggtgatgacacaggaagaaggcaaccagaacctggaaccggagcgtgcgaagaacctggaactgaccggcctgttccacctcggcggtttcgagctgtccgccaccgcgtaccggatgcggtacgagaactacctctatctcggctattccggcctgcagaccgccaaccgcctgccgctgaagtactggaagcagaccgacaccacggtgaagggcttcgagatcgacgcgtcgcaggcattggacctgggccgctatggcacgttgaacgtctccgccttcgccgacctggtgaagaacaaggccgaccacccggattcgctgcgcgcccacaacgacggcgagtatctgccgaacatgccgaccaaccgctacggcgccaacctgcagtggcagcgcgaaggctggaaggcacaactgtccagcacctactacgacgcgcagaagtacctgggtcgcaatgtcagtgaggaaattccgctcgacgcattcaacctggtcgacctgcaggtcagccgcgaacttccagtgcgcaacagctacatcgcaggcgtggaagtgttcgtcaatggcagcaacctgctcaatgaagaagcgcggccgcacaactcgccgctgaagtacatcgcgcccctgccggggcggggcttccaggtcggcgtgacgatacggctctga

SEQ ID NO: 496458 - DNA, 885 bp, Stenotrophomonas maltophilia
atggcggccgcacctgccgtcctgcccccgccggcgcgcgaagcgcaacggctgggcgcgaccatcgcgctgtcgatcgtggtccacgccctgctgatcctgggcgtgggttttgcggtgaaaggcgacgcaccactggtgccgacgctggaggtgatcttcagccagacccgcaccgcactgaccccgaagcaggccgatttccttgccgccgccagccaggaaggtggcggcgagcacgaccgtgcgcagcgcccgcgcgacaaccaggccggcatcgttccgcaggcccaggcggggctgagcccggtgccgcaacagcagcaatcggccgcgccggcgcccccgccgcaggcgcgggtggtcagcagccgcaacggcgaagaggcagtggcccaggcgcaggcgcgcccgacaccggagcagccggaaccggatgcaccgctgacggcacgcgagcagcgtgatgccgagatggcgcggctggcggccgaggtgcatctgcgctcggcgcagtacgccaagcgcccgaaccgcaagttcgtgtcggccagcacgcgcgaatatgcctacgccaattacctgcgcgcctgggtcgaccgcgccgagcgcgtcggcaacctgaattacccggacgaggcccggcagcgccggctcggcggccaggtggtgatcagcgtgggcgtgcgccgcgatggcagcgtggaaagcagccggatcctgcgttcaagcgggacgccgttgctggatgaggcggcgctgcgggtggtgcagcttgcgcagccattcccgccgctgccgaagaccgaggacgagatcgacatcctgcaggtcacccgcacctgggtgttcctgccgggtggcaccctgcacgacgaccggtag

SEQ ID NO: 496459 - DNA, 948 bp, Stenotrophomonas maltophilia
atgccgttgaacgtcatcgtggtgatggaccccatcgcccacatcaagatcgccaaggacaccaccttcgccatgttgctggaagcccagcgccgtggccatgccctgcactacgtgcggcccggcgggctggccctggaaggtggcgtggcggtggcccagaccgcaccgctgcaggtgcgcgacgacccggccggctggtatgagctgggcgcgttcagccgtaccgcgttcggtcccggccagatcgtgctgatgcgcaaggacccgcccgtcgacgccgagtacatctacgacacgcaggtgctggacgtggctgccgctgccggcgcctgcgtggtcaacaacccgcagggcctgcgcgactacaacgagaagctggccgccctgctgttcccgcagtgctgcccgccgaccctggtcagccgcgatgccaaggcattgaaggccttcgcgctggagcacggccaggccgtgctgaagccgctggatgggatgggcggccgctcgatcttccgcagcggccagggcgatccgaacctgaacgtgatcctggaaaccctgaccgacggcggccgcaagctggcgctggcccagaagttcattcccgacatcacggccggcgacaagcgcatcctgctggtcgacggcgaaccggtcgactactgcctggcgcgcattccccagggtgacgagttccgcggcaacctggcggctggcggccgtggcgaagggcgcccgctgagcgagcgtgaccgctggatcgccggccaggttggcccggagatgaagcgccgtggcatgcgcttcgtcggcctggacgtgatcggcgattacctgaccgaggtcaacgtgaccagcccgacctgcgtgcgcgagctcgacgcgcagtacggcctgaacatcgccggcaccctgttcgacgcgctcgaggccggcctgcgctga

SEQ ID NO: 496460 - DNA, 354 bp, Stenotrophomonas maltophilia
atggtcatcgatgattcgaagaccatccgcaggactgcggaaacgctgctcaagcgcgaaggctgcgaggtggtcaccgccaccgacggcttcgaagcgcttgccaagatcgcagaccagcagccgcagatcatcttcgtcgacatcatgatgccgcgcctggatggctaccagacctgtgcgctgatcaagggcaaccagctgttcaaggcgaccccggtgatcatgctgtcgtccaaggatggtctgttcgacaaggcgcgggggcgcatcgtcggctcggagcaatacctgaccaagcctttcacgcgcgaagaactgctgggtgccatccgcacatacgtcaacgcctga

SEQ ID NO: 496461 - DNA, 363 bp, Stenotrophomonas maltophilia
atggctcgtatcgtcctgatcgaggattcaccgaccgaccgcgcggtgttcacccagtggctgcgccgtgccggccacgaggtgctggaagcgggcaacgccgaagatggcctgcagctggtccgcgaccaggtgccgcagctggtgctgatggacgtggtcctgcccggcatgagcgggttccaggccacccgggcgatggcccgcgatgcggcgatcaagcacatcccggtgatcatcgtcagcaccaaggcgatggaaaccgacaaggcctggggcctgcgccagggcgcagccgattacatcgtcaagccgccgcgcgaggatgaactgatcgcgcggatcaacgaactggtggcctga

SEQ ID NO: 496462 - DNA, 531 bp, Stenotrophomonas maltophilia
atgcgctcgcccttcgacatccttgaagcctacgaacgacgcagcctggcccatgcggtgcagctgcccgggcggcagttcgcccaggacctgtggcgtggcgtcggttaccgcgtcggccagcgccggctggtgtccgatttccgcgaagtggtggaaatcgtgccgatgccaccggtgaccccggtgccctgcgcgcagccctggctgttgggcgtgggcaacctgcgtggcaacctgtttccggtggtcgacctgaagtacttcctggaaggcacgcgcaccgtgcagcaggaaggccagcgcgtgctgatcatgcgccaggctggcggcgacgtcgcactgaccatcgatgaactgttcggccagcgcagcttcgagctggaccagcagatcgacgcgggcacgttggccgaaggccgctacggccatttcgttgaccgtgccttccatgccgacggccatgactggggcgtgttctcgctctcgctgctgtcgcgcacccctgaattccggcaagccgcggcctga

SEQ ID NO: 496463 - DNA, 2037 bp, Stenotrophomonas maltophilia
atgagtactgcttcggacgccaccaagaccggcaagctgcggctgggcggcagcaacctctggctgttcctgctgctggcatcgatgatcctgttcggcgtcaacaccggcgtcgccacctggcagggcagccgtcttgccgacgccggctccaaggccgccgacctgcaggtgctgtcgcagcagctggccaaccagggacgtgacgcggtcggcggcaacgcccaggccttcaccgccttcaaggccacccgcaacgcgatcgaacagaacgtgtcgacgctgcagggccgctatggcaaggagccgggcgtgtccggcgccatcgccaccctgggcgaaacctgggcgccgctgggcaagcaggccgggcagctggtggccagcgagccggcggtgctggcgctggccggcaatgccaacaacttcaccggcgcggtaccgggcctgcaggcccagctgaacgagctggtgcgcgcgatgtccgcctccggcgccccctcgtcgcaggtgtacagcgcactgcagcaggtcgtggtggccggttcgatggcccgtcgtgtgaccgaaatgcgtgccggtggcagcgccgcagcgacctccggggatgcgctggcgcgcgacatcaccgtgttctcgcaggtgctcgacggcctgcgcaacggcaacgaggaactgggcatcaccgccgtgcgcggtgctgccgccgtggccgcactggagcagtcgcagcagaagtgggaagcgatgaagcaggacgccgacgcgatcctggccagctcgcgccagctgttcgcggcgcagtcggcggcgaccgcgctgggccagggctcggcccacatgctggacgacagccgcaagctgttcgatgcgttctcctcgttcggctcggtgtccgacacccgcctgttccccaacttctggatcggcgtggtgtccggcgcgctgtcgctgatcgcgatcatcggcttcgtctccaccaacgtgcgcagccgctcgcgcgagcaggaactgcgttaccagacccaggtggaattcaacagccgcaaccagcaggcgatcatgcggctgctggacgaaatctcctcgctcggtgagggtgacctgacggtgaaggcctcggtgaccgaggacatgaccggcgcgatcgccgacgcgatcaactatgcggtggacgagctgcgccacctggtgaccaccatcaacgacacctcggccaaggtcgcgatgtccacccaggaaacccaggccaccgcgatgcagctggcagaggcggcgggccaccaggccaaccagatcacctccgcctcggaccgcatcggcgaaatcgcagcgagcatcgagcaggtgtcgcgcaactcggccgagtcggccgacgtggcacagcgctcggtggtgatcgccgccgaaggtgccggcgtggtgcgcgagaccatccagggcatggaccagatccgcgaccagatccaggaaacctccaagcgcatcaagcgcctgggcgagtcgtcgcaggaaatcggctcgatcgtggaactgatcaatgacatttccgagcagaccaacatcctggcgctgaacgcggcggtgcaggcggcgtcggcaggtgaagcgggccgcggtttcgcggtcgtggccgacgaagtgcagcgcctggcagaacgtacctcgggtgcgacccgacgcatcgaaaacctggtgcaggccattcaggccgataccaacgaagcggtcacctcgatggagcagaccacggccgaagtggtgtccggtgcgcgcctggccgaggacgccggtaccgcgctgaccgagatcgagcgcgtgtccaacgccctcaataccctcatcaagaacatctccatcgccgcccagcagcagtcggccgcggcctcggacatcacccgcaccatgggcgtgatccggcagatcaccggccagacctcgcagggtgccgggcagaccgcagagtcgatcggccacctcgcgcagctggcggcggacctgcgccgttcggtcgccgacttcaagctgccggcgtga

SEQ ID NO: 496464 - DNA, 6732 bp, Stenotrophomonas maltophilia
atgagcagtctgcgcgatgcgatgagccacgcagcgctgggctgggtcaagcccgagctggacgagaccctgcgccaggtgcgcaacgaggtcgagtactacgcggaagacccgagcgatgccagccgcatgcgcatctgcgccggctacctgcaccaggtgcagggcaccctgcgcatggttgaactgtatgccccggcgatggtggccgaagagctggagcagctggccaatgccatcggcgccggccaggtggccgaccgggatgaagcctgtgcgaccctgatgcgtggcagcgtgctgctgccggactatctggagcgcctgcagaacggccatcgcgacattccgatcgtgctgatgccgctgctcaacgagatccgcgcgtcgcgtggcgaagaaggcgtcaacgacagcgtgctgctggcctttgcgccggacagcatcaccgccaccgaggccgagctggaccatgcccggggcagcctgagcgggcgcaaccgcgagctgctcgataccgtcggcagcgcagtgaaggaagaactgctgcgcatcaaggatgcgcttgacctgcacctgcgcaccggcggtgcaccggaacagctgcagacccaggccaacgaactgggcgccgtggccgacacgctgggcatgatgggcctgggcgtggcccgcggcgtggtcgtgcagcagcgcgacgcgctgcgtggcgtggtcgaggggcgccagcagatcgacgagaacctgctgctggatatcgccggtgcgctgctgtacgtcgatgcctcgctggacgaccaggttgcccatctgggcgccggcggcagtggcgaggacgatccgagcgcggtggagaaccggcgcacggtggaagtgctggcccatgaagccatcgccaacttcgctgccgcccgcgagcatttcgtcgccttcatcgaaaccagctggaaccatgccgagctgcaggatgtaccgcgcctgctgggcgatgtgtccggcgcgctgcgcatgctcgacctgggtaccgccgccgattacctgcgtggcgtgcagcagtacatcgaggccgagctgatcggccgccagcgcgtgcccagcggccgccagctggacaccctggccgatgccatggccagcctcgagtactacctggaagccctgcgcgatcgtcgcccgggccgcgaagacatcctcgaaatcacccgcagcagcctcgaggcactgcgctactggccgctgcccgaacgcaacgccgccgcaccggaagcgccggcagcgcttgcgatcgaacgtgagccgctgccggtgcaggtcgagccgctgcagcccgagcgcatcgaggtaccggtgcagcctgctgcgcccgcggccggcgacgtgccggtatcgctgccggacttcaccttcgatccgccgccggccacaccggcaccgagggtgcccgacaacagcctgatgttcggcgcgctgggcagcgcgggcgtcgtggccgccagcccgttggatgctggcgcctcgccgctgccaacacaggatgatgccgaggcatcgctggtcttcgccgcatccagcgcaccagcgcctgatgtcccgcagtgggagctggcgccgttctaccccgaagccgaggcggccgcgcccgccggcgacgaacgcgcgccgacgttcgccagtttcgatcccgtcagcttcgaactggccgacagcgatcacgccgatgcaccgcagtggtcgctgtccgaggcgccgcaggtgctcgaggaaagcgcagcgcctgcgatcgacgagacgacggacagcatggtttcgcccgtgaccggattcgatgctgcgccggtgttcgatccggtagcggccgaacagggcgcggttgccgaggccgacgacgtggtgttccgcttcgacgccgatgcattggacaacgctgacgacgtgctgtcgctgcatgcgatggaaacgttgtcgctggacgatgaccccgggttgcatccgtcgctggagatcgtcgatgccgtggcgccgccgctggccgatgcatcgcctgcggcggaggtcagggtggacgaggctccggatgacctgccggcatcgtcgatcacgccgccgtcgatcgaagcgcccgccccggcagcggaaacgtcggcgccggccgtgtcggtgatcgatatcgacaccatcgcgccgatcgatttcagcgaagccgatgcccagttcttcgccgagctgagtgcagccgctgccggcttcaatccgcaggcgatgcccaccgcgacggcaccggaggcggtcgttgcgaccggcgccgacgccaatgccgacgcgactacgggcttcgacgccggcttcgacgacgacgccgagaacatcgacgaggacatccgcgaggtgttcctggaagagttcgacgacgagctcgccaatctgggcacgctgctgccggcgtggcgcatgcagccggacaacatggaccggctgcgcccgatccgccgcatcttccataccctcaagggcagtggccgcctggttggcgcacgtacgctgggcgagttcgcgtggaagatcgaaggcatgctcaaccgcgtgctggatggcagccgcgccgcctcgccggcggtgctggcgatggtcgacaacgcacatgcggcgctgccacagctgaacgcagcgctgcgccacggccagcgcatcagcgtcgacctgcaggccatgcaggccattgccgatcgtgtcggcgcaggcgaggaaacctactacgtaccgctgccgggtgcggctgcgccggttgtaccggttgctgaagctgacggcgaagacgagatcagccgcattctcgacgcggaggctgccgcctcggcgccggccgataccgacgtggaggccgaagtggccggtacgccggccaacatcgacagcgtgctgcgcgagattctcgaggccgaggtggaagtccaccaggccaccctgcaggactggctgcgttcggcgcagcaggcgccgcaaccggtcagcgatgcactgctgcgcgcggtgcacaccatgaacggcgccttcgcgatgaccgaagtgcccgagatcacggcggtgaccggcggcgcggagtcctacatcaagcgcgcactggccgccgaggtggtcccgggtgatgaaggcgtagccgccctggatgcgactgcgcaggcgatcaccgccaccatggaagcgttgcaggccgaacagccgcgcatcgcgccgcaacaggtactcgcgcagcgcctgcaggcgctggctggcgcgttgccggaagcgcgctggccgatggtgggcctggaagacgaagaagacgatctggcgctggatgacgaaccgccggtggaactggacgcggatgcatcgacagccgtcgcgcttgaatccgatgcggtgccgcattcgtttgccgcaccggagcaggacgcggaagcacgtgccgatactgccgaagccccggtcgccgacgtggcgatcgaggccgggctggaggtcggtgagctgacggccagcgatgatctttcgcgctacttcgatgccggatggccgtccgtaccgggtgaggaggatgcgtcgctgccggtggtcgaatcgatccaggtggccgacgacgttccagccgttgccgtagccggtgtcgaggcggaggccgaaggcgtgctgcggttgtccgacgatgccggtttgaccgtcgtggatgatctgtcgccgtacctggatgccagtgcgctgccggttgacgaccgcgacgccgaagagactccggccgctgtcgaagccgtcgcatctgacctgaatgcgccctcggccgatcacgcgcacgtcgctgatgccacggcgttcgaaatgcctgctgcactgccactcgacagcgagctgtcgagcctgcaggatgaaatggctgcgccggggtttgcagaaccggtctcgctggaagccgcgctcgaggccggcctgcacgtgatcgacgaagagcagcccctggccgacgacgggcaatggcccgtgctcggcctgcaggccagcgaactcgcgccgggcgaggcggaagcctttgccgaggatgcggacgtcggcggggaggcggcgatcggtgaaggagagagcgccgatcagccgtccccggcgacggtgaatgaggagatcgcggaggccgcagcgcaggccaccgccgaaccggttcgcttcttcgaactggaagacgcgccgggccaggcggaggtccacgccgaagctgccgatgtcgatgcggttgcggtatcggatgccgtggcagccagcgcgcccgaagccgacgtgcttgaagccgtgacacctgacatccttgccatgccggtgccggaagacagcaccgatacgctcgacttcagcgtctacgatcgcgagctggtcgacatcttcgtcgaggaaggcaaggacctgctcgaccactgcgatggcctgatcagcgagctgcgtgatgcaccgcaggaccgcgaggtgctggccggcctgcagcgtgacctgcacaccctgaagggtggcgcacgcatggccggcatcaacgccatcggtgatctcggccacagcatcgaatcgttgctggaggcggtcgccgccggtcgcaccgagatcgaacgccgcgatgtgcagttgctggagcgcggattcgatcgcctgcaccagctgctgacccgcaccggtaaccaccgcgtggtggaaccggcgcaggagctggtcgatgcgttcgaagtgcgtaccaccaccgatattgccgcagcagcagcggctgccgcaggcgcagcggacgtggcgagcgttgcagaaaccgcgtcggcaacggtcgccggcccggcgccggcgctgctcgatgcgccgttgtcggcaccgctgccggccgaaggcgtgatcgatgaagatccgctggcgcgcccgcagcaggaacaggtgcgcgtgcgcgcggatctgctcgaccgcctggtcaaccatgccggtgaagtggcgatctaccgctcgcgcctggaacagcagcttggtgccttccgcggcgcgatgggcgagctggagcgcaccaatgcgcgactgcgcgaccagctgcgccggctcgacctggaaaccgaggcgcagatcgtcgcccgctaccagcgtgagcaggaccaggccgatcagaagttcgatccgctggaactggaccgcttctccacgctgcagcagctcagccgtgcactgaacgagtcggcggccgatctcgggggcctgcagggcgtgctcgacgatctgtcacgccagtacgattcgttgctgcaacagcagtcgcgcgtcagctccgagctgcaggatggcctgatgcgcgcgcgcatggtgccgttcgatggcctggtgccgcgcctgcgccgcgtggtccgccagtccggaatggataccggcaagcaggtgcacctgaccctggagggtacccacggcgaactggaccgcaatgtcctcgatcgcatggtcgcgccgctcgaacacatgctgcgcaactccgtggcccacggcctggaggcgccggaacagcgtcgcgccgccggcaagccggaggagggcgaagtcgccatccgcctgcaccgtgaaggctcggaaatcgtgctggaagtggccgatgacggtgctggcctggaccgcgaagcgatccgccgccgcgccatcgatcgtggcctgttggccgccgatgcgcagcccagcgagcaggaactggacaacctgatcttcgcctccggtttctccaccgccgaccaggtcagccagctggcgggtcgtggcgtgggcatggacgtggtgcgcaacgaagtgcgccagctcggcggctcggtcgacatccagtcggtgcgtggccagggcgtgcgcttcaccttgcgcctgccgcagacgctggccgtcacccaggcggtgttcgtgcagatcggtgaaaccaccttcgccgtgccggtggcctcggtcagtggtatcggccgcctgtcacgcgaacgcttcgaggccgccgacagcagctaccgctacagcggcgaagactatccgctgtatgacctcggcagcctggtcgggcaggccccggcacgcgccgatggccaggaccaggtgccgctgctgctggtgcgtgccggtgacctgcgcgctgccgtggcgatcgaccaggtgctgggcaaccgcgaaatcgtggtcaagccggtcggcctgcagatcgcatcggtaccgggcatctacggtgccaccatcaccggcgatggccgcgtggtggtgatcctggacgtcgcgccgctggtgcgccgtttcctcgccaatccgaccgcaccggtgctggccaatgcaccgcgcgacgaacgccaggtgccgctggtgatggtggtcgatgactcgctgaccatgcgcaaagtgaccggacgcatcctggaacgccacaacttcgaagtcagtgttgcccgtgacggcgtggaagcactggagcggctggaagagcgcgtgccggacctgatgctgctggatatcgagatgccgcgcatggacggctacgagctggccacggcgatgcgcgccgacccgcgctacaaggatgtgccgatcgtgatgatcacctcgcgcagcggcgacaagcaccgccagcgcgccttcgagatcggtgtccagcgttatctgggcaagccgtaccaggaactggacctgatgcgtaacgtgtacgacctgctggggatcgcccgtgtccgtgagtga

SEQ ID NO: 496465 - DNA, 1338 bp, Stenotrophomonas maltophilia
gtgtccgtgagtgaaacccatccggccccggccgtcgccctgctggcccgccccggtgcggcgcgcgaacgcctgcgcgaggcgctgtcgcacgcagatgtgcagctggtcctggaagatgacccgaacggcctggagccacaggtcctgcaggctgcggatccgcagttcgtggtgatcgcgctggaaacggccatcgaggacgcactggaacggctggacgccgtgctctcggcaccggggctgaccctggtgttcgatgaggccgagctggccgcgcgccgcgacggctgggaggcgcagcgttgggggcgccatctggccgccaagctgcacggccaccagcaggtgttgccgccgggtgccgaggaagagcccagcctgcagctggagcccggccatccggcgcccgcgccggcaccgcaggaagaagccctgcagccgcatctggcgcaggcgctgagctgggccgatgacgttccggccgacggtctgtactcgccgccggcacacctgcacgaaccgatcgcgctggagcaggccctggcggcactgcagccggacgtgcccgaaccacgggatccgccttcgccgccgcaagcgccggccgaaccggcggcgcctgcggcaccgccgatctccttcgatcacaccgcctggtcgctggtcgaagaatcgatcgaagcgccggcaccggcagaagtggcggcgccggccgccgcgccgcagccctccttcgataccgatcatttgaccctggtcgatctggatgccgccgccccggccggtgcgcgcgccgcatcactgctggtgctggccggcatcggtggcccggatgcgttgcgtcgcctgctcggcgcactgcccgcgtcgttgagcgtgccggtcctggtgcacatgcgcctggacggtggccgctacggcaacctggtcaagcagatgtcgcgtgtttcgccgttgccggtgcagctggccgaggccggccagcgcgccgcgccgggcgaggtccacgtgctggctgatgatatcggcgtgcgcgcggccagcgatggcctgcatttccagagcgatgccaccggtatttcgctcgctgcattgccggccgaacacaccgcgctggtgctgctcagcggtgccgacctggcccatgtcggcccggcgctggacctggcggccgccggtgcgtgggtggccgggcaggtaggcgagggctgctacgacccggctgcggccaccgccgtggttgctgccggcatggtggccggtgaaccgcaggagctggcgcaggcaattgccgcgcgctggggtgagcaggacgacaacggagaggcaccatga

SEQ ID NO: 496466 - DNA, 465 bp, Stenotrophomonas maltophilia
atgagctacgccagcaacgacgaaatccgcggcgtcctgatccaggccggcaacgagcgcgtactgctgcccaatgccaccgtggccgaaatgatgtcgcgcgtaccggtgcagccggtctccgatgcgccgcgctggctggttggcgagatcggctggcacggctggcaggtgccgctggtgtcgttcgcacgcctttccgggctgggcgaagagacggtggccggccacaacaaggtggtggtgctgaagtccctcagcggcaacgcgcagcgcccgtactacgcgctgctgacgcagaacttcccgcagctgatctcggtgccgcgcgacggcctgctggccgacgcctccgaagaaaccctgccgcagatcgtgcacatgcgcgtgctgctgggtgaacagagtgcgctgctgccgaacctggatgcactggaagcggcgctggattcgctggcggcctga

SEQ ID NO: 496467 - DNA, 738 bp, Stenotrophomonas maltophilia
atgcgcgtgacccgctgccccatcgacctggcgctgcacagcggccagaccgtgaccctgccggaagacaccgccaaccacctggtgcgggtgatgcgcctgcgcgaaggcgatacctgcgtgctgttcaacggcgatggccacgactacagcgcgacgctgaccgtgaccggcaagcgcgaggtgcaggtccgcatcgacgccgtgcaggccatcgacaacgaatccccgctggcgatcaccctgctgcagggcatcgcccgtggcgagaagatggacctgatcctgcagaaggccaccgagctgggcgtggtcgcgatcattccggtcaacgccgagcgcaccgaggtgaagctggacgcggcacgggcggaaaagcgcgtggcgcactggaacaacgtggtgacctcggcctgcggccagtccgggcgcgcgcgcattccgccggtaggttcgccgctgtcgctggcgcaggctgcggcggcgctgccagccgattcgctgcggctgaccctggatccgcagggagcacatcgcctgtcgacgctggaagccgctcccgctggcggcatcgtgattgcaatcggcccggaaggcggctggtcgccacgcgaccgcgatcaactggccgcagcaggattccaggggctgcaactggggccgcggatcctgcgcacggaaacggccggactggccgcgatcgcggcgttgcaggcgcgcttgggcgatctggggtaa

SEQ ID NO: 496468 - DNA, 1392 bp, Stenotrophomonas maltophilia
atgctagcagacccaaccccctccccgctggcccgccactggcggcagcgcgacctgcaggtgctgtggcacccgtgcacgcagatgcgtgagcatccggacaccctgccgctggtaccgattgcccgtggcgaaggcgcatggctgatcgaccacgacggcaaccgctatctggacgcggtcagcagctggtggaccaatctgttcggtcatgccgaaccgcgcatcgggggtgccatcgctgcccaggccgggcagctggaacaggtgatgctcgccggtttcggccacgagccggcgatcaccctggccgaacgcctgctggcactggcgccacgccaggccggccgcgaaccgctggccaaggtgttctacgccgacaacggatccgccggcgtggaagtggcgctgaagatggccttccagtacttccagaaccgcggagagccccggcgcacgcgcttcatcgcgctcgagaacggctaccacggcgaaaccctgggcgcgctggcgctgggtgacattccgctgtaccgccgcgtctatgcgccgctgctggccgagggcctgttcgcgccgtcgcccgatgcctacctggccgaaccgggccagagcgcggccgatcgcgcacggcaggcggccgatggcctggccacgctgttcgaccagcacccgggcgaggtctgcgcggtgatcctggaaccgcgcctgcagtgtgccggcggcatgcgcatgcatgacccggtctacctgcagcgcgtgcgcgaactgtgcgatgcccatggcgcgttcatgatcgccgacgagatcgccaccggcttcggccgcaccggcaccctgttcgcctgcgagcaggccggggtgatgccggacctgatgtgcctgtccaagggcctgaccggcggcttcctgccactggccgccgtactggcgacgcaggcgctgtatgacgccttcctcgacgactcgcgcgagcgcgccttcctgcattcgcacagttacaccggcaacccgctggcctgcgccgcggcgctggcgacgctggacatcttccgcgacgacgatgtgatcgcgcgcaaccggggcatcgcctcggtgatgggcacgctggcggcaccgtttgccgaccacccgcacgtggccgacgtgcgccaggccggcatggtggtggcgttcgagctgtcgcgcgacggcaacaagcgcacgccgttcgacccgggcctgcggctgggcctgcaggcctacaaggccgccctcaagcgcggcgtggtgctgcgcccgctgggcgacgtgctgtactggatgccaccctactgcgtggacgacgaacaactggagctgctggcgcacaccacgctggcggccatcgacgaggcgattgcatgcgcgtga

SEQ ID NO: 496469 - DNA, 564 bp, Stenotrophomonas maltophilia
atgaacgatgaccgtgccggccgtcgcttgccgatcatccatcggatcaccgatgaggagaacggccccttccagcgccagcacctggacctggagttctccaacggcgaacgccgccgcttcgagcgcctggtcagccgtgggcacggtgcggtggtggtggtgccgatgctcgacgacgaaaccgtgctgctggtacgtgaatacgccgctggcatgcaccgttacgaactggggctggtgaagggccggatcgatgccggcgagacgcccgagcaggcggccgaccgcgaactgaaggaagaggccggttatggtgcgcgccgggtcgacgtgctgcgcgcgatgaccctggccccgacctacatgagccaccagtcgtggctggtggtggcgcgcgacctgtacccggaaaaactggccggcgacgagccggaggagctggaagtggtgccgtggaagctggccgaactggaccagctgatgctgcgcgaggacttctcagagggacgctcgctggcggcgctgttcattgcccgccagtggctgcagggaacgcgatga

SEQ ID NO: 496470 - DNA, 804 bp, Stenotrophomonas maltophilia
atgatcaagctgacgacggacctgcgcgagaccgccatcgccatcgcccaggaagccggacaggccatcatgcaggtgtatgccgatggcttcgacgtgcagaccaaggacgacaacagcccggtcaccgcagctgacctggccgccaaccaggtcattgaactgggcctgcgccagctgaccccggacctgccgatcctgtccgaggaatcggcgcaggtgggctgggagcagcgccgccactggggcgcctactggctggtggacccgctcgacggcacccgcgagttcgtcaagcgcaacggtgagttcagcgtcaacattgccttgatctaccagggcgcaccggcattcggcgtggtgctggcgccggtcaccggcattgtctggcatgccatgcgcggggaactggcctatcggcggcagggtctgcacgacaccgtgctgcgcacccgcacgccggccactgctccgctgcgcgtcgccgccagccgatcgcaccgttcgccggaaaccgaggcgctgctggcgcgcatgggccgcatcgagaccatcgcgcagggatcgtcgctgaaattctgccggatcgccgaaggcggcctggatgtctatccgcggctcggcccgacctctgaatgggataccgccgccggccagtgcgtgctgcatgcggcgggtggcgcggtgctgtcggccgcgaccggcaagccgttccgctacaaccgccgcgaaacgctgttgaacggcgatttcattgcccttggtgataccagcctgccgtggcgcgactggttgtccgactga

SEQ ID NO: 496471 - DNA, 840 bp, Stenotrophomonas maltophilia
atgagcgcgcacgacacccctgccaccggcagcgaggcaagccatcaactggaacgcctgctggtcatcatggcgcgcctgcgcgacccgcagggaggttgcccatgggacctggagcaggacttctcgaccattgccccgtacaccatcgaggaagcctacgaggtggccgatgcgatcgaccgcggcgacctcgacgatctctgcgacgagctcggcgacctgctgctgcaggtggtgttccacgcacgcatggccgaggagcagggggcatttgccttcgccgatgtcgcacgtgcgatcagcgacaagatgcagcgccgtcacccgcatgtgtttgccgatgtcagcgtcgacgatgccgacggagtgatgcgcaactgggacgcgatcaagcgcgccgagcgtgccgccaagggcgagcaggacacctccgcactggccggtatctcgcgtggcctgccggaatggcagcgcgccgtgaagctccagtcgcgcgcggccagggtcggtttcgactggccgggcccgctgcctgtgctggacaaggcggccgaggagctgcaggagctgcgagaggaattcgagcgcggcgatatcgcgggcaacaaggcgcgcctgcaggaagaactgggcgacctgctgttcgtctgcgccaacctggcccggcacgccgatatcgatctgggcgccgcactgcgcggggccaaccacaagttcgagcggcgcttccgcgcgatggaagcgcaggccgaggcgcagggggaggcgttggcggcactggacctggatgcgcaggaagcgctgtggcagcacgccaaggcagcagaaaaagcgtga

SEQ ID NO: 496472 - DNA, 330 bp, Stenotrophomonas maltophilia
gtgaagacgcttggcctgttcctgctgaccgcgctggccgagatcgtcggctgttacctgccatggttgtggctgcgcaagggaggcagcgtctggttgctgctgccggccgcggccagcctggccctgttcgcctggctgctgactctgcacccgactgccagtggacgggtctatgccgcctacggtggcgtgtacatcggcaccgcgctgttctggttgtggctggtcgacggcatccgccccagccgctgggacctgttcggtgcagccctgtgcctggccggcatggcggtgatcatgttcggtccgcgcacgcccccggtgtag

SEQ ID NO: 496473 - DNA, 303 bp, Stenotrophomonas maltophilia
atgtcccgcttcgccagcttccgcgagttctatccgttctatctcagcgagcaccgccacccggtctcgcggcgcctgcatttcatcggcagctgcggggtgctgctgctggctgcggctgccgtgttgcgcggccagccgacgctcctgctggccgcgctgttctgcggttatggattcgcctgggtcggccacttcttcttcgagaagaatcgcccggccaccttccggcatccgctgtattcattcatgggtgactgggtgatgttcgtcgacatcctgcgtgggcgggtgcgcctgtaa

SEQ ID NO: 496474 - DNA, 1113 bp, Stenotrophomonas maltophilia
atgacccagaagacgctgctcaacgatacccaccgcgcccttggcgccaagatggtcgatttcgggggttgggacatgcccatccactacggctcgcagctggacgaacaccacctggtgcgtcgcgaagccggcgtgttcgacgtcagtcacatgaccgtggtcgacctgcgcggtgaccaggtcaagccgttcctgcgccgcctgctggccaattcgatcgacaaactgaaggtgaccggcaaggccctgtactcgtgcatgctgaatccgcgcggcggcgtcatcgacgacctgatcgtctactacctgggcgacgatttcttccgcatggtggtcaatgcctccacccgcgaaaaggacctggcctggctgcgtgagcaggcggcaccgttcggtgtttccgtcgagcagcgcccggacctggccatcctcgccgtgcagggcccgcaggcgcgcgacatcgtgatcggcctggcccgcgaagccgaccgtgcagcactgaccaagctgggccgcttcgccgccctgcaggcgcagtccgacgacggcgtcgagttgtttgtcgcccgcaccggctacaccggtgaagacggtttcgagatcctgctgccgcaggatgccgtggtcgccttctggaaccgcctgctggcggcaggcgtgaagccggccggcctcggtgcgcgcgacaccctgcgcctggaggccggcatgaacctgtacggccaggacatggacgaagagatcagcccgtatgaagcggcactggcctggaccgtgtcgctggacgaaggccgcgacttcatcggccgcgacgtgctggaggcgcagaaggccgccggcaccgcgcgccagatgatcggcctggtgatggacgagaagggcgtgctgcgccacggccaggcggtgaccaccgctggcggccagggcgagatcctgtccggcaccttctcgccgaccctggccaagggcatcgccttcgcccgcgtgccggccggtgaactcggcgaggtcaccgtcgacatccgcggccggcaggtgccggtgcgcgtggtcaagttcccgttcgtgcgcgaaggccaggcccagcccggcgtgctcgccgacgcctga

SEQ ID NO: 496475 - DNA, 396 bp, Stenotrophomonas maltophilia
atgagcgagatccccggcgacctcaagttcctcaagtcccatgagtgggcccgtgtcgaaggcaatggccgcgtcaccgtcggtatttccgaccacgcccagggcctgctgggtgacctggtctacgtcgaactgccggaagtcggcgccgacgccaaggccggcgaacagatcgccgtcgtcgagtcggtgaaggccgcctcggacgtctacagcccgatcagcggcaaggtcgtcgaggtcaactcggccctgtccgacaagccggaaaccatcaacgaagatgcctacggcgaaggctggatgttcgtgatcgaactgaccaacgccgaagaggtcaacgagctgctggacccggacgcgtacgccgaagccctggagaacgacgaccactga

SEQ ID NO: 496476 - DNA, 723 bp, Stenotrophomonas maltophilia
atgcccgcctcgatcggcggagcgggcatcggaacgggagttgccttgcatttctccgggggaagcggggccatgtccaccgtcatcagggtcgcggtggtcttgaaggggctgcttcgcatcggacgattgattctgcgcactcggttgggcaggcaaggtctgctgaggcgaaacctaatcacggttttttttactgtcaacaacccccgcgaaaaattttcacatccgcgccttcccgggcgccgccggcgccaccactctgcacggcctgcaacgacggtggaagcggcgcgcacgcacgttgcctgcatcgatgccaatgcaggcgttgatcaaaaaacacttgaaataagcactccgcgtagacgggcgcaggcaaggcacaacggcgtacgcgcatcgtcggtggtcaccggcaccgccgccaacgccagcacaacggcgccgcaacgggggccgaaaagttttcacattcgaacgcttcggcgcggggctgaaacgcggatttgcgcaaaactgcgcacgcccatcggcaccgttcgcctgtcggctgatgccacgccgagggtgcacagcgaaccccgcgtcatgagtccgacgcggtcgccaaaacaaaaacggccacccgaaggtggccgttccagaatccggaaacgacgactcagtggtcgtcgttctccagggcttcggcgtacgcgtccgggtccagcagctcgttga

SEQ ID NO: 496477 - DNA, 507 bp, Stenotrophomonas maltophilia
atggcaaccaagaaagctgcgaagaagaagcccgccgccaagaaagcggtgaagaaggtcgcgaagaaggccgctgccaagaaggcagtgaagaaggtcgcgaagaaggcaaccgccaagaaggcagtgaagaaggctgcgaagaaggtcgccaagaagaccactgcgaagaaggcagtgaagaaggcggcgaagaaggtagccaagaagtccgctgccaagaaggtagccaagaaggccaccaagaaggtagccaagaaggccaccaagaagactgccaagaaggccgcggcgcgcaagccggccaagaaggtcgcgaagaaggccactgccaagaaggccgtcaagaagaccgccaagaaggcagtgaagaagaccgcgaagaaggccaccaagaaggctgccccgaagaaggcagcgaagaaggttgccaagcgcaagccggccgcccgcaagaagaaggccgctccggtcgctctgccggcaaccccggcgccgctgatctaa

SEQ ID NO: 496478 - DNA, 894 bp, Stenotrophomonas maltophilia
atgaacctgctggagagcatgcaggtctacgtgctgatcgtggacaagggcagcctcagtgcggcagccgcggcgatggatatctcggcaacgatggccggcaagcacctgcgcgcattggaagcccggctgggcatgcagctgttgagccgtaccacccggcgccagcacatgacaccgttcggcgaggactactacgcgcgctgcaaggagatcctgcgcctggtggaggaaaccgacgcgcaggcgcagcaccagcagctctcaccggcgggcacgctgcgcatcagcgcaccggtgatcttcggtacacacgcgctggtaccggcgctggccgagtacatggcccgtcatccggatgtccgggtcgaagccacgctgaccgatcgtgtggtcgacctggccgaagagggcttcgaggcggcactgcgcatcggcacgctggccgacagcagcgtgctggtggcacgagcactggccccctatcgcttgatgatgtgcgcctcgccggcgtatctggccaggcatggcacgccacgcagcgtgcacgcacttgccggccatcaatgcctgtcgttcgaaccgagtgcgcttgcgcagtggctgcaggacgacgctggcgagctcgaccacgtgcccgacggccgactgcagatcaacaatggcgaagcgctgcgttcggcggcgctgcatggccttggcatcgtcctgcaatcgacgctgctgctggccgccgatgtcgaggcggggcgtctggtgcagctgttcccggaatacggtcaggccggtcggccgatgcacgtggtctatgcgcacgaccgttaccactccacccgcctgcgcagcttcctcgacttcctgatggagcgctttccagcggcgccgcacggctag

SEQ ID NO: 496479 - DNA, 759 bp, Stenotrophomonas maltophilia
atggacttgaaccttgctggccgtaccgcgttggtgacgggcgcggccagcggcatcggtgccgccgtcgccaggcagctggcggcccagggcgtgcgcgttgccatcacgtcgcggcagcgggcaccgctgcaggcgctggcggcgcggatcgaagccgaaggcggcgccgcaccggtcatcgtggccggcgatgtcacagttgccggcgacctccggtacatcgcggacgcatcccgtgaggcattgcagcgtgtcgacatcctggtcaatgccgcaggcggttcccggccgaccacggtcgatgccgatgacgatatctgggaggaagcgatcgccctgaacttctccgccgcacgacggctgacccaggcgctgttgcccggcatgcaggcgcaggcatggggacgggtgatcaacttcagcggttcgatggaaccgcgcgcggtgaacgcggccaccgcggcgaaggcggcattgcacctgtggagcaagggcctgtcgtcggaggtggcggggcagggcatcacggtgaacgcgattgcaccggggcgcatcaacagcgcgcagatcctggaccgcctgcaccccaccgaggaaagcagacgcgcgttcattgcccgcaacatcccgatcggacgctttggtgaaccggaggaagtggcgccgctggtggcgttcctggcctcgccgctggcgggttacatcaccggtgcggtgattccagtggacggcggcatgcactacttcgcgcactag

SEQ ID NO: 496480 - DNA, 1401 bp, Stenotrophomonas maltophilia
atgaaaaagaacagcctgcgtcgtccgatccgttcggcggccaccggtttgctgggcatgttgatgcccgttgccttgtccaccaccgcgcagacaccgccgccgttgccgccgatgccgaccaacatcgaatccgcgacggctgccaccgtcgcccacacccagcctgcggcctaccgcaccggtctggtgccgcgcgtccaggcgccggcggctggcttcaacgtcgccaacatcgaatcgatggcgcagcagctgacctatggcgagcgcgtgccaggcatggcggtggcgatcgtgcagggcggccgcattctcagcgcgcgtggctatggcgtcaccgacgtcaacaacccgctgccggtcgatgcgcacaccgtgttccgcctggcctcgctgtccaaggccttcgccggcaccatggccggcctgctggtcaacgacggcacgctgcgctgggacagcaaggtcaccgactacgtgccgggcttccgcctcaattcgcccgaagccaccgaccgcctgaccgtggccgacgtgctcagccatcgcgtcggcctgccgtacaacgcctacgaccgcgacatcgaaggcaacgccgagtactacgcgctgacccagaagctggccaacaccagcctgaaatgcctgccgggcgactgctacgcctaccagaatgtggccttcagcctgatcggcgacgttgtctatgcggcctcgggcagcttctacgagcagtcggtcgagcgccgcatcttcaagccgctgggcatgaatgatgccagcctcggtctggccggcatccaggccagctcgcgctgggcgcgtccgcacgtgcgcagccgcaacggctgggtctcgctgacgcccaagcccacctattaccgcgtcgctccggcggctggcgtcaacgccagcgccagcgacatggcgcagtggctgctggcccacaccggccatcgccccgacgtgctgccggcaccgctgctggccaccctgcattcaagcctgatcaacacgccgggcgagatgcgttcgggctggcgccgtgagcgcctgcactcggcgggctacgcattgggttggcgtaccttcgactacgccggccacgacgtggtgttccatgcaggtgccgtgcagggctatcgcggcctggtcgcactggtgccggaacgtgacctcggcatcgccatcctctggaatggcgaaagcggcctgcccagcggcctgctgccgaccgtgctcgactcggcgctcggcctgccggcgcagcgctggctggacgtggacaccgacttcggcagcgacaacctgatggccgagggcgcaagcccggcgcagcaggacaagcgcaagggcaagggcgcctcgggcaaccgcgcggtggcttcgccgcgctga

SEQ ID NO: 496481 - DNA, 1329 bp, Stenotrophomonas maltophilia
atgagcgctgcatcgggcaaggggccgctgcagggcctggcggcggcgctgcgcgagtcgccggcgctgtggtggtcgttcctgtacttcttctgcctgctcagcggctactacgtgctgcgcccggtgcgtgaggccatggccgcctcggcggacctggaaacggtgttcccgcccgtgctgatcacctggttcgccagccatggcatcgcgttgaaggacttcgtcctgcagttcctgttctcctgcgtgttcgtgatcatgctggtgctgcagccggtgtacggctggctggtcagccgcttcccgcggcgtgtgttccttcccatggtgtacggcttcttcatcgtcaccctgctggggttctacgcactgttcgacagtcacgtgccagggcggggcatggcctttttcctctgggtgatggtcttcaacctgttcgcggtggcggtgttctggagcttcatggccgacgtgttctccaacgcacaggcgcgtgcctactacggctacatcggtgcggccggcaccgttggcgcgttcctcggcccgttgatcaccagcgcgctggcgcagcgcgtgggcatcgccaacctgatgctggtctcggcagcattcctggtcgtgtgcctgttgtgcatctggcggctgcggcattgggcggtgctgcgcgaacgcgagcagcaactggtgtccggcgagcaaccgatgggcggcagcgtgctggacggcctgaaactgatcgtgcgcgagccgctgctgcgctggttggcggtgatggtggtgttcggcgtgggcgtcggcacgctgctgtacaaccagcaggccagcatcgtgcgcgcggcgtttaccgacccggcggccagtaccgcgttcttctcgcgcatcgacctggcggtgaacgcgctggcgctgctgatgcaggtgggcctgacccgctggctgctgtcgcgccacggcatcgcgccggcgctgctgattcccggtttcgcgatcctgatcggcttctcggtgctggcagcctcgccgatgccgttgatggtcgcggtggtgcaggtgatgacccgcgccagcgaattcgcactggccaagccggcgcgcgagaccatctacacgcgcgtggaccggcagtggcgctacaaggccggcgcggcgatcgacaccgtggtgtaccgcggcgcggacctggggttcacctggatccacaaggcactgaccctgttcggttcgcacgtggtgttcatcggcggcgtgctggtggccggcttcatgaccctggctgcattcggcgtgctgcgcgaagaaaagaagctgccgcgcgaccgttga

SEQ ID NO: 496482 - DNA, 849 bp, Stenotrophomonas maltophilia
atgtactggatcgcactcgccctgaccttgctggtcgcactgctgcacatctatttcctggtcctggagatgttcctgtggacccgcccgctgggcctgaagaccttccgcaacacgccggagaaggccggggccacgcgcgtgctggcggccaaccagggcctgtacaacggcttcctggcggcaggcatcgtggtggggctggtgatcgatcagccggtgctggtgacgttctcgctggcctgcgtggtggtggcggggtgctacggcgcgtacagcgtgagccgccgtattttcatgatccaggcggtgccggcgatcctggcgttggtgttcgcgcgctggcgtagtttccagccaacggcgcagcccctcgtgggttggtcgcgtggagcgggtcatgtgttgggtgtggcgggtgggccgtgcaggggacgctgcaagtacgtccatgtaagctcgatggcgccatccatggcgccaacgcccctgaacggcccacacgccacacccctgacagtttcagggcgcggccagcccacggagaagaaaaagaagttcaagagcaacagcaacagcaacagcaaaaagcggccggtgggccgcttttgcttttgcttctgcccttcttttttctcttgcgtgggtggacgccgcagagatgcgtccgaggctgggggcggtgggttcgcggccaagcccccagggatgggttcacggcgtcccccgcgaacccaccgtccccagcctaaccagggctttccgcgatcaaccgtccacccacgaggggctgcgccgttcgcgggacctacttcgccggcgacaaccacatgtcgatcaccgcgctga

SEQ ID NO: 496483 - DNA, 468 bp, Stenotrophomonas maltophilia
atgtccacgcccctgctctcgctttaccaccggctgcagcgctggcccgccggcacctggctgttctcgcgcgcggtgtgcttcaaggcgccctacttcgccagcatcgcgccacgcatcacccgcctggaacacggccgctgcgaaggcacggtggccgaccgccgcagggtgcgcaaccacatcggcacggtgcacgcgatcgcgatgtgcaacctggccgaactgaccgccgggttgatggtcgatgcatcgctgccgaagggcatgcgctggatcccgaaggggatgcaggtgcagtacctggccaaggcacgtggcacgctgcaggcggtggcgttgccggcacagccgattgtcgtcgcggccgagggctatgcgctgccggtgacggtgagcgtgcgcgaccgtgcgggcacggaggtgttcagcgcggtgatcgacatgtggttgtcgccggcgaagtag

SEQ ID NO: 496484 - DNA, 2478 bp, Stenotrophomonas maltophilia
atgagcatcgttcttcccttcctcgccctgctgctggcaggcgcgttcgtcgcctaccaccgcatgcggctggttacctggacgctgatcagcgtggccctgctggctgcctgctggttcattccctacgtcaaccagaccgccacgatcgtcgcggccgccgtgttggccgtcatcgccgtgccgctgctgctgccgttcatccgcaagccgctgctgaccggcccgatgatgaaggtgttccgcaaggtgctgccgccgctgtcgcagaccgagcgcatcgcactggaaaccggttcggtcggtttcgagggcgaactgttcaccggtgatccggactggaacatcctgctcaactatcccaagccgcagctgaccgccgaggaacaggccttcctcgatggcccggtggaagagctgtgcgcgatggtcaacgactgggaaatcacccacgtccatgcggacctgccgccggaactgtgggccttcatcaagaagaacaagttcttcggcatgatcatcccgaaggaatatggcggcctgggcttctccgcactggcccaccacaaggtgatccagaagctggcgtcggtgtcttcggtggtcagctccaccgtcggcgtgcccaactcgctgggcccgggtgaactgctggtgcattacggcacccaggaacagaaggaccagtacctgccgcgcctggccgatggccgcgaagtgccctgcttcggcctgaccggtccgttcgccggctccgacgccacctcgatcccggactacggcatcgtctgcaagggcgagtggaacggcgagcaggtgctcggcgtcaagctcaccttcgacaagcgctacatcaccctggccccggtcgcttcgctgatcggcctggcgttccgcatgtacgacccggatggcctgatcggcgatacccgcgacatcggcatcaccctgggcctgctgccgcgcgacaccgccggcgttgaaatcggccgtcgccacttcccgctgaactcgacgttccagaacggccccatccgcggcaaggacgtgttcattccgctgacccagctgatcggtggcgcggccatggccggcaagggctggaacatgctcaacgagtgcctggccgtgggccgctcgatcaccctgccgtccaccgccagtggtggtgccaaggccggtgccgcggtgaccggcgcctatgcgcgcatccgcaagcagttcggcctgtcggtcggccgcttcgagggcgtggaagaagcgctggcccgcatcggcggcaaggcgtacaagatcagtgcgctgtcgcaggccaccgccgccgcggttgaccgtggcgacgtgccgtcggtgccgtcggcgatcgccaagtaccactgcaccaccatgagtcgcgaagtgatctcggacatgatggacgtgatcggcggcaagggcatcatcctggggccgcgcaacttcgctggccgcagctggcaggccgcgccgatcgcgatcaccgtggaaggcgccaacatcatgacccgcagcctgctgatcttcggccagggtgcgatcctctgccacccgtgggtgctgaaggaaatgaaggccgcgcaggatccggatacccgcgccggcctgcaggacttcgaccgcagcctgttcggccacatccgcttcggcatctccaatgccgtgcgttcgttctggttcggcctgaccggcgcgcgcttcggtgccgccccgggcgacgcctatacccgccgctacttccgcaagctggaccgctactcggccaacctggcgctgatggccgacatctcgatgatgaccctcggcggcaagctgaagttcaaggaatcgctgtccggccgcctgggcgatgtgctgagccacgtctacatgaccagtgccatgctcaagcgctaccacgacgaaggcgcaccgcaggccgaccagccgctgctggcctgggccttccatgacagcgtgcacaagatcgaagagtcgctgtcggccgcactgcgcaacttcccgatccgtccgatcggctggctgatgtgggcactgatcttcccgctgggccgtcgtgccgaggctccgggcgatcgcctgagccgtcgtgtcgccgccctgctgatggcgccgaatgaagcccgcgaccgtctggccagtggcgtgttcctgaccccgtgcgagaacaacccgggcggccgtatcaacagctacctgagcaaggcgatcatggccgagccggtggagcgcaagttcctgaaggcgctgaagagcaagggcatcgaggcgctggacttcaaggcgcagctggacgaagccgtggccgagggcgtgatcacccaggatgagcgcagcctgctggaagagctgcgcacgctgaccctggacaccatcaccgtggacgacttcgacacccacgaactgcgcgcggccagctactacgaccgccagcacaaggacccgcattcgcaggcagcctga

SEQ ID NO: 496485 - DNA, 918 bp, Stenotrophomonas maltophilia
atggttacgtccccacctcccgctgcgttccatgacctgcgcctggacgccgcccatggcgcccgcctggccgccaccgccagcgaccatggccggcgcggccgggtgctgttcgcgcatggcttcggccagacccgccacgcctggaatgccactgcccgcgcactgaatgccgccggcctgcagacgctggcctacgacgcccgcggccacggcgattcggactggaatgccgccaacctgccctatcacggcgaacagttcgccgatgacctgatcgtgctggccggcgagcagccgcgcccgccggtactggttgccgcatcgatgggcgggctgttcggcctgctggccgagtcgcgctggcccggcctgttctcggcgatggtgctggtcgacatcaccccgcgctgggataccgccggcgtcgagcgcatcctcgccttcatgaccgcccatcccgacggcttcgcttcgctggcccaggccgccgacgtgatctcggcgtacatgccgcaccgtccgcgcaaatccgagcagtcgctgcgtgcgctgctgcgcgaggacggccgcggccgctggcgctggcactgggatccgcgcctggtggccgaactggcccgcgacagcgaacagcaccaggacgcactggccgaggccgcgcgccaggtgaagtgcccgctgctgctggtcagcggcggacgcagcgacctggtcacgccgcagaccgtggccgagttcctggcgttggcgccgcatgcgcgccatgtgcagctgccgcaggccacccatatggtcgccggcgatgacaacgacgcctttaccgctactgtgttggactatctggacgtgttgcccgcagcggacgctgcggcttcgtccgccacaaacgagcacgtcaccggagcacgctcatga

SEQ ID NO: 496486 - DNA, 603 bp, Stenotrophomonas maltophilia
atgaatcaacctgacgcttccgccggcgaaccgcgcgccggccgcaacagccgcctgagtgccgaagactgggcccaggcggccctcgatctgattgctgaacaaggtgtcggcgccgtcgcggtggagccgctggcacggcggctcggcgtcaccaagggcagtttctactggcatttcccttcgcgcgatgcattgctgcaagcggcgctggagcgctgggaactgttcgaacaggaacaggtgttcggcagcctggaagacgtgccggatccgcgcgtgcgcctgcgccagctgttccagatggtggcgcatgaagtgcagccgcacatcatctacagcgagctgctgaaggcactggatcatccgatggtgcggccggtgatcgaccgcgtctcgcagcgccgcctcgattatctggtcgcctcgttccgccaggcgggcctcagctcgaccgatgcgcgtcatcgggcacgccttgcctacgccgcgtatgtcggcttcctgcagttgtcgttgcagctgcagcagcccaagcaggcgcgcgaggatttcgaagcgtacgtcgagcatttgatcgagacgctgattccgaacggatga

SEQ ID NO: 496487 - DNA, 2877 bp, Stenotrophomonas maltophilia
atgaaactcaagtccagccagctgcgtgacgcagttgtgatcgcgcttgtcgccggtgccaccaccgcgacggcgcacgcccaggaagccaccaacctcgaccgcatcgaggtcaccggttcgcgcatccgtcaggtcgataccgaaaccgcccagcccgttctgagcatcagccgcgcttcgatcgagaagagcggtttcaagacggtcgccgacgtcctgcagaacatcgccgcagccggcagcccggccatcagccgttccgagccgctgtcctccggtgaagccgtcggtggcttctacatcgacctgcgcaacctcggcgccgaacgcaccctggtgctggtcgacggcaagcgcctcggcgccagcgtcagcggcctgcaggacgtgtcgcagattccgtcggccatcgtcgagcgcatcgacgtcctgaaggacggcgcgtcgtcgatctacggctccgacgcgatcgccggtgtgatcaacatcatcacccgcaagaacttccagggcctggaagccaacgcctacgtcggccagtacggcgaaggcgacggccagaagaccagctacgacttcgtggccggcttcaccggtgaccgcggttcgatcaccatcggcgccgagtacgccgaagaaaaggaagtgtgggccaaggatcgctggttcagccgttatccgcgcaccaccttccacccggcccagaactggagcccggtcagccagtggggcaccatcatcgatccggataccgatgactggctggtgctgaaccgcggtggcgactaccgcgacgtcaaccagtaccacgaccaggacttcgccggcatcaccggtgacaccagcaactccaatacgcagatgcacctgctgacgccgaccaagcgtcgctcggtgttcgccaacgtccagtacgacctgaccgacaacatccgcttcgtctccgacctgctgtacacccgtcgtgagtcgcaggcccaggtcgcaggctatccgttgcagtcggcgtcgtatgagcgcctgggtgccaagtgggatgccgacagctactacaaccccttcggcaaggacatgggcttcatgcgccgtggctgggaagtgccgcgcctgtcgaccaacaagctgaccaccttccgcttcaccggcgccctgcagggcagcttccagttcaatgacaagtacttcgactgggaagccggctacatctaccagaactcggagaaccagcagagccagaccggcaactacaacgtgctggcggtcaatgccgccaccggcccgtcgttctacaacccggccaccggccgcgtcgagtgcggcacggcagcaggcctggtcgatggctccaacccgatctatggcccgggcgccggcggctgcctgccgtggaacccggccattccgtacggccgtaccggtgacggtggcctgaccggcaacccggatctgcagcagttcctgttcccgaccaccaagaacaccggtgaagtcaccaccaagacctactacgcgaacatcgccggcagcctgttcaccctgcccgccggcgacctgggcttcgcgctgggttacgagtaccgcgaggacaagggttcgtacaatccggacgccctgtcgcagaccggctactcgaccgacctggccgccggcccgaccggtggtggttacgacgtcaacgaagtctatctggagctgaatgttccgatcctggccgacctgccgggtgccaaggaactgagcttcaacgccgcgacgcgctactcgaagtacagcaccttcggcaacaccaccaacaacaagttcggcctgaagtggaagccgatcgaccagctgctggtgcgtgcgacctacgccgaaggcttccgtgcgccgaccatcgacaatctgtacggtggcagctcgcagaccttcgcgtacttcaccgatccgtgcgataccgacttcggttcgaccggccagccgggcgtcgctgcccgttgcgccgcggccatcggcccgaccgccagcaccttccgccagctgcgccagggctacgtgccggccagcggtccggatgagcagacgccggacccgttcaacgccgtctccaacccgaacctgactccggaaaagtccaagtccaagaccgttggcctggtgtggagcccgaccttcgcccagggcctgaacatgagcctggactggtggaacatcaagatcaccaacacgatcgtcaccgacagcccggatgaccagctgaacgactgctacgtgcttggcatcgccgagcgctgcaactcgttcacccgtgatccgaaccgtcacaacgtgatcaacctgacctacgcaccgcgtaacgccggttaccaggaaaccgaaggcttcgacttcgacgtggcgtaccgcttcgagaccgacagctggggtaccttcaacgccaacctgcagaacagctacgtcaccaagaacgtgctgaagaccaccaatgcgcagcaggtgccggtgtcgatcctcaacggcttcggcagcaacttccgcctgcgttcgaacctggtgctgggctgggagcgtggcgactggggcgtgacctggggcacccgttacttctccagcgtcaaggagcgttgctactacagcgacgagtgcagcctgccggacttcggttcgccggatccggtgcgcgaccagccgatgaacaagcgtggttcgaccatgttccacgacgtccaggtttcctggaacgcaccgtggaatgcgaccatcgccgtcggcgcacgtaacgtgttcgaccactacggcccgcagatgtactcggcaccgaactcgcagttctcctactacggtggctacgacatcggtcgcttcatgtacatgcagtacaagcagaagttctga

SEQ ID NO: 496488 - DNA, 849 bp, Stenotrophomonas maltophilia
atgcgtaccttcctgcgtctaccgctggccctgctgatcgcccttggcgcgatcacgggcgtgcatgcgcagagcaaggacacccgcaccgtgctgccggtctggaacaagggcagcggcaaggtcgaggcgctgctgtaccttgagccgaccggcgaacaggcggccggcgcccgctggcatttcggccgcaactcgctggacgcggcctttggcctgtcctccggcgattcgctgggcctgctctgcaacagcagcagcggcaccagcatcagcggtctggccagccattgcatgctggccagcctgggcgacgaggatgatctgaacagccgtcgtttcagcggtaccgccgcgctgaaccgcggcaacagccgcctgggcattaccgccggcactggccgtgaaaccctgcccgcctggttgtcgggcccgaacaagacgccctcgctgcgtgccgagcagaacgatctgaccgtgttcgcgcagaagaacatcggtcgcgaaggcttcgtctccattgccggtacctacgccaaggcgcgcctggttccgctggccgacgcctcgccggccatcgtcgatcgctgggacagcaagagcctgagcatcggcgccggttacggcaacttcaccggcagcatcatcggccgcgtggtcgacgtcccgggcaagcccggcaagtgggaaggcctgggcatcggcctgacctggcgtaccccgtggtccggccagctcaccgtcggcgccgagaatgtgatcagccgcggcaagaatccgttctccccgcgcaacgaaagcaacgacgacggcaccgtgccgtatgtgcgttacgaacaggatctctga

SEQ ID NO: 496489 - DNA, 894 bp, Stenotrophomonas maltophilia
atgaccgccaactccgattccctgatccgtttcctgctccccgacgccggcgtccgcggcgtgcatgtgcacctgcaggccacctggcaggaaatcctgtcccacgccgtgtacccggacgccgctgccgagctgctcggcgaggcctgtgtcgcctcggccctgttcaccggccacaccaagatcgacggccgcctgtcggtgcagctgcgcagcagcactgccctgcgcaccctgttcgccgaatgcaccgcgggcggcaccctgcgtggcatcgcccagctcagcgaaggcgccgacgcgccgcgtgacctgtccagcctcggcgatgacgccatcctcgccatcaccatcgagaaccccggcctggacccgcgcgagccgcagcgctaccagagcctggtcgcgctgaccgcgccggagctggacgaggccttcgaggactacttccgccagtcggagcagctgcccacccgcctgctgctggcggccgaccgcaacggtgccgccggcctgctgctgcagaaactgccgggcgacgaaggcgacgaagatggctgggcgcgcgccagcgccctgttcgagaccctgggcaaggccgaactgctggcgaccccggccgagcagctgctgcaccgcctgttccacgaggagcggccggagctgctgggtgaaaagccgctctccttcgcctgctcctgctcgcgcgagcgggtggccggcatgctgcagtcgctgggggaagaggaggcccgagcggccgccgaggacactggcgccgtcgaggtgcgttgcgaattctgcggacgcgagtatcactttccattgacggagttcggcatactgttccacggcgcccagggggctgtaccggcgcctgaacgacttcagtga

SEQ ID NO: 496490 - DNA, 750 bp, Stenotrophomonas maltophilia
atgggggcagcgggagagcagcacaaggtagtggcggaggtggccgcaccgcgccggcgacgctggcgctggaagcggctgctgtggctgccggtgctgctggccgccttcagctgcctgcaggtgctggtgctgcggttcatcgacccgccggtgtccacggtgatgctgtggcgttatggcgaggcgctgggcgaggccgactggtcctatcggctgcattaccagtggcgcgacctcgaccagatggcgccgagcctgccgatctcgctggtggcggccgaggaccagcgcttccccgaccacaatggcttcgatctgcaggccatcgaaaaggcccgcgaccataacgcccggggagggcgcctgcgtggcgccagcacgatcagccagcaggtggccaagaacctgttcctgtggcagggccgcagctggatccgcaagggcctggaagtctggtacacggtgctgatcgaggcgctgtggccgaaggagcgcatcctggagatgtacgccaacatcgccgagttcggtgatggtatgtacggtgcgcaggcggcagcccagaaatactggggcaaggacgcggcccggttgagcccggccgagagtgcgcgactggcggcggtactgccggcaccgcgacgctacaacgcggccgcaccggggccgtatgtgcagcggcgcgccgcatggatccagcgccaggcgcgccagctgggaggcgcgtcatacttgtcggaggactga

SEQ ID NO: 496491 - DNA, 1035 bp, Stenotrophomonas maltophilia
atgtacaatccgggcatgacccgcgaacggctcacttttgtcatcgccgcctacaacgaggccctggcattaccgctgctgcatccacggctgtgcgcggtgctggacggcatgcccgacatcgacggccacatcctctatgtggatgacggcagtcatgaccgcacatgggaggtgatcgcggggttggcccaggctgatgcgcgcgtctcggcgctgaagctgtcgcgcaacttcggcaaggaggcggcgctgaccgcgggcctggatctggtgcacgagggggcagcgatgatcctcgatgccgacggccaggacccgccggagctggtgccgcaattcgtcgcgcgctggcgcgagggccatgacaacgtctacggcacgcgcatggcccgcgatggcgagtcctggatcaagcgcgccacggcagcgatgttctaccgggtgatgggtcgcctgtcgcgtacgccgattccggccgataccggagatttccgcctgctgtccccgcgcgcgctgagcgccctgcgcgggatgcgtgagcgccaccgtttcatgaaggggcttttcagctgggtaggcttcaagcggattgccgtgccctatcaccgccacgcgcgcgtggccggcaccagcaaattcagcctgtggcggctgtggaatttcgccctcgaaggcatcaccggcttctcgactgtgccgctgcgggctgccacctacctgggactggcaaccgccgcagtcgcgttcgtgttcggcctgtgggtgatcgtgaaggcggcgctgtatggcgaccgggtggcgggttggccgacgatgatggcggtgatcctgttcctggggggagtgcagttgatcgcgctggggctggtgggagagtacctggggcggctgtacgaagagtccaagcagcggccgttgtacctggttgacgcgtggctagcatccgccgtggcagactcggccctgcaacccaccctcggagggcaggcagatgacgacggtacggcaactgttggatggcaagtctcctga

SEQ ID NO: 496492 - DNA, 432 bp, Stenotrophomonas maltophilia
atgacgacggtacggcaactgttggatggcaagtctcctgaagtacatgcggtcgcgccggacgcggcggtgatcgatgcgatccggttgatggcggaaaagggcatcggtgcggtactggtgatggacgggccgcggctggtcgggatcctgtccgagcgtgactacgcgcgcaagatcgtgctgcgtgatcgttcatcgcgcgataccgcggtggcggagatcatgacggcgcaggtggtgacggtgtcgcccggtgagcaggtggagcattgcctgcaactggtgaccgactaccgcatccgccatctgccggtggtggagggcgcgcaggtgctgggggtgatctccatcggtgacctggtgaagtcggtgattgatgcgcagcggcgcgagctggaccagctgcagcagtacatcgtggcggggtga

SEQ ID NO: 496493 - DNA, 849 bp, Stenotrophomonas maltophilia
atgccgcccctgctgaagatccgcaccgagcgtgggcagatgtcggccatcgagcgccgcatcgccgacttcatcctcgacaacgcccacctgctgcgcgactactcctcccagcagctggccagcgcgctcggcatcagccagtccagcgtggtgaagttcagccagaagcttggcttcaagggctacccggacctgaagtactccatcggccaggacgtggcccgcgccggtgccgatccgcagcaggcgcccgacgaacccgacagcggcgatgactacctgcgcctgggcgaggccctgcgccgcagcaaggcgcaggccgaggaggaaacacgccaggccaatccacgcggggagatcgagcgcatcgtgcagctgctcgacggtgcgcccaaactgttcgtctacggcctgggtgacgacggcctgtatgcccgcgagttcgccatgcggctgtcgctgctcggactgctggtggtgccgcataccgatccgatcctgatgctggccaacctctcggccgcacgccccggcgatgcgctgctgatgttctccgagttcggcaacctgccccagctttcacagttgtcgcggcagttccaggacatgggtggcaaggtgatttccatcacccgccacaccgccaacccactgcgcgcgcatgcggacgcggcactggcggtctgcgcgcacgaccgcacgccacaggtcgcgcagctgctgtaccgtagcgccatgcacgccctgctcgatttcctgttcatgctgctctgccacaccaatccggatcgccagcagcagcttgcggtgaacctggagcggatcgaccacctgctggattcctga

SEQ ID NO: 496494 - DNA, 762 bp, Stenotrophomonas maltophilia
atgagatcgctggttcgcttcgctaccgctgcactgctgcttgcttcggcggtgtccgttcacgcggcgccgctggatggcgcgcgccagctgatcgtggtcaccagcgatggctgggacagcacccaggggcaactgcaggcctatgtgcgcgacggccagggctggcacacgcacggacaggcgttcccggtcgcgctcggccgcaccggcagcgcctggggcctgggcctgcatccggcacaggccgatggcccgcagaagcaggaaggggatggccgcagcccggccggcatattcgcgctcggcagtgcgttcggctatgccgtcacccgccgcggcaccgccatgccctaccagccgatgctggacagcagctactgcatggacgtgcccggttcgccgttctacaaccgcatcgtcgatgaaaagaaggtcggcaatgcagcggtcaagggctccaccgagccgatgcggctggacctgcacaacaagggcgacgtgcgctaccgggaaggcttcgtcatcgcccacaacccggacaaccagcccggcaagggcagctgcatcttcgcccatctgtggcgccagcccggcgaagccaccgccggctgcacggccatgccgcaggaacgcatgcaggcactgctggactggctgcggccgcaggacgcgccgcgtttcgtgctcctgccgcgcgcggagtacaagcgcctgcaggcgcagtggcaactgcccgcgctggccggagacgtccgttga

SEQ ID NO: 496495 - DNA, 1302 bp, Stenotrophomonas maltophilia
ttgagcacgcaggacgaaccgcagctgcaacgcgcggtcagccgctggcagatcgtcggcctgtcgatcaacgatgtgatcggcagcggcatctacctgctgccggccgccaccgtcgccctgctcggccccttcagcctgtggggcgtggtcgccgccggcatcgtcgtggccttgctggtgctgtgctatgcgcaggccgccagctacttcgatgaacccggcggcagctacctgtatgcacgcgaggcgttcgggcgcttcgccggtttcgagatcggctggatgatctggctgacccgcatcagctcggccgctgcgctcagcaacgcgctggccgacgcggttgcgcgtttctggccgtgggccgatgccggcctgggccgcatcgcggtgatcgtggtatcgctgggcttcctcaccggcatcaacatcatcggcgtgcgctcggccgcgcgtaccggcgtggtgctggtgatcggcaagatgctgccgctgctgctgttcgtggccatcggtgcgttctacatcgacccacagctggccttctccggccaacgcccggacccgcatgacctgcagcgcatgggcgaagccgccttgctgctgctttacgcctacgcgggcttcgagaacatcccggccgccgccggcgagtaccgcaatccgcgccgcgacattccgttcgccctgatcaccatgatcatcaccgtcaccgtcatctacggcgcggtgcaggtggtggcgcagggaacgctggccggcctgtccagttcggccaccccgctggccgatgccgccgccggtttcggtggcgaagcactggcgctggtcctgaccgtcggtgccaccatctccatcctcggcaccaacagcaacacgatgatgatgggcccacgcttcctgttcgcactggccagcgatggctacggcccgaagatcctggcgcaggtgcatccacgcttccacaccccggccgcgtcgatcctgtgccagggcctgatcgcgctcggcctggccctgtccggttcgttcgtgcagctggccctgctgtcgatgaccacgcgcctgttcgcctacatcggcaccgccgcggcggtactggtcctggccaagcgctacgccgaccgcccgggcgcgttgaagctgcccggcggaccgctgattccggtgctggcgctgctgctgtgcctggcgctgttcgccagtgccagctggcagaacatcgctgctgcgctggtggcgttcgccatcggcgcggtgatctacacgctgccgcgaaaagataccgatgccggatga

SEQ ID NO: 496496 - DNA, 324 bp, Stenotrophomonas maltophilia
atgaccgagtaccagatccccggccgcgtaccggacgacagcacgccgcgcgatgcgatcagcaactactggcgcgaacgctacacggccgagccgtactacgacgaccagctgttcttcgaggactatgagccggcctaccgcatcggccacgccgcgcgtgcacaggacatgatccgcgcctatgaacaggtcgaggccgagctcgaatcacgctgggccaacgaacgcggccgcagccgcctggactgggcgcaggcacgcaatgcggtgcgtcgtggctgggacgaagcgcacctggcggacccgctgttgaagcgatag

SEQ ID NO: 496497 - DNA, 453 bp, Stenotrophomonas maltophilia
atgaacactgccatgccccacaagccgtccaccgccttcatcgctgcctcctgggtggccctgctgctgggggcggcggcgtacctgatcggcctgttcaacgccacgatggcgctcaacgagaagggctactacctgaccctgctgctgttcggcctgttcgcggcggtgtcgctgcagaagagcgtgcgcgaccgcgtcgaaggcattccggtgagtggcctgtattacgcgctgtgctggttcgcgctgctgtcggcgctgatgctgctgctggtcggcctgtggaatgccacgctggcgccgagtgagaagggcttctatggcatggcgtatgcgctgtcgctgttcggcgcggtggcggtgcagaagaacacccgcgacctgatcgctgccggtgggggcgagagcaagcgcagcgcgctcgtgccgccgctgccggaacaggagtga

SEQ ID NO: 496498 - DNA, 1167 bp, Stenotrophomonas maltophilia
atgacccgcacgcccctgctgctcgccctcggcctcgtgccgatccttgccacctccgcctgcaatgccgccgatccggccgccaacggtgcgcagaccgccacagcggcctctgccgccaccgaccagcgcccgttcaactccaccgaagtcagccgcttcgaccagccctgggcgatgaccttcctgcccgacggcagcctgctggtcaccgaaaagcgcggcaagctccagcacctggacccggccagcggccagaagcacgagatcaccggcgttccgaaggtcgcctatgctggccagggtggtttcggcgacatcatcctgcacccggatttcgcccggaatcatgtcgtttacgtcagctatgccgaggaaggcacgctggatacccgcggtgccgcggtggcccgggccacgctggcactggatgccaacggcggtggccagctgaaggacctgaaggtgatctggcggcagagccccaaggtcagcggtgagggtcactacgggcatcgcctcgccttcggcccggacggcaagctgtggatcagctccagcgagcgccagaagttcgatccggcccaggacatgggcagcaacctcggcaagatcatccgcctcaacgacgatggcagcctgcccgccgacaatccgttcgcttcgcagggcggggtggccgcacaggtgtggtcgctgggccaccgcaacatcctcggcatggccttcgatgccaacggcaagctgtgggcgcacgagatgggcccggccggcggcgacgaactgaacctgatcgtgcgtggcgccaactacggctacccgatcgtttccaacggtgaccattacgacggccggccgattcccgaccacgatacgcgcccggaattcgccgcgccgaaggtgacctggacgccggtgatctcgccggccggcttcgtgatctacagcggcagcctgttcccgcagtggaagggcagcggcttcatcggtggcctgtcgtccacctcgctggtgcgcgtggccttcgatggcgacagcgcgcgcgaagccgagcgcttcaacatgggcgagcgcatccgcgaagtggaacagggcccggacggcgcgctgtggctgctggaagacggcagcaaggcgcgcctgctgaagctcacgccgaagacctga

SEQ ID NO: 496499 - DNA, 540 bp, Stenotrophomonas maltophilia
atgcgccggatggcctacctgattcccgccctgctgctggcggcctgttcgcagccggcgccgccggccgagcctgcagcggatgcgccgccgccgatggaggccagtgctgcttcgacgcctgcggctgaaccggcggcgccggctgccgaagccgccgctgcacccgccgcaccggcagccgaggatgcgcgtgcgcgcatcgagtcgctgctcggcgatgccgcgcagttcgaaaaggtcttcaatgcgttcaaggccgccgtggtcggcggtgatcgcgctgcggtggtcgaggaagtgcgattccccttgaacatcagcggcggaaagaagatctccggccccggagagttccagcgcaactacgagaagatcatcacgccggaggtggtcaaggcggtgtccgcgcaggacttcggcaaggtgttcgtcaaccagcagggcgtgatgatcggcagcggccaggtgtggttgagcggccagtgcctggaccaggcctgcacgaagaccgaggtgaaggtcatcaccatccaatga

SEQ ID NO: 496500 - DNA, 2175 bp, Stenotrophomonas maltophilia
gtggcctccgatcgcatcgaatccctcattgcccagatgaccgtcgaggaaaaggtcggccagctgggtgtcttcgcggacatggtccgcccgttcgccccggacgtgaacccggaagccaacgtgcgcaatgccgaccaggtgctgcagcaggtgcgcgagggcaaggtcggctcgctgttcaatggtgtgggcgccgaactgggccgccgcatccagcaggtcgccaccgaggagagccgcctgggcatcccggtgatcctggcggccgacgtcatccacggcatgcgcaccgtgttcccgattccgctgggcgaggccgccagcttcgagccggacctggccgagcgcaccgcgcgcgcaactgcgatcgaagccaccgccgcgggcctgcactggacctatgcgccggccgtggacatcgcccgcgaccagcgctggggccgtggcgccgaaggtgccggcgaggatgtggtgctgggctgtgcgttcgccgccgcccgcgtgcgtggcttccagggcagcgacttgcgtgcggccgattcgctgctggccacgcccaagcacttcgccgcctacggcgcggtgatggccggcatggaatacaacatggtggacatctcgccgcagaccctgcgcgacgtgcacctgccgccgttcaaggccgccttcgaggccggcgcgatcaccgtgatgtcctcgttcaatgacatcaatggcgtgccggccagtgccaatgccgaactgctgaccgacatcctgcgcggcgaatggaagttcccgggcgtggtgatctccgactataccgccgacatggaactggtcgcgcacggctatgccgccgatgaccgcgatgccacggccaaggcgttcaccgccggcctggacctgagcatgcagagcggcttctatgccgaacacctgcccggcctggtcgagagcggcgaggtgccgatggcggtgctggatgaaggcgtgcgccgcatcctgtggctgaaggagaccatcggcctgttcgacgacccgtaccgttcgctggacccggcgcgcgaagcggatacctcgcacattgccgcgcatgacgaactgtcgcgcgatgccgcgcggcgttcgatcgtgctgctgaacaaccgtgacaacgtgctgccgctgcagaagaccgggcagaagatcgcgctgatcggcccgttcgtgcaggaccgcgagaacatcgaaggctgctggacgctgttcggcgacaagcagcgttacgtggacctggaaaccggcgtgcgtgccgccatcggcgacgaagcgctgctggaaatcgtgccgggctgcgaactggaagccgcgattccgggcggcacggaagccgctgtggctgccgcactgcgtgccgacgtggtggtgctggcgctgggcgaaccgcagcgctacagcggcgaagcacagtcgcgcgtggagatcaccctgccgccggcacagcaggcgctggccgaggccgtggcgatgaccggcaagccgctggtggtgctgctgcgcaatggccgcgcgctggcattgcagggcgcagtgcgcaatgcgcaggccgtggcggtgacctggtacctgggcacgcagaccggccatgccgtggccgatgtactgttcggtgactacagcccgtccggccgcctgccggtcagcttcccgcaggtgtccggccagcagccgtacttctacaaccacccgcgcaccggccgtccggaactgccgaccatgtcggagttcaaggcgcgctggcgcgagattcccaatgaaccgctgtacccgttcggccatggcatcggctacaccaccttcgcctacggcgtgccgcagctgagcacggcacagctcggctgggacgacaccctgaccatcaccaccgtgctgaccaacaccggccgcgtggcgggcgaggaagtggtgcagctgtacatccacgatcgcgtggccagccgcgtgcgtccggtgcgtgaactgaaggacttccgcaaggtggcgctgcagccgggcgagtcagccgaagtggtgttcaccttgacccgcgagcaactggccttcaccggccgcgacggcgtgctgcgtgccgagccgggccagttcgacctgtgggtctgtgcctcgtcggccgccggcgaagcggtgcagttcgagctgctgaaggcctga

SEQ ID NO: 496501 - DNA, 1272 bp, Stenotrophomonas maltophilia
atggtggacgcggtggtggcggtacagtggctggaacggctgcagaacacactggaaccctatcccggcgcctacctggcgttgatgatctcggcgctgctgatcgccgctggcctggccaactgggtgaccaagcgcatcctgctgcgcgggctgcggcggctgctgagccgccttccgggcgctgacactggccgcggcagccacctgatgcgggtgatctcgcgcctgtcgaacgtggtgcccagccaggtgatcgcctcgggcatccgcatcgtgccggacctgccgccgggcctggtcagcttcatcatcggcgcctgccaggcgtgggcgatcctgaccgtggtgctggccatctcgcatgcgctggatgcggccaacgatctgtacgagcgccgccccgaggcacgcaacaagccgatcaagggctacctgcaggtcgccaagatcgtcctcttcgtgatcgccggcctgtcgatcgtcgctaccctggcgggcgtcgacctgcgctatctggtcaccggcctgggcgcggccacggcggtgctgatgctgatcttccaggacaccatcctgtcgctggtggccagcgtgcagatcagtggcgatggccgcgtgcgcatcggcgactggatcgagatgcccagccagaacgccgacggcgacgtcatcgacatcgcgctgcacaccatcaccgtgcagaacttcgacaagaccatcaccaccatcccgaccaagaagctggtgaccgagtcgttcaagaactggcgcggcatgcaggaggccggtggccgccggatcaagcgcgcgctgtacctggaccagcacagcgtcggcttcctggacgagggcgacctggccttcctcggcgagttcgcgctgctgcgcgactacctgcgcgacaaggaacaggaactggggcagtggaacgggcgcctgcgcgagcagggcgtggccgaggtcaacagccgccgcgtgaccaacctgggtacgttccgggcctatgtggagcgctacctgcgcagccacccgggcatccataccgacatgaccctgctggtacggcagctgcagccgaccaccgagggcctgccgctggagctctactgcttcacccgcagcactgcctgggccgagtatgaggcggtgcagtcggacatcttcgaccacctgctggcgatcctgccggccttcggcctgcgggtattccaggcctccagtgacgccatgttgatggccgggcagcgccagttggccggctcggagtaa

SEQ ID NO: 496502 - DNA, 354 bp, Stenotrophomonas maltophilia
atggacaaggttttcatcgaagggctgacgatcgacgccctgatcggtatctacgattgggaacgacggatccgccaggacctggtgttcgacctggaaatgggtttcgacaaccgtcgccctgcagccaccgatgacatcgcccacaccctgaactacaaggcggtgagcaagcgcctggaacagttcgtgcgcgagtcggagttcggcctggtcgagaccctggccgagcgctgcgcgcagatcgtgctggacgaattcgacgtgaagtggctgcgcctgaagctgagcaagccgggcgcggtgcgcggcgcgcgcgcggtgggcgtgatcatcgaacgcacgcgggactga

SEQ ID NO: 496503 - DNA, 660 bp, Stenotrophomonas maltophilia
atggctccatacgatgtactgcggcgcgcgttgtcagcggagcgtctgtctacttacgagagaatcgcatcgacctgcagccccgacgtcacagccgaatccctgtacctgtggaacatgcggatgtgcagtgcactgatgatgccggtccatctgtgcgaagtggtcacccgcaacgccgctgcagctgtgctcgccaggcagcatggcccgcgttggccctggaataatgccttccgacggaggctgccaacctcatccagtactcctccgcgcacggtactggaacaacttgccagccgcgtaaccgatacacctgggatcgtcgccaacctgccgatggtgttctggcagcagctctttacctgtcgcttcgactccacgctttggatacccgcactcagcagggttctgcagcatgctccctctgctcatcccagtgccgtaaggaaagccatccatgcggatatcggacgcatccgccacctgcgcaaccgcatcgcccaccacgagccggtcctggaacgtgacatcggcgccgacctggccgcgatcgggcggctgatccatgcccgctgcccacacacgctgggctggctgcagcgccatgagcgggcgacaaccgtgctggcggcgtcgccgttggcagtgcatcggtaa

SEQ ID NO: 496504 - DNA, 984 bp, Stenotrophomonas maltophilia
gtggcggtgtatgacaccgacctggccggcagcgcggccctgcgcgcccatgcggtctacagccagatcgccctgcacgccgaatacggtggtgtggtgcccgagctggccagccgcgaccatgtccgcaagctgctgccactggtacgccagaccctggccgacgccggcctgggcgtgggcgatatcgatggcgtggcctacaccgccggtcccggcctggtcggcgcgctgctggtgggcgctggcgtggcgcgttcgctggcctgggcgctggaggtgccggccgtgggcgtacaccatatggaaggccacctgctggccccgctgatggaagacgacccgccggaagcgccgttcgtggcgctgctggtgtccggtggccacacccagctggtggcggtggacgccatcggccagtaccgcctgctgggcgagaccctggacgacgcggccggcgaggccttcgacaagaccgccaagctgatgggcctgccgtacccgggcggcccgcagctggccaggctggccgagcagggcacgccgggcgcgtaccgcttcgcgcggccgatgaccgaccgcccggggctggatttcagcttctccggcctgaagacccaggtcctgatggcctggcgcgacagtgaccagagcgagcagacccgcgccgatatcgcccggggctttgaggacgcggtggtcgagaccctgtcgatcaagtgcgagcgcgcactggaagcggccggcaccaacgtgatcgtggtggccggcggcgtcggcgccaacacgcgcctgcgcgcccgcctgcagcagatggccgagcgcctcggcggccgtgcctgcttcccgcggccggcactgtgcaccgacaacggggcgatgatcgccttcgccggcgcgctgcgcctgcgggccggccagcacagcccgccgaaggtggatgtgaccccgcgctgggacatggcgaccctgccggcggtctga

SEQ ID NO: 496505 - DNA, 216 bp, Stenotrophomonas maltophilia
atgcccagcgtcaaagtccgcgagaacgagcccttcgagtttgctcttcgccgcttcaagcgcacttgcgaaaaggccggtgtgctggccgaaacccgcaagcgcgagttctacgaaaagccgacccaggagcgcaagcgcaaggccgccgctgctgtgaagcgtcagctgcgccgctcgtcgcgcgacgtcaccaagcgtcagcgcctgtactga

SEQ ID NO: 496506 - DNA, 444 bp, Stenotrophomonas maltophilia
atgagcatgaagcagcagctcaccgaagacatgaaggccgccatgaaggcgggcgagaagcacaagctgggcgtgatccgcctgatcaacgctgccatcaagcagcgcgaagtggacgagcgcatcgagctggacgacaccgccgtgatcgccgtgctcgacaagatggtcaagcagcgcaaggactcggtcagccagtacgaagccgccgaccgcgaagacctggccgagatcgagcgcgccgagatcgtggtcatcgaagcctacctgccggccaagatgggcgaggccgagatcgtggccgccatccaggccgccatcgccgagaccggtgccgccggcccggccgacatgggcaagctgatgggcgcgctgaagcccaagctcgccggccaggccgacatgggcctggtctccaagctggtcaagcagctgctggcgtaa

SEQ ID NO: 496507 - DNA, 921 bp, Stenotrophomonas maltophilia
atggttgaatccgagcccaacgttcccgtgtccctgcacaagtacctcaagcgcctgcaggacagctttccgatggcggtggccaagcgcttcatcgacgtcgacgtgctgacccaggcagcttccgtctccttctacgccctgctgtcgatggcaccgttgctcgtgctgctgctgtggctgaccgcctcgctgtacccaccggcccagcaggcgctgatcgaccagatcagctcggtggccggcagcagcgcggctaccgtggccgaaaccgttctgaagaacgccgacaaccagccggatgtcggctcgctggcgggtgtatggagcacgctgctgctgttcgtcggcgccaccgccgtgttcgcccagctgcagaacgcactgaacctgatcttccgcaccagcggcgagcgcctggaaggcctcaaggcctggctgcgcaagcgcgtgttctcgttcggcgtggtgctggccctgggcttcctgctgatcctgtcgatgacggccaccacggtgctgcaggtggccttcgcccagctgccctcgatcctgcccgcgctggggtacgtcacgagcctgctgctttacgcagtcggcttcgccttcatgtaccactacctgcccgaccgccgcgtggcctggcgccaggccttcatcggcggcgtcatcacctcggcactgttcgcactcggccgctacggcatcggcgtctacatcgccaccgtggcccccggcagtgcctacggctcgatgggcgcgctggtgatctcgctggtctggatctactacgccaccgtcgtgttcttcgttggcgccctgatgacggcggtgatcgatgagcgcctgcgcgcgcgtcatcacctggccgcagccggcattgatccggcaaccgccagccaggtgcccgacagggggtaa

SEQ ID NO: 496508 - DNA, 1740 bp, Stenotrophomonas maltophilia
atggcccgtatccccgacgctttcatcgacgacctgctcgcccgcaccgatatcgtcgaggtggtgggcagccgcgtgccgttgaagcgccagggcaaggagtacgccgcgcgctgcccgttccatgacgagcgatcggcgtcgttcacggtctcgcccaccaagcagttctatcactgcttcggctgtggcgcgcacggcaccgcgatcagcttcctgatgaactacgaccgcctcgagttcctcgacgcggtggatgaactggccaagcgcgccggcatggaagtgccgcgcaacgagaatccgcgcagcccgcagcagcaggacgacagccgcgagctgtactcggcgctggacgcggcgaccaagttcttccagaagaacctggagggcagcgagaaggcccgcagctacctggatggccgtggcgtggacgaagagaaccgcgcgcgcttccagatcggctacgcgccggatggctacagcggcctgcgcgacgcgctgggcaaggacgagcggcgcatgaagctgctcgaccgcgccggcctgttctccaagaacgaccgcggccacgtctacgacaagttccgcgaccgggtgatgttcccgatcttcgaccgccgtggccgggtgatcgccttcggcggccgcgtgttcgagaaggacgacggccccaagtacctcaactcgcccgagaccgcgctgttccacaagggccgcgaactgtacggcctgtggcaggtgcgccaggccaaccagaagatcgagcggctgatcgtggtcgagggctacatggacgtggtctcgctgttccagttcggcgtcacccaggcggtggcaacgctgggtaccgcgaccacgccggaccatgccgagctgctgttccgcaacgcaccggacgtgttcttctgcttcgacggcgacgccgccggccgccgcgccggctggaaggcgctggagtcggtgctgccgcgcatgaaggatggccgccaggccttcttcctgttcctgcccgatggcgaagacccggacaccatcgtgcgcaaggaaggcgccgaagcgttcaacgagcgcctgaagcaggctacgccgctgtcgcagttcttcttcgacgaactgacccgcgagatcaacctgggcacgctcgatggcaaggcacgcctggccgaacgcgccaagccgatgctggcgcagattcccgacggcgcctttggcgacctgatgaagcagcagctggcgcagctgaccggcctgggcggtactgcccaggccacgcgcgcgccgatgccgcaacgccagccgcagcggacgatccagcccgtggccaagcgcagcctggtgcgcggcgcgatcgccgtgctgctgcagcagccgtcgctggcgctgacgctgggcggcaagcaccacttccagggcctgcgcctgcccggcgtggaactgctgctggagctgctggggctggtcgaacagcgcccggacatcagtaccggcgccctgctggaacacttcgacgggcgcgaggaacaggcctcgctgcataccctggccgcacagacgctgcccggcaccgaggccagctggacccaggaactgcacgacgcagtggcacagctggagaaacagctgctggtgcaacgtctggaggagttgttggcaaagcagcgccagcagggcctggacgatactgacaagtacgaactgcgcgagctgctgaaggcgcgcgccggactgcgcctgtag

SEQ ID NO: 496509 - DNA, 501 bp, Stenotrophomonas maltophilia
atgctgctgcgcctgacctgcctgctgttgttgtcgctctgcctgccactgacggccctggccgaagacgcgcccctcaacgaagtccgccccggcctgtatgccggcggccagcccagcgccgcacagctgcaggccttggccgcacagggcgtgcgcaccgtgatcgacctgcgccagcccggcgaggaccggggcttcgatgaaacccgcgtcgccgaatcattgggcctgcgctacgtgcgcattccggtggccggcgccgatggcctggatacggccaacgtgcgcgccgtgcacctggccctgcagcagagccaggggccggtgctgctgcactgtgcgtccggcaaccgcgccggcgccgtgctcggcctggtcaatgcacggtacgaacatgccagccccgaacaggcccttcagctgggccagcgtgctggcctgaagtcgctggaagccgccacccgccaacgcctggccacgccggtcacctcgccctga

SEQ ID NO: 496510 - DNA, 972 bp, Stenotrophomonas maltophilia
atgacccgctggtggtcgcgcctgcgaccggacaacttcaccctcgccctgctgtgcaccgtcggcctggcctcgctgctgccgatgaaggccgccgccgccatcgtcctcgacgatgtcaccaccgtcgccatcgctgcactgttcttcctgcatggcgcgcgcctgccacgtgagtcgatcatcggcggcatgctgcactggcggctgcacctgaccatcctggcctgcaccttcatcctgttcccgctgctggggctgatgttcaggccgctgtcgggctggctgctgaccccggagctgtacctgggcgtgctgttcctgtgcaccctgccctccaccgtgcagtcgtccatcgcgttcacttcgatggcgcatggcaacgtgcccgcagcggtgtgcagcgcctcgctgtcgagcatcctcggcgtgttcctgaccccgctgctgctgaccgcgctggccggcacctcgggcggcatccatgatccgctgcatgcgatcggcggcatcatgctgcagctgctggtgccgttcgtggccggccacctgctgcggccgtggattgccggctgggtggaacgccagcgcgcgctgctgcgctacaccgaccaggccaccatcctgctggtggtgtactcggcgttcggcgaagccgtcaccgaaggcctgtggagcaagaccccgctgctgtcgctgctggctgtggcggtggtggccgccgtgctgctgggcatcgccatgccgctgatcaccttcatcgcccgtcgcctgcgcttcaaccgcgaggacgagatcgccatcgtgttctgcggctcgaagaagagcctggccaccggcgtgccgatcgccaaggtgctgttcgccggcggcagcctgggcgccatcgtgctgccggtgatgatctaccaccagatccagctgatcgtctgcggtgtgatcgcgcagcggtatgcgcggcgcaagccctga

SEQ ID NO: 496511 - DNA, 810 bp, Stenotrophomonas maltophilia
atgcattcgttcttccgttggaccaccgcgctgatgctggcgctgggcatggccgtgaccgcgcatgccgacgacactaccgcgcagatccgccaatacgccgctggccatcgcatgctggtgctgggcgaattccacggcacacgcgagacgccactgctggtgcggcagctggtggacgactacagccgcaatggcgcgccggtcctgctggcgctggaactgccacgtgccgagaatcctgtgctgcgcgactatctggaatccgatggcggggccgcggcgcgccagcacctgcacggccgcgcgttctggaccgtacgcgacgaccagcacgatggtcgccgcagccgcgacatgctggcgatgatcgaaggcctgcgcgcgctgaaggcgcagggccgcgcgatcgaggtgattggctacgacgtcaatcacagtaacggcggcagccaggcccgcgatgaccgcatggccgccgaactacggcgcctgtaccagcgcctgcccgatggcgcacggatggttgtgctgaccggcaatgtccacgccatgctgcagcgccccgccgatgctccgccggaaatgcagacccagccgatggcatcggtactgcgcgacctggatatctacagcgtgcggctggaagcgttgcacggccacttctggggatgcatggaccgctgcaaggcgctggcgctgctcgaacggcccgcgcgtgcgccggaggtcaacacccacgccggccgcgagtacgacctgtgggtgtggatgccgcagctgagcgtgggcacgctggtggagccgtga

SEQ ID NO: 496512 - DNA, 894 bp, Stenotrophomonas maltophilia
atgttttccaattaccgccagtactgggacctgaccaagcccaaggtcgtcgccctgatcgtcttcaccgccctggtcggcatggtccttgccatccccggcgtgccgagctgggagcaggtgcgcgccggcctgctcggcttcctcggcatctggctggcggcctcggccgcggccgccatcaaccagctgctggacgcgcacatcgatgcgcagatggcgcgcacctcgtggcgcccgctggtggtgggcaaggtcaagccgtggcaggtgctggtgttcgccggcgtgctgatcgtgctgtcgatgaccctcctggtgctgtgggtgaacctgatcaccgcggtgctgaccttcgcctcgctgatcggctacgcggtgatctacaccgtgtacctcaagcgtgcgacctcgcagaacatcgtcatcggtggcctggccggcgcgatgccgccgatgctgggctgggccgcagtgaccggcatgcagggttcgtcggactgggcgtactcgtcgctgctggtgctgatcatcttcatctggaccccgccgcacttctgggcgctggcgatcttccgccgcgaggattacgccaaggcggagatcccgatgctgccggtgacccacggcgtggcgcacacccgcaagcagatcatggtgtattcggtggtgctggcgctggtctgcctgttgccatacctggtgggcatgagtggtgcgttctacctgggcggcgcgatcgtgctcaacgccgtgttcctctggtacgcctggcgcatgctcgacccgccggatgagctgttctcgatgaagatgttctattactccatcgtctacctgatggcgctgtttgccttcctgctggtggaccactggatcctgccctggttgtga

SEQ ID NO: 496513 - DNA, 1164 bp, Stenotrophomonas maltophilia
atgagcctttccgcgcgtccggcgctgcaccgcaatttccaccgcctggcgtggttcgccatgatcatgaccgcgagcacgatcatgttcggcgccttcgtgcgcctgtccgatgccggcctgagctgcccggactggccgacctgctatggccaggccacctggccgcagcacgtggaagagaccatcggccacccggcggcggagatccgcccgctggagacccacaaggcctggcgagaacaggtgcatcgcttcctggccggcgcgctgggcatcgagatcctgaccctggcgctgctggcaacgcgcaagcggcgattcggaagcacggcggtggtgaccgcctgcgtgctggtggccgccggcataccgctgtacatgatgggctggcacggcaccgccagtgccctggctctgaccggcgaggcgatcctgctgatcgccgcgctgcgctggagcaacatcgatctcgcacgtgcggcgctgctgaccttggcggtggtgatcttccaggccctgctgggcatgtggacggtgaccctgctgctcaaacccatcgtggtgatgggccatctgctgggtggcatgctgatgttcggcctgctggtgtggatggcctggcgcgcgacgcacatgccgatcaccctggccgaagcgccgaagctgaagtggctgatgcgcatcggcgtggcagtgctggttacccagatcgcgctgggtggttgggtcagcgccaactacgccgcactcgcctgcggcggtggcagcgcctcgctggacaacttcccgcgctgcgccaaccagtggtggccgcagcacaacttcgtcgaaggcttcaccctgtggcgcggcatcggcgtggattacgaaggcggcgtgctggatggcgcttcgcgcatcgccatccagatggcgcaccgcctgttcgcggtggtggtggccgtctacctgctgtggctgggcgtgcgcctgttccggttgccgagcatgcgtggctgggccagcgcgctgatcgcgctgctggtgctgcaggtcaccctcggcatcctcaacgtgaagctggcgctgccgctggaagtggccgtggcccacaacggcgtggccgttgccctgttgttcgtactggtcagcctgctggcccgcctgcgtgccccggactga

SEQ ID NO: 496514 - DNA, 570 bp, Stenotrophomonas maltophilia
atgaacactgctacgtccccgcaggcgcgcggttccggccgccggaccctggtgctgctgtttgccgtgttcttcggggcgatggcactggccgccgtgctgcgcttctccggctggcagccgaccgggcaccgcaatgccggccagctgctgaagccgccggtggacctgcgccagcaggcgccgaccctggccagcggccagtcctacccctggaaccccgaggcccgtacctggcgcctgctggtggccccggccggtgcctgcgacgcgcagtgcgtcactttgtcgcagggactgggcaaggtgtggcagctgttcggccataacgccgataatgtcgagatcctgtggctgggtacgccaccggcgtcgatcgcctcgctgcccgcgctgcggccgctggctccgtcgccagccctgcgcgcggcgttgccgggcgtcgatgatccggcgggactgccggtctacgtgatcgatccgaacggcttcgtgatcatgcgccatgccccgggttccgacctcggtggcctgcgcaaggacatggccacgttgctgaaactgaagtga

SEQ ID NO: 496515 - DNA, 717 bp, Stenotrophomonas maltophilia
atgatgcgccagcacacgcgcgtgttcggatggttgctggccgtgctggcgatggccggattcaccgcattggggctgtggcagctgcagcgcatgcatgccaaacaggcaatgttggatgcacagggtccagccgtggcacaggcgttgccgctgtcgcaggccctggcggcgcccggcgcgttgcacggcgtggccgaccacggtcgcttcctgcccggcgtggtactgctggacaaccagatccggcatggccgcgccggcgtgaagatctatcgccccttccgcagtgacgacggcagcgtgctgctggtcgacctcggttggcgtgcgctgccgccggatcgcacgcttccggaggtgccttcgccgccttcgccggtggccgtgcgtgggctgctcgcgccgccaccgtcggcgggactgctactgggcccggcgttctctgctaccggtgaggccgggcgctggctggccagccggttgccggacgacgggctggcgcgcgcgctggggctgcaggcgctacccgaccgcgtgctgaggctggacccagcgctgccctttggcgacgagcgcgatctggacctgctgccgaacacgctgccgcctcagcgccacctgggctacgccgtgcagtggttcgggctggccctgaccgtgctggtggtggccgtggtgctggagcggcggcggaggcgcgtgattacccggtag

SEQ ID NO: 496516 - DNA, 219 bp, Stenotrophomonas maltophilia
atgagtgattcgctgaagaccctgctggtaatcgcgtttctgatcgtcatcgtctggaatctgggcgccggcctgtactacctgctggtcgaccgcgggcagaccaagcgcacggtcaatgcactgacgcgccgcatcgcggtgtcggtcgcgttgatcctgctggtgatcgtgagcatctacatgggctggatcaaaccacacggcatcggcggctga

SEQ ID NO: 496517 - DNA, 876 bp, Stenotrophomonas maltophilia
atggcccagacaccgaccgacgccaacgtgtacttcgtcccggcccagagcaaatggccgttcgtgggttccatcgccatgatggtgaccatggtgggcgtggccagctggctcaacgatgccagctggggacgctggacgttctacatcggcatcgcgatgctggtgctgaccctgttctggtggttcagcgacgtggtgcgcgaatcgcaggccggcaactacaaccaccaggtcgacggatcattccggatggggatgatctggttcatcttctccgaggtgatgttcttcggcgcgttcttcggcgcgctgttctacacccgcaacctgggcctgtcgtggctcagtggcgaaggccgtggggtcatgaccaacgagctgctctggcagggctattccgccggatggccgaccaatggcccggcggcgatcggtggcgcgttccagaccatcccggcctggggcctgccactgatcaatacgctgatcctgttgacctccggcgtgaccctgaccatcgcccaccacgcactgaaggccggcaaccgccgccagctgctgatctggctgggcctgaccgtggtgctcggcctgggcttcctgaccctgcaggcagaggagtacatccatgcctacaaggaactgaacctgacgctcggctccggcatctacgggtcgacgttcttcatgttgaccggcttccacggcgcgcacgtgctgctgggcacgatcatgctgatcgtgatgtggctgcgttcggccaagggacacttcacccgcgacaaccatttcggtttcgaagccgccgcgtggtactggcacttcgttgacgtggtgtggctgatgctgttcctgttcgtctacgtgctttga

SEQ ID NO: 496518 - DNA, 591 bp, Stenotrophomonas maltophilia
atgagcgaggcactggccagcacaccgtcacgcagtgccgggctgccgcgcctgatcggcgtggcggtggcggtgttcctgctgacgttctcgctggtgccgctgtaccgcatcgcctgcgagaaggtgttcggcgtgcgcctggaacgcggtcccggtggcgaagccagcgcaggtgccgcggccggcaagcgcaccgtgcgggtggagttcgatggcggcgtcaattcgcgactgccgtggtcgttccatcctgagcagctgaccatggacgtggtgcccggcgagctcaacgaggcgctgtacttcgcccgcaacgacagcgcagctgccgtggtcggcagcgcggtgccttcggtggcaccggcgcgtgcgtcgggcttcttcagcaagaccgagtgcttctgtttcaccgcgcagacgctgcaggccggcgagaagcgcgacatgccggtgcgcttcatcgtcgatccggacctgccgccggagatcaggacgatcaccttgtcctacaccttctaccgcaacgacgcgctgtccgatcggctggccccggccgccacctcggacggcgcgcacgccgcaccctga

SEQ ID NO: 496519 - DNA, 201 bp, Stenotrophomonas maltophilia
atgcataacgagagcccgctgcagacctgtagagccgagccatgctcggcggatgagaagcagccgaccagcggtcggctctaccagggcggaagcatcgagcagcagcgccagcgtgcgaagcgcaccgcgatgtgggtcggcgccatcgctgtgctggtctacgtcggcttcatcctcagcggggtgatcgggcgatga

SEQ ID NO: 496520 - DNA, 1608 bp, Stenotrophomonas maltophilia
atggcgcactcggcagttgggcacgacgatcaccatcaccagcagagtttcttcgagcgttggttcttctcgaccaaccacaaggacatcggcacgctgtacctgggtttcagcttcatcatgttcatcatcggtgcggcgatgagcgtggtgatccgcgccgagctggcacagcccggcctgcagttcgtcaagcccgagttcttcaaccagatgaccaccgtgcatgcgctggtgatgatcttcggtggcgtgatgccggccttcgtcggcctcgccaactggatgatcccgctgcagatcggcgcgccggacatggcgctgccgcgcatgaacaactggtcgttctggttgctgccggtggccttcagcctgctgctgctgaccctgttcctgcccggtggtgcgccggctggtggctggacgctgtatccgccgctgtcgctgcagggcggctacaacgtggccttcagcgtgttcgctatccacgtggccggcatcagttcgatcatgggtgcgatcaacatcatcgccaccgtgctgaacatgcgtgcgccgggcatcgacctgctgaaaatgccgatcttctgctgggcctggctgatcaccgcgttcctgctgatcgcggtgatgccggtgctggccggtgcggtgaccatgctgctgaccgacaagttcttcggcaccagcttcttcaacgccgccggtggcggtgacccggtgatgtaccagcacatcttctggttcttcgggcaccccgaggtctacatcatgatcctgcccgccttcggcgtggtcagcgagatcatcccgaccttcagccgcaagccgctgttcggctaccaggcgatggtatacgccaccgcggcgatcgcgttcctgtcgttcatcgtctgggcccaccacatgttcaccgtgggcatgccgctgggcggcgagatctatttcatgttcgccaccatgctgatctcgatcccgaccggcgtgaaggtgttcaactgggtcagcaccatgtggcgtggctcgctgacgttcgaggcaccgatgctgtggtcggtggccttcgtcatcctgttcaccatcggtggcttctccggcctgatgctggccatcgtggccgccgacttccagtaccacgacacctacttcgtggtcgcgcacttccactacgtgctggtgaccggtgcggtgttcgcgctgatcgccgcggtgtactactggtggccgaagtggaccgggcgcatgtacagcgagaagtgggccaaggtgcacttctggtggtcgatcgtgttcgtcaacctgctgttcttcccgcagcacttcctcggcctggccggcatgccgcgccgcattcccgattacagcgtggcgtttgccgactggaacctgatcagctcgatcggtgcgttcggcatgttcgtcaccccgttcatgatggccgcgatcctgctgtcctcgctgcgcaacggcgagaaggccgaagcgcgttcctgggagggtgcacgcggcctggaatggacgctgccgtcgccggcaccggcgcacaccttcaccaccccgccgaccatccgtccgggggatctggcgcatgacgacatcacgcattga

SEQ ID NO: 496521 - DNA, 954 bp, Stenotrophomonas maltophilia
atgaagcaaagcagcaggtggggcacgaagtgcgttgcagtggtcaccgccatggtggccgggggactgatgccggcgttggcctgggcccaggcggccgatcccaagccgtggcagctgaacatgggcaagggggtgacccagacctcgcgcctggcctgggaatcgaacaatctctcgttgatcatctgcacggtgatcggcgtcatcgtgttcggcgcgatggcctacgccatcttcaagttccgcaaatccaagggggcagtcgccgccaccttcagccacaacaccaaggccgagatcatctggacggtgatcccggtgatcatcctgatcgtgatggcgtggccggccacggccaacctgatcaagatgtacgacacccgcgatgccgagatgacggtcaaggtcaccggctaccagtggatgtggaagtacgaatacctcggcgagaacgtcaccttcaccagccgcctggaccgcgagtccgaccgcgtgcggcaaagtggcatcgtgccgacccgtgaaagccatccgcactacctgctggatgtcgacaaccggctggtgctgccggtcgacaccaaggtgcgcttcgtcatcacctccgacgacgtgatccacgcctggtgggtgccggcgctgggctggaagcaggatgccattcccggcttcatcaacgaagcctggaccagcatcgagcagcctggcgtgtaccgcggccagtgtgccgagctgtgcggcaaggaccacggcttcatgccgatcgtggtcgaggcggtgtccaaggaggaattcaaacagtggctggcgcagcgcaagccggcgccggctgccgcgccggccacgcctgcggcacctgccgaaccggctgcaccggcgggcgaggcgccggctgcgcctgctgctgcagaagcggccagcgcacctgccactgcagccagcggcgcgtga

SEQ ID NO: 496522 - DNA, 477 bp, Stenotrophomonas maltophilia
atgatcgaggtgcttccagctccggatgggtcaggtacgcagctgcggctgcgtcccccacgggcgctcgatgcccggcagttcgtcctgttgttcaccgtgttgtcgggtgcgatgtggctggtgtccgccctcgggtggttggccggcaatgcattcgcccccctgttcgcgctgctgtacagcctggtgctggcggcggcgctgcgtgccttgtggcgcagcggtgaacggcaggaggagatccgggtggtgccggcgtacgtggaggtcatccccgtacccggtggatcgccggtgttccgggcccacccccactgggtgcgcctgctcaccgacgatgagagggtccggctggcatccagcggccggcaggtggaggtggggagtttcctcgcgccggccgaacgtcagacgctcgcagagacacttgaaagcttgctcgccgccagcgatggcggcaaccgacgacgctaa

SEQ ID NO: 496523 - DNA, 3219 bp, Stenotrophomonas maltophilia
atgaacgcaccttcctcctcccctgccgccagcgacgcccagcgtcccggcgtgctgctgtcgccggaactgccggcgccccccaacccgttccgccaggccatcaccgatgcatggttgaaggacgaggccagccacgtccacgagctgctggcgcaggcccggctgccggccgacgagcaggccagggtgcaggcgctggccgccgacctggtcggccgcgtgcgcgtgcgtgccaaggaccagggcgcgatcgaagccttcatgcgccagtacgacctgggcagcgaagaaggcgtgctgctgatgtgcgtggccgaagcgctgctgcgcattccggaccaggacaccgccgacaagctgatccgcgacaagctggccgatgccgactgggaaaagcacctgggcggcagcgactcggtgctggtcaacgcctccacctggggcctgatgctgaccggcaagctggtacagatgaacgacgccacccgcgccgatgcgcccagcgcgttcaagcgcctggtcggccgcgtcggtgagccggtggtgcgcctggccgtgcgccaggcgatgaagatcatgggccaccagttcgtcatgggccgcaccatcagcgaggcgctgtcgcgctcgcacaagggcgacaacgcgaactaccgctactccttcgacatgctgggcgaaggcgcgctgaccatgaaggacgcgctgcgctacctggaagactaccgtcgcgcgatccacgccatcggcggtgatcacaaggcccgcggcggccgcccggatggcgacgtcaacaacgcaccgggcatctcgatcaagctgtcggcgctgtacccgcgctacgagcacgccaagcgcgagcgcgtgctgaaggacctggtgccgggcgtgctggagctggcgcagctggccaagagctacggcatcggctgcaccgtcgacgccgaagagtccgaccgcctggaactgtcgctggacatcatcgagaaggtgttctccgacgcctcgctggccggctgggacggcttcggcgtggtcgtgcaggcctaccagaagcgcacaccgtacacgatcgaccacctggccgacatggcgcgccgcgccggtcgccgcctgcaggtgcgcctggtcaagggcgcctattgggatgccgagatcaagcgcgcgcagatcgaaggctatccgggctacccggtgttcacccgcaagcagaacaccgacgtgtcctacctggcatgcgccaagcgcctgttcacccatgccgacgcgatctacccgatgttcgccacgcacaacgcgcacaccatcgctgcggtgcgcagcatcgccaacggtggcgtgtacgagcaccagaagctgcacggcatgggcgatgacctgtacgccgaagtggtgccggccgatcgcctgggcctgccctgccgcgtgtacgccccggtcggttcgcatgaagacctgctgccgtacctggtgcgccgcctgctggaaaacggcgccaactccagcttcgtcaaccgcatcaccgatgagcgcgtgccgatcgccgacctgatccgcgatccggtcgagatggtcgcctcgttcgcttcgattccgcatcccaagatcccgctgccggttgacctgctgcgcagccagaaccacgacaggaagaactccatgggcgccaacctcgccaacgacaacgaactgcgcgccctggccgagcagctcaacgcggccgtgaagccgtggcaggccgccccgctggtaccgggtgcgaacccggccggcgcctcgctgccggtgaccaacccggccgacacccgcgaagtggtcggccagtggctggccgccgatgccgccaccgtgcagaaggcgctggcgaatgccgtagccgcgcagccgggctggaaccgcaccccggccgccagccgcgccgccatcctcgagcacgccgccgaccagctggaagcgcgcatgccggagttcatggcgctgtgcgtgaaggaagccggcaagagcctgcccgacagcatcgccgaagtgcgcgaagccgtggacttcctgcgctactacgccaagcaggcgcgcgagcagttcagccacgccgagaagctgcccagcccgaccggtgagtccaacgagctgcagctgcacggccgcggcgtgttcgtctgcatcagcccgtggaacttcccgctggcgatcttcctgggccaggtcgctgctgcactggccgccggcaacagcgtcatcgccaagccggccgaacagaccaacctgatcggctactacgcggtgaagctgctgcacgaagctggcgtgccagccgaggtggtgcagtacctgccgggcgacggcgccaccgtcggtgccgcactgaccgccgacccgcgcgtggccggcgtggccttcaccggctccaccgacaccgcacgtgcgatcaaccgcgccatggccgcgcgtgacgccgccatcggtgtgctgatcgccgagaccggcggccagaatgccttcatcgccgactcctcggcgctgccggaacagctggtcaaggacgcgatcggttcggccttcacctccgccggccagcgttgctcggccgcgcgcgtgctgttcgtgcaggacgacatcgccgacaaggtgatgaccatgctggccggcgcgatgaaggaactgaaggtcggcaacccgggcctgctgtccaccgacgtcggcccggtgatcgacgccgacgcgctgaagatcctgcaggaccacgccgagcgcatggaccgcgaagcccgcctgatcgcggccgccgagctgtccgccgaagcggccaatggcaccttcttcgcaccgcgcgcgtatgaactgaaggacctgggccagctgcacaaggaaatcttcgggccggtcctgcacgtgatccgctggaagggcgaccagctcgacgcggtgatcgaccagatcaatgccaccggctacggcctgaccctgggcgtgcattcgcgcatcgacgagaccgttgatcgcatcagcaacggcgtccacgtcggcaacgtctacgtcaaccgcaaccagatcggcgcggtggtcggcgtgcagccgttcggcggccagggcctgtccggcaccggcccgaaggccggcggcccgcactacctgctgcgcttcgctaccgagaagacggtgacggtgaacaccaccgccgccggcggcaacgcctcgctgttgaccctgggcgactga

SEQ ID NO: 496524 - DNA, 1074 bp, Stenotrophomonas maltophilia
atgccgctgcctgagcgcgttgcacgcggcctggtggtgggcaagttctgcccgctgcatctcggccatgaacgactgatcgacttcgccgccacgcgctgccagcggctgctggtgatcggctggtcgcggccgggctttgccggctacagcgctgcgcgccgcgagcgctggctgcgtgcgcgtttcccgcaggccacggtagcggtgcttgacgacgcgcgtctggccgcattgtgcacgcagcatggcttgccagtgcgagcgctgccgcaggacagtgatgacgaacaggtgcaacgtgactttaccgcctggctgtgcctgaacctgttcggtgggccggtgcaggcggtgtacaccggtgaggactacggtgacggcttcgcgcaggcgctggccacgcacttcggtgcgccggtacgccatgagcagctcgaacgcgcattggacgtcgggcaggcctgcggcacccagctgcgcagcgatccgcatgcgcatcgccatgggctcgcaccgcaggtgtatgccgaccatgtacagcgcgtggccttcatcggtggcgagtccagcggcaagaccacgctggcccgcgtgctggccgagcgtctgcagactgtctgggtgccggagtatggccgcacgctgtgggagcagcgaggcggagagctgacgccgggcgatctgctgcgcatcgcaatgacacagccacagcacgaagacgaagctgtgcggcgtgcgcatcgctggctgttctgcgataccacgccgctggtgacgctgggctacagcggctggatgtttggcaccgcgccgcagccgctgcggcaagcggcacgacgacgctacgacctgctgttcctgtgcgcgccggatattccgtttgaccaggatggcacgcgcgtgggcgaagccttccgggcgcagcagcatgcgtggtacctggagcagctgcaggcagagggtgtcgagcatgtgctgctggaaggcgatctggagacgcgcatcgcacgcgtgcagggcgagctggcgaagcgggcggacaatcggttcagtgtggcccagcctctgtag

SEQ ID NO: 496525 - DNA, 600 bp, Stenotrophomonas maltophilia
atgaacctgtccgatccgaacttccagctggagctggctgccaacatcgccgtcgccggctcgatcctgctggccggccgcaacaacgtgcacacctggtggctgggcatcgtcggctgcgccttgtttgctgccgtgttcgaacgatcgcatctgtatgcggacatggtgctgcagttcttcttcatcgccatcagcgtgctgggctggtggcagtggctgcgtggtgaccatggcgcgccgttgccgatcacttcattgcggccgcgcgcctgggcctggctggcgccgctggcggtagtggccacgttcggctacggctggatgctgacccgcctgaccaatgcctatgcgccgtacatcgattcggcggtgctggtgttgagtgtgatcgcgcagatcctgatgatgcgacgcaagctggaatcgtggtggctatggctgctggtgaacaccgttgcggtgccgctctactacagccgaggcctgcacctgacctcgatcctgtatgtgggcttctggatcaacgcgctggtggccttgcgccattggcggcacctgatgcgggacgaggccagggcagccgatgccgctgcctga

SEQ ID NO: 496526 - DNA, 1428 bp, Stenotrophomonas maltophilia
atgcaaaccgcttccaccattgcccgactgaccctgctggccgtcggcgttgccggtgcgctggccgctgccgatgccaatgctgccgccttccagctgaaggaaaacagcgccaagggcctgggccgcgcgttcgccggctccacctcgaccgaaggtgacgcctcggtcatcgccaccaacccggcctccatgcgcctgctcgacggcaccctggtccagggcgacgtcagcgccatcagcttcggcgccaagttccgcggccagggcaagtacgccaacggcgcgccgatttccggtggcaacggcggcgacgccggcatgatcgccccggttccggccgcgtacttccacgtgccgttcggcgagaacgacaacatgcacttcggtgcttcgctgaccgtgccgttcggcttcaagaccgaatacgaccgcgactgggtcggccgctacaacggcgtcaagaccgagctgcaggccatcgacctgggcgtggcgttctcctatgacgtcaacccgtacctgtcgttcggtgcgtcggtgttcgccgagcgcctgaacgtcgacctgaccagtgctgtcgacaccggcaccgcgatcaacgccactgcccagcgcaccgctgcggcgcgtgtgctggctgccggcggcaccgcagcccaggctgcggcggcctcgcaggccgctgcacgccaggccgcccagctcggcttctcgccgggcaccgccgatggctacctgcgcatcaagggcgatgaagtgtcggtcggctacaccctgggcatgacggtcaccccggtggaaggcaccaacatcgcgttcagctaccgctcgaaggtcgagcacaagatcaccgacggcaaggccgatttcaccatcccgcagaatgcggcggccttcctggccactgctgccccgggtaccttcatcgacagcaacggtcgcgcgaccatcaccctgccggccagcgccaccgtgggcttcacccaccgtgtgaacgaccagtggcagatcatggctgaagtcacgcgcaccgcgtggagcaagttcgaccaggtcgtcgtcgattacgactccaaccagccggacagcgtgctgccgttccactaccgtgacaccaccttcgcgtcgatcggtaccgatttccgcgtgaacgacaagctgaccctgcgcggcggcctggcctatgaccagaccccgaccaccgatgcccaccgcgacgtgcgcgtgccggacaccacccgcaagtggctgtcgctgggcatgacctacgccgcttcggacaagatggaatacagcgtgggctacacccacctgttcaccaaggatccgaacatcacctcgacctcggccaccggcaacaccgtgaccggcaagtacaaggtcagcggcgacgtgctggcggcttcgatgcagtacaagttctga

SEQ ID NO: 496527 - DNA, 693 bp, Stenotrophomonas maltophilia
atgttcgtctccctcccgtcgcgcaagaaggcggccctgcgctgggccacgcccgtgctgttcgcgtcattgtggctggcattcctgtggtcgatctcgcgcccggacgatgcccgcggcagtctctggctggactggggcgccctgtccaccggcctgacccgtccgctggactggtgggcgaccctgcaggacggcagcgtgctgcgcctgttcactgcgctgttcctgcacgccgactggtcgcacctgctgggcaacctggtgttcctgctgatcttcggcctccccgccgagcgggtgctgggaccctggcggttgctgctgctgttcctggtaggcggcgcggtgtccaacctggtggcgatctacaccatgggcagcccggaccagatcatcatcggcgccagcggcgcggtgtcggcgctgatcggcgcctatctggccctgttccccggtgcccggctgggcgtggtgatcccgctgggcctgttcctggagttcgtgcgcgccccggcctacctgctgatcggcgtctgggccgcgctgcaggtggtgttcgcccatatcggccccagcttcggcatggtggcctggtgggcgcacatcggcggcttcgtgttcggcgtggtgtatggcgtgtacgtgcgcgccgcgatcgcgcgccgcctgcgcaagcggcacggattctga

SEQ ID NO: 496528 - DNA, 1461 bp, Stenotrophomonas maltophilia
atgcgcgcagcccgtaccgccaccctcttgctggccctgttgccagcgctgtcctgggcgcagcagaccgcgcccgccccgagccaggaaaccagcgggcaggcagcgaacagcgaggaggcggtgacctcgaaggtgccgctggaggacatccgccgtttcgtggccgtgtacaacgcggtgcgcgccgcctatgtcgatccggtcgatgacaagaagctgatgcagtcggccgtgcgtggcctgctgctcgacctcgatccgcacagcacctacttcaacaaggaagacgcgcaggccttcgacgagcaggccaatggtgcctacgagggcatcggcgtggagctgcagcagcagccggacaacgccagcatgaaggtgatcgcgccgatcgacgacaccccggcggccaaggccggcatcctcgctggtgacctgatcatcgccatcgacggcaagccgatcagtgcgatcgatgccagcgagccgctgcgcggcccggccggcagcgaggtggtgctgaccatcgtgcgcgaaggcaagcccaagccgttcgacgtgagcctcacccgccagaccatccgcgtgaccagcgtgcgcagccgcctgctggaacccggctatggctacatccgcctgagcaccttccaggccgataccggttcggacttccagaagcacgtgcagcagctgcagaagcagtccggtggccagctcaagggcctggtgctggacctgcgcagcaacccgggtggcctgctgaccgctgccgtgcaggtggccgatgatctgctcgacaagggcaacatcgtcagcacccgtggccgcatcagcatcagcgatgcacgattcgacgcgaccccgggcgacctgctgaagggcgcaccggtggtcgtgctggccgatgccggttcggccagtgcatcggaagtcctggccggcgcgctgcgcgacaacaagcgggcgcgcgtggtcggcagccgtaccttcggcaagggctcggtgcagaccgtgctgccgctggacaacggtgattcggtgaagctgaccaccgcgcgctattacacgcccagcggcaagtcgatccaggccaccggtatcgtgccggacgtcgaactgaagcccgccgccacgccggccgaggatgcactgccagccagcctgagcgactacagcgaagcgaccctgccgggccatctgcgcggcgatgacgaaggcacggagggctaccacgccggtgcggtgctgccgggcgatggcccgatcaacgacgcgctggccgagctgaagaacccaggctcggtggccgcacggttgaaggccgaggccgccaaggcggatgcggccaaggccgcgaaggccgctgcggcgaagccggaagcaaagccggaagcaaagccggaagcaaagccggaagcaaagccggaagcaaagcccgaacccgtcccggccaagccttga

SEQ ID NO: 496529 - DNA, 1383 bp, Stenotrophomonas maltophilia
atgtgcggctggcaggccgcgtgcggagatgtcaccattccccggtaccccccgcaactgcctgaagtcactggaaagcccttgcgcgacaacgccttcccatcacgccgacatcacatcgccgccgtacgcggcgggcgctggctgctgctggggctggctgtggcgctggctctgcccctgccgggtgctgcgcagaccacccgcgagaccgagcgcaagctgcagaagctgcgtaccgagctgaagggcgtggcgcaggagcgacggcagatcgaagggcagcgtggccaagcatcgcaacagctgcgcgaggccgacgagaaggtggcacgcaccggccgcgcgcttgcgcagaccgaagcggcgctgcgcgagcaggcccaggccctggcccaggccgagcagcgccgcggcagcctgcaaaccaacctggcccagcagcaccgcgaactggccggcctgctgcgcgcggcgtatcagcttggcaatcacgcaccgctgaagctgctgctgtcgcaggatacggtggccgatgccaatcgcgccctggcctaccatcgttacctgcagcgcgaacgagcgcagcgcatcaccacgctcaccgccgacctgaaggaactggaagcgctgcaggcgcagatcgccgagcgcaagcagaagctgcagggggcgcagcaggaccagaagcagcaggcagcggcgctggcggccgaccgccgtgaccgcgcgcagaccgtggcctcgctcgacgaacgcttcaaggaccggcgcgagaaggaacaggcactgggccaggatgccaaggcgctggaaacgctgctggccaatcttcgtgccgctgccgcccgggccgaagccgagcgtcgcgcggcggcgcgtcgagctgctgccgaaaaggccgctgccgagcgggccgcacgccaggcggccgcacagggccggccaccgccgccggcaaccaaggttccgcctgcggtggcgtcggcaccggcaccgaaggtcggcggcctgggttggccgttgtccggcaacctgctggcccgctatggcggcaagctgcccgatggccgtaccagcagcggcgtgctgatcggcgcgccggccggcagcaccgtcacggccgtggccgacggcaccgtggtgttctccgactggatgaccggctacggcatgatcctgatcgtcgaccacggcaatggctacatgagcctgtatgcccacaacgacaccctgctgaaggatgccggcgcacgggtcagccgcggtgatgcggtggccaaggtcggcaattccggtggccagggcgtcaccgcgctgtacttcgagctgcgccgtggcgggcagccggtcaacccggacagctggctgcagcggcgctga

SEQ ID NO: 496530 - DNA, 663 bp, Stenotrophomonas maltophilia
atgaaaactctatccattccgctgctgttgggcgtactgctggtcaccgggccggtctgcgcccaggagaacatcagcaaggtcaacggcagcatcagcgccgaacccggccaacgctacggcaagctggacaccgtcaacggcggcatccgcgtcggcgaaggcgtcgagaccggaagcatcgacaccgtcaacggcggggtgaaggttgccgaccgcgcacgcaccggcaagatcgaaacggtcaacggcggtgtccgcctgggtcgcgaagtgatcgccagcggtggcgtcagcaccgtcaacggcagcatcttcactgatcgcggcagccagatcgaaggcggcgtcgagaccgtgaacggcggcatcggcctggtcgagagccgcgtcggcaaagacgtcgagaccgtcaacggtgacatcaccgtcggcatcggttcgcaggtcaacggcggcgtgcatgtgcgcaagccgaacttcagtgtctcgctcaccgccagccgcaagccgcgcgtgatcatcggccccaacgcggtcgtcagtgggccgctgcagttcgagcgcgaggtggtgctgtacgtgcatcgcaccgcacgcatcggcccggtcaccggggccgagccgatcccgttcgataccgaaaccgcgccggccgactga

SEQ ID NO: 496531 - DNA, 1710 bp, Stenotrophomonas maltophilia
atgccccgcaaactcctcctgtgcctggccgccgcggccgcgctcagtgcctgcaaaggcgaatccacgccggctgccacgccgcccaccgataccgctgccgcgaagccggccgcccatcagttctcaccggagatcaacgccggcgacttcgccgagatggtcaagaccctggcttcggatgagttcgaaggccgcgccccgggcagcaagggcgaagaactgacggtcaactacatccgcgaccagatgcagcgcatcggcctgcagcccggcaacggcgacagctggttccaggatgtgccgatgaccgagaccacggccgatgaatcgaccgtgctgaagatcacccagggcggcaagaccaccgaactgaagttcggcaccgacatggtggtcggcacccgtaccggccaggccgaggtgaaggtcgatgccagcgacctggtgttcgtcggctatggcgtcgatgcgccggagcagaagtggaacgactacgccggtcaggactggaagggcaagacggtcgtgatgttcgtcaacgacccgggcttccacgtcgacgacgcgaagctgttcgacggcaagcgcatgacctactacggccgctggacctacaagttcgaggaggccgcccgcaagggcgccgccgccgcgctgatcgtgcacgacaccgccggcgcgtcctacggctgggacgtggtgaagaattcctgggctggcccgcagtacgacctgcccgccaaggatgacccggaagcgcgcatcccggtacagggctggctgagcgccgacgcggccaaggcactgttcgccggtgccggcctggaccttgcccaggcctacaaggacgccagcaagcgcggtttcaagccagtgccgctgaaggccaccgctgcggtcgacctgaagagccagatcgcacagaagcagtcgcgcaacgtggtcggcgtgctgccgggcagcaagcgcgctgacgaggccgtcctgtacatggcgcactgggaccacctgggcaagcatgagggtgagaccggcgacaacatctacaacggcgcggtcgacaacgccaccggcgtggctggcattctcgaagtggccgaagccatggcccaccaggagccgaagccggagcgttcggtggtgttcctggcggtgaccctggaagagtccggcctgctgggttccaagtactacgtcgcccacccgaccttcccgctggacaagatcgccggcgtgatcaacatcgatgcgatgtcggtggccggccgcgccaaggacgtgaccgtcaccggcttcggcagctcggagctggaggacatcctcaagccgctggccgccgcccaggaccgcaccctgcacggtgagacctcggtacagagcggcttctacttccgctccgatcacttcaacttcgcaaaagcgggtgtgccggccctgtacgccgatggcggcgaagacctgcgcgagggtggcgtggaagcgggccgcaaggcggcggcggactacggcgccaaccgttaccacggcccgaaggacgagttcgacgccgccacctggaagctggacggcaccgtcgaagacctgcagctgatgtacggcgtgggcaaggaactggccggtggcgatcgttggccgaactggtatgcaggcaatccgttcaaggcagcccgcgacgcgatgatgaaggacaaggtcccggccaagtaa

SEQ ID NO: 496532 - DNA, 1176 bp, Stenotrophomonas maltophilia
atgtccatcgtccgcatgaccgacctcgacctctccggcaagcgcgtgctgatccgccaggatctgaacgtgccgatcgagaatggccgcatcacctccgaacagcgcatcaccgcttcgctgccgacgctcaagcgcgcgctggagcagggcgcggcggtgatggtcacctcgcacctggggcgcccgaaggaaggcgtgtggagcgaagcggagtcgctggcgccggtcgcccagcgcctgtccgagctgctcggccgcgaggttccgctggtgcgtgactgggtcgacggcgtcgacgtgcagccgggccagctggtgctgctggaaaactgccgcatgaatgtcggcgagggcaaggacgacgaggccctgtcgaagaagtacgccgccctgtgcgacgtgttcgtgatggatgcctttggtaccgcacaccgcgcgcaggcctcgacccatggcgtcatccgcttcgccccggtcgcggccggtggcccgctgctgatggccgagctggacgcgctggcgcaggcgctggacgcaccggccaagccgctgctggccatcgttgccggcagcaaggtcagcaccaagctggaactgctggccaacctggtcggcaaggtcgaccagctgatcgttggtggtggcatcgccaacaccttcatcgctgccgccggctacaaggtcggcaagtcgctgtatgagccggacctgctggacaccgcgaagaagatcgtggccgatgccaaggcgcgtggcgccgacatcccgctgccggtcgacgtggtcaccgccaagcagttcatgccggacgctgttgccgaagtgaaggcggtcgacgccgtcgccgaggacgacctgatcctggatattggcccgcagaccgctgcgcagtacgcgcagctgatcggaaaggccggcaccgtggtctggaacggcccggtcggcgtgttcgagttcgaagccttcagcaagggcaccgaagcgctggcccgcgccatcgccagctcgccggcattctccatcgcgggcggtggcgacaccctggcggcggtcgacaagttcgatatcgccgggcaggtcagctacatctccactggcggtggtgcgttcctggagttcctggaaggcaagaccctgccggccgtcgccgcgctcgacgcgcgcggcgcatga

SEQ ID NO: 496533 - DNA, 654 bp, Stenotrophomonas maltophilia
atgagtgccgaccgtagcagggatgtcctgttcttcgacctcgacggcacgctgatcgattcgcaggtgggcatcaccgcctgcatcgcctatgcgctgcagaagatgggccatccggtgccgccgcaggagacgctgctgggctggatcggtccgtcgctgcgcaccaccttcgcgccgctgttcgtcgaaccggcacgggtggaacaggcggtgggctactaccgtgagcgcttcgacgtcgaaggctggcgcgaacacacggtgtacccgcaggtggaagacacgctgcgcacgctgcatggccgtggccaccgcctggcggtggtcaccgccaagaacgagccgcatgcgcgccgcatccttgcgcacctgccgtttggcgggctgttcgaggagatcatcggttcgaccctggatggctcgcgcagccacaagccggagctggtcggggaagctctgcgccggctgcaggtgcagcccgcacagtgctggatgatcggcgaccgccgcatggacatcgaaggcgcgcgtcaccacggcctgcgcagcgtgggtgtgctgtggggctttggcggtgaggcggaactcagcgcggccggcgctggccagctggcacgcgaaccggcgcagctggaaacgctgctggcctag

SEQ ID NO: 496534 - DNA, 1467 bp, Stenotrophomonas maltophilia
atgttcgagcgtcagcgtcgcaccaagatccttgccaccctcggtccggccactgatccgccgggcgtgctggaggatcttttccgcgccggcgtcaatgtggtgcgcctgaacttcagccatggcgatccgtccggccaggccaagcgtgccgccgaagtgcgtgctgccgcggcccgcgtaggcgtggaagtgggcatcctggccgacctgccgggcccgaagatccgcatcgagcgcttcgccgaaggcaaggtgcagctgaaggcgggtgaccgcttcgacctgatcgccagcgagaacgccggcccgggcaacgccagccaggtgggcgtgagctacctcggcctgccgcaggacgtgggcccgggtgatgtgctgctgctcgacgacggcctgatgcagctgcaggtggtggaagtgcagggcgagcgcatcgtcaacaccgtgctcaacgatggtgtgttgtccgaccgcaagggcctgaacaagcagggcggcggcctgtcgctgggtgccctgaccgagcgcgacaaggaactgatcggcatcgttgccaagatcggcgtggacttcatcgccgtgtcgttctgccgcaacgcgcaggacatgaacgacgcgcgcgacatcgcccgctcgcacggctgtgatgccgccctggtgtcgaagatcgagcgcaccgaggcgatcgagaacctggaagaaatcgtcgaggccagcgacgtggtgatggttgcccgtggcgaccttggcgtggaaatcggcgatgccgagctgccgggcctgcagaagaagatcatcaaggcctcgctggcgcagaacaaggtggtgatcaccgccacgcagatgctgcagtcgatggtggaaagcccgatcccgacccgcgccgaagtgctggacgtggccaactcggtcatcgacggtaccgacgcggtgatgctgtcggcggaaaccgccgccggtgcctacccggtcaaggcggtggaagcgatggcacgcatctgcctgggtgccgagcgccagttccagaccgagaccgatttcaacgcctcgccgcgcaacctggaacgtgccgaccaggcaattgccatggccaccatgttcctgtcgcagcatgtgggcgtgcgcgcgatcgtggccatgaccgaatccggcggcaccgcgcgttacctgtcgcgtttccgcgccaaggcgccggtgttcgcggtcacccgccatgacggtgcgcgtcgccagatggcgctgatgcgcgatgtgttcccgatcaacttcgacagccgcggcctgaccccgcgtgaagcggcgcgcggcagcatccgcctgctggtcgaatcggaactgctgcaggccggtgaccgcgttgtgttcaccagcggcgagcacatggaaacccatggtgccaccaacaccctccgcctgctggaagtgggcgaggacggtcgcgccatcggcctgggcgatctgtaa

SEQ ID NO: 496535 - DNA, 1005 bp, Stenotrophomonas maltophilia
atgagcatcgaacagctggctgaaaccgcccaggccatggtcgccccgggcaagggcatcatcgcgatcgacgaatccaccgctaccatcgccaagcgtttcgccggcgtcggtgtcgagaacaccgaggagaaccgtcgcgcctaccgcgagctgctgctgaccacgccgaagctcaacgagcacatttccggcgccatcctgtacgacgagaccatccgccagtcgaccaaggacggcgtgccgttcgccaagtacatggccgaccacggcatgattccgggcatcaaggtggacaagggtgcgcacccgctggccggctgcccgggcgagctggtgaccgaaggcctcgacggcctgcgcgagcgcctgcaggagtattacaagctgggcgcgcgcttcgccaagtggcgtgcggtcatcaacatcggcgagagcatcccgtcgggcacctgcatcgagtccaacgcccatgcgctggcccgctatgcagcgctgtgccaggaatgcggtctggtgccgatggtcgagccggaagtgatcatggacggcgaccacgacatcgaaacctgctacgaagtcaccgaagccaccctgcgctcgctgttcgacgcgctgtaccagcagaacgtgctgctggaaggcaccatcctgaaggcctcgatggtcatctccggcaaggactgtgaagagcaggccgatgtcgaggaagtggccgagtcgaccgtgatgtgcttgaagagcaccgtgccggcgatcctgccgggcgtggtgttcctgtccggtggccagagcgacgagcagtccaccgagcacctgaacgcgatgaaccagctgggcaacctgccgtggccgctgagcttctcctacggccgcgccatgcagcaggccgcgctgaagctgtgggccaaggacatgaagggcaactacgctgctgcccagaagacggtgtacgagcgcgccaaggacaacggcctggccgcgctgggcaagtggaacggttga

SEQ ID NO: 496536 - DNA, 1143 bp, Stenotrophomonas maltophilia
atgcgtttggcagcaatcacactggccgttgccacggtcctggtcgccagcggttgcaaccgcatcggcggcggcgcggacgcgggcaaggccgcgtcactcgatttcgacaagccggtatccggcgagatcacctcgcgcagtggcatcaactacaacgacggcagccaccaccagctctaccagatcaagctggaagacaagcagctggtcgggctgaagctgaccggttcgctgagcggctcgatcgccgtgttcaacaacggcagcctggtggccagcagcaacaccggctacgagcgcgaaggcgacgtctcggtggccttccgtgccaacggtggcggcacctaccaggtggcggtcaacgccaacggctcgaccgactacggtccttaccgcctgcgcgccgagaagctggtgccgtacgacggcaagccgctggcgggcagcggcgagatcgtcgacatgctggccggtggttcccaggactacaccctgcaggtggacaaggccggcctgtacgagatccgcctggtgtcggatgtcttcgatccggtgctgaagctgtcgggccagggcgtggatgcagagaatgacgatggcggcgacagcaccaactcgcgcctgaccctgtcactgaagccgggcaagtacaccctgaccgcgcgcggcctcggcgacggcgtcagcggcatgttcaccctgtcggccaaccgcatcgagctgcccggcaatctggtcgagcgcgatggcacggcactgccgaagtcgggcagcgtgtacacgatgctcgacaacgatggccgtcgccgcttcctgctgtcgctggaccgcccggccgatgtgcgcctggatgcgatttccagccaggttgataccgtgctgcgcgtggtcggtggcgacgtcgagctgaccgacgacgatggtggcaacggcaccaattcgcgcctggaagagaccctgccggccggtcattacacggtcgacgtgtccagcctgaacaatggcgcgggcatggtggaagtgcgcgtgcaggtggatggcgccagcgccgacggggctgcggcctcggcggcacgcgccgcagccgacgcagccgccgtggccgatgacgccgccgcggtggaagctgccagccgttga

SEQ ID NO: 496537 - DNA, 600 bp, Stenotrophomonas maltophilia
atgaagatcgaggtttggcagggtgacatcacgaccctggcggtggatgcgatcgtcaacgcggccaacgaaacactgctcggtggcggcggtgtcgacggcgcgatccatcgcgcggccggccccgcattgctggccgagtgcgcgcagttgccggagctgcgcccgggcgtgcgttgcccgacgggcgaagtacgcgccaccagcgcccatgcgctgccggcgcgccatgtactgcacacggtgggcccggtctggcatgacggccagcgcgacgaaccggcgctgcttgccaactgctactggaagtcgctgcagctggccgagtcgctgggcgtgcagtcgatcgcgttcccggcgatcagctgcggcgtctatggctatccgctgtaccaggcggcgcagatcgcagtgaccgaaacactggcgtggcagcgcagccatgcgcaaccgatgcgcatcgtgctggtggcgttcaataccgctacggccaaggcctaccagcaggcgttgagcgccgccgggcaaagcgcggacagcgaaccgcgcgggtcgatgctgccgccgctgggtgatgcgggttttgccgccgcgcactga

SEQ ID NO: 496538 - DNA, 960 bp, Stenotrophomonas maltophilia
atggccctgtacgactccatcctcgacaccgtcggcaacacccccatcgtcaagctgcagcgtctggcaccgccgcaggtcagcgtttacgccaaggtcgagtcgttcaatccgggcggctcggtcaaggaccgcctggctttggcgatcatcctcgacgctgaagcgcgtggcctgctcaagccgggcgacaccatcgtggaggccacctcgggcaataccggcgtggcactggcgatggtcgccgcagcgcgcggctacaagttcgtggcgaccatggtcgagaccttctcgatcgagcgccgcaagctgatgcgtgcctatggtgccaaggtgatcctgaccccggccgccgaacgcggcagcggcatggtgcgcaaggcagccgaactggccgaacagcacggttggttcctggccagccagttcgccaacccggccaacccggcctatcaccgcaacaccaccgccgcggaaatcctgcgcgacttcgccggcaagcggctggactatttcgtcagcggctggggcaccggcggcacactcactggtgtgggcgaagtgctgaaggtcgcgcgcccgcagacccgcatcatcgccaccgagccggccggcgccgccctgctcaagggcgatgactggaagccgcacaagatccagggttggaccccggacttcgtgccggacgtgctcaaccgcgatgtggtggacgaactggtctcggtcgaagatgaccgcgcgatcgccaccgcgcgccgcctggccgccgaggaaggcatcttcgtcggcatctctgccggtgccaccgtggccagcgcgctggacgtggctgcccgcgccgaacccggcgcggtgatcctggcgatgctgccggacactggtgaacgctatttctccacaccgctgttcgccgatgtcaacgaaggctccgacgacgactggctggccggcctgccgtaa

SEQ ID NO: 496539 - DNA, 984 bp, Stenotrophomonas maltophilia
atgacgctgacccagctgcgctacctggttgccatcgccgacgccgagctgaacatcacgctggccgcctcgcgcgtgcatgccacccagcccggcttgtccaagcagctcaagcagctggaggacgagctgggtttcctgttgttcgtgcgcaagggccgcagcctggagtcggtcaccccggccgggaccgaggtgatcgcccgcgcccgcgccgtgctggccgaggccaacaacatccgcacctacgccgccaaccagcggcgcgagagccagggccagctgatcctgaccaccacccacacccaggcgcgcttcgtgctgccgccggcggtggcggcgatcaagcaggcttacccgcaggtgagcgtgcacctgcagcaggccggcgaagccgacgcgctggatcgcttgaaccagggtgacgcggatatcgccatcatcagcaccgctgggggggagcccaccgatggcatcgcggtgccactgttccgctggcgacgcctggtggtggtgcccaagggccacccgctggaccgcgccgggcgtgcaccggacctggccgcgctggcccggcaaccattgatcagctacgaatcctcgacccgcccgaattcgtcgctgcagcgtgcgtttgccgccaacgggctggtgccggatctggcgctgaccgcgctggatgccgatctgatcaagacctatgtgcgtaccggcctgggcgtgggcctgctggccgaaatggcggtcagttccaacgacgaagacctgaggtcgtggccggcgccggacccgatcagcgagtgcatcgcctgggcggtgctgccgcgcgaccgcgtgctgcgtgattacgcgctggagctggtgcatgtgctggcaccgcagatcgatccccgcgacctgcggcgggtgctggatggcaaccaggcggccgcgtggccggtgccaccgacctgggaatcactgacccagaccatcacggtgtga

SEQ ID NO: 496540 - DNA, 420 bp, Stenotrophomonas maltophilia
atgacccggctgtcccgcccgcagcgccttctgctccagcttgccgtcctggcgacgctgctgatggtgcttgcgccgctggtcagccgcgcgctgcatgcgcagccgatggaccacgctgcgatggccggcatggaccacgcgcacatgcagcatgatggtgccgtagcggaccagagccccttgcccgggcacacggatccgaccccaccggccgatccccacgccatgcacggcgaagcctgcgaatactgcgtgctggcgatgcgcctgctgccgtggctggccgtgctggtgctgctgttgccgctgttgtggcggccgcggctggtgttcccctggtcgcggcaggtgctgcccgcgctgtgctggccggcgcatgccgcgcgtgggccgccgcctttctccatcgttcgctga

SEQ ID NO: 496541 - DNA, 2064 bp, Stenotrophomonas maltophilia
atgaaaatgacttcccgccccgcgggcgcctgtgcgcgcctgccggttgcccttggcctggccgtagctgcaacgctcgcccatgccgcgcccgccgaagaggcgcgtaccctcgacaccctggtggtcatcgctgccgcaccgtcctcgccactgcactgggtgaccgacccacgcctgccgcggcagccggtacccgccagtgatggcgccgattacctgaagaccgttcccggtttctccgccatccgcaacggcggcaccaacggtgacccggtgctgcgcggcatgttcggttcgcgcctgaacatcctcagcaatgacggcaacctgatcggtgcctgcccgtcgcgcatggacaatccgctgtcctacatcgcgccggagagcttcgaccggctgaccatcatcaagggcccgcagagcgtgcgctggggcgcaggtgcctcggctggcaccgtacgcttcgagcgcgatacaccgcgcttcgaagagccgggcctgcgtgccgatgccagtgcgctggtcggttcgcgcaaccgcaacgaccaggtgctggacctgaccctgggcaacccgaccggctatgtgcgcgccagtggcaaccgttccgaagccgatgactacaaggacggccacggcgatgtggtgccatcgaagtggcgcaagtggaacggtgacgtggcgatcggctggacgccggatgccgacacgctgctggaaatttctgccggtgccggagatgcgatcgcacgctatgcgggacgcggcatggacggggccgcgttcgaacgcaccagctatgccgcgcgcttcgagaagcgcaacctgccgggtgcgtgggacacggtgcaggccaacgtgtactacaacgaggccgatcacgtgatggacaactacacgctgcgtgcgccgaacccgaacagcacgatgccgatgccgatggcttcgaacgtggatcgccgtacccagggcggccgggtcagttccgagtggcgctggcaggacgtgcagctggtggcgggcgtggacggcgaagacagccgccatcgtgggcgcatgggcatgggccgcggcacctatcgccaggtggcgtgggagaccgatgcccacttccgccgctatggcgtgttcaccgagttgaccctcggcgccggcaccgatcagcgttggatcagcggcctgcgcatcgatcgcgccagcgtgcgcgacgagcggcagtcgctccgcagaatgatgggcaacatgcccaatccgactgcgggccagcgtcgcaaggaatggctcggcagtggcttcctgcgctacgagcaggacctggccgacggcctgacctggtacgccggcctcggccacagtgaacgcatgcccgactactgggagctgttctcgcccgaccacggcccggccgatgcggtgaacgcgtttgccggcatccagcccgagcgcaccacccagctcgacgctggcctgcagtacaagggaccgcgcgtgcaggcctgggtctcggcgtacgccgggcagatccaggactacatcctgttcacctaccaccgcagcggcgcgatggggatgagccaggccagcaacgtcgatgcgcgcatcgccggtgccgaggcggggctggaagtgagcgtggccgaacagtggaagctgggtggcacgctggcctatgcctggggcgagaaccgcgaccagcagcgtccgctgccgcagatgccgccgctggaagcgcgcctgagtgcgaactgggaaggccagcgctggagcgccggtgcgctgctgcgcgcggtgacccaccagcaccgtgtcgcagatggccagggcaacgtggtcgcacaggatctcgggccgagcgcgggctttgccaccttcgcgctcaacgcggcgtaccgtttcggttcgcagctgcagctcagcgcaggcgtcgacaacctgttcgaccgcgcctacagcgagcacctgaacctggccggcagcgccgacttcggcttcccggccgacccggtgcgcatcaacgagccggggcgcagcgtgtggatgaagctgaactaccggtattga

SEQ ID NO: 496542 - DNA, 1107 bp, Stenotrophomonas maltophilia
atgttggctcgtatcgcttcgaccctggcccttggcctcagcctggccgtgctggccgggtgcgcaggcaaacaggaggccgccgcgcgtcggcagggagaagcggtgccggtcactgcgcaggtcgtgcagtcccgtcagtggagcgacaccctgcaggcgcttggcacggccaaggcgcgcgaatcgatcagcgtgaccgccaaggtcagcgagatcgtcgagaaagtgcatttcgaaagcggccagcacattgctgccggtgcgccgatcgtgacccttcgtgggcaggcccaggaggccgcgctggtgcaggcgcaggcgaccttccatgaagccgatcagctgtacaagcgccagcgcgagcttgccgcccagcggctggtgtccagcgccacgctggatacgcagaagtcgatccgcgatgccgccgaagcgcgcgtgatgcagatgcaggcagacatcggtgatcgccgcgtgcgcgcgccgttcgccggcgtgctcggcatccgccaggtcagccctggctcgctggtgaccccgaccacggtcatcgccacgctcgatgacatcgagcacatgcacatcgatttccaggtgcctgaagtggaactggctgcgctgggcgtcggtgacaaggtcagcgccaccagcgtggcctggccgggccgcaccttcgagggcgtggtcagcaccattgatgcgcgcatcgacccggccacccgtgccgtgaccgtgcgcgccgactttgccaacggcgaccatgcgctgcgtcctggcatgctgctggacgtgcgcctgttccgccccgagcgcccggcgctggtgattccggaaatcgccgtggtgcaggtcggtcgcgataccttcgtgtaccgcatcaaggctgacgacagcgtcgagcgtgtggacgtggtgaccggcgcgcgccgtgccggcgtggtcgagatcaggcagggtctggaagcgggccagcgcatcgtggtcgatggcaccggcaagctgcgtccgggcctgaaggttgccgccaaggacgcagcgcccgccagtggtgcaaagcccgctgaagacgctgcgccggccgcggccgagggccacggcggatga

SEQ ID NO: 496543 - DNA, 3126 bp, Stenotrophomonas maltophilia
atgaagctgtccgacatctccatccagcggccggtgttcgccgtggtgatgagcctgttgctgctggtgctgggcgtgatgtccttcacccgcctgaccctgcgcgaactgccggccatcgacccgccgatcgtctcggtctcggtggactacaccggcgcctcggcggcggtcattgaaagccgcatcacccaggtgctggaagatgcgctggccggcatcgaaggcatcgatacgatcaatgcgcgcagcaccaacggccgctcgcaggtcagcatcgagttcacctccaaccgcgatatcgaagcggcggccaacgacgtgcgcgatgcggtcagccgcgtggccgaccgcatgccggaagaggcgcggccaccggagatcgccaaggtcgaaagcgatgccgaccccatcatctggttcaacatggtctcctcgaccatggacacgctggagctgagcgactacgccgaccgttacgtggtcgatcgcttttccagcctcgatggcgtggcccaggtccgcatcggcggccgccagcgctatgcgatgcggatctggctggaccgggaccagctggccgcacgcgggctgaccaccggcgacgtggaaaccgcgctgcgcaacgagaacgtggagctgccggccggccgcatcgagtcgaccgaccgtgatttcaccctgcgcgtggagcgcaactacatcaagcccgaagacttcgcgaccatcccgctgggcaagggccgcgacggttacgtggtgcgcatgggcgacgtggcgaagatcgagctggcctcggccgaacgccgcgcgtactaccgcagcaacggcgaaccgggcatcggcttgggcatcgtcaagacctccacggccaactcgctggacgtggcgcgtaccgcgcgcgctgaagccgagcgggtggcgctgaccctgcccaagggcacgcagatcttcgtcgccttcgacaacaccaccttcatcgaagcggcggtggaccgcgtctacgccacgctggtggaagcgatgatcctggtgctggcggtgatctggctgttcctcggcagtttccgcgccgcgttgatcccggcggtgacggtgccggtctgcctggtcgcggcgttcatcgcgctgtatgcgttcgatttctcgatcaacctgctgaccctgctggcgctggtgctgtgcatcggcctggtggtggacgatgcgatcgtggtggtggagaacgtgcagcgccgcatcgacctgggtgagccaccgctggtggcctccaagcgcggcaccgcgcaggtcgccttcgcggtgatcgccaccaccgccgtgctggtggcagtgttcctgccggtcggcttcctggaaggcaacaccgggcgcctgttccgcgaactggcagtggcgctggccgccgccgtggcgttgtccgcgttcgtggcgctcacactgacgccgatgatggcctccaagctgctcaagccgcacaccgggcaggcgccacgtggccggcacggcttcatcaaccgcaacctggaacgcctcgcgggtgcctatgggcgggtgctcgatcaccacgtcgaccgcacctggatctacctgctggtgatgctggccgcgctggtcgccagctggggcctgctcaagctgctgccctcggaactggcgccggccgaagaccgcggttcgttccagatcatgatcgacggcccggaaggtgccggctacgactacaccgtgcagcaggtgcagcaggtggaggcgctgctggccccgcatgtcggcccggacaagccgatcgtgcgtgccaacccgcgcgtgcccggtggcttcggtgccagcgaggaaatgcacaccggccgcgtcagcatcttcctgcagccgtggcgccagcgcagcgaggccacgccggacgtggccaacgaactgcagaaggaactggacaccatccgcggcgtgcgtgtgcgtacccaggtcggtggcggcctggtgcgcagcggcgggcagccgttccagatcgtgctgggtgggccggagtacgcggagatcgcgcagtggcgcgaccgcatcctgctgcgcatggccgacaaccccggcctggtcggccccgactcggactacaaggaaacccggccgcagatgcgggtcaacatcgaccgccagcgtgcggccgatctcggcgtgccggtcaccgcgatcggttcggcgctggaaaccatgatgggctcgcgccgcgtcaccaccttcgtcgacaatggcgaggagtacgacgtgctggtgcaggccggacgtgacggtcgcgccagcccggccgacctggccgcgatccgcgtgcgcgccacctctggcgagctggtgccgctgtccaacctggtcacgttgagcgaagtggccgaggccggcaccctgaaccgcttcaaccgcctgcgctcgattaccatcagtgccggcctggcgccgggctatccgctgggcgaggccattgcctgggcgcagaacgtggcccaggaagagctgccgcagtacgcgcaggtgaactggaagggtgaatcgcgcgagtaccagagcgccggtggcgccgtgctgctcactttcgccatggccctgctggtggtctacctggtgctggccgcgcagttcgagagcttcatccacccgctcaccatcatgctgaccgtgccgctgggcgtgctcggcgcgctggtcgggttgtgggtgagtggcggtacggtgaacctgttcagccagatcggcatcgtgatgctggttggcctggccgcgaagaacggcatcctcatcgtcgaattcgccaaccagctgcgcgacgatgggcgcagcgtgcgcgaggcgatcattgaatcggcgatggtgcgcctgcgcccgatcctgatgacctcgatcgccaccgtggtcggcgccattccgctggtggtggccggtggtcccggttcggccagccgtggcacgatcggcatcgtgatcatcttcggtgtgaccctctcgaccttcctgtcgctgttcgtggtgccggcgttctacgcgcggcttgccccgtacacccgttcgccggaagcggtgaagcgcgagctggagaagcaggaagcggaatcgccgtcggtgggcggccatgcctga

SEQ ID NO: 496544 - DNA, 603 bp, Stenotrophomonas maltophilia
atgcctgaccggcacaacgacgggatcgggtccctcgctgacggggtcggacccctttcccaaagggaaagggctctgcccccacttcgaggcgacggcttccagctgcgcccctggcgcccggatgatctggaatcgctgctgcgccacgccaacgatcccgaggtgtcgcgcggcctgcgcgaccgtttcccgtacccgtacacgcgcaccgatggcgaggccttcctcgccggccgcgtgctggcccccggaaccctgaacctggccatcgagatagacggccaggcctgcggcagcgtcgctgcccagcagggcatggccgagcgtgggcacaccgccgaactgggctactggctgggccaggcctattgggggcagggcgtgatgacccgtgtggtcgggctgttcgcaccgtgggtgatggacgagctgcgcctgttcaggctgcaggccacggtcgtcgacttcaaccttggctcggcgcgggtgctggagaagaacggcttccaggaggagggcgtggagcgctgcgcggtctacaagcgcggcgtgctgcacgaccttcgccgtttcgcccgggtacgcacccagctgccgtga

SEQ ID NO: 496545 - DNA, 1512 bp, Stenotrophomonas maltophilia
gtggaagcaaccgtacacttcatcaacagcatcatctggagcaaggcactgatcttcgtgtgcctgggcgccggcctgttcttcagcctgcgcacgcgcttcatgcagatccgtggctttttcgagatgtgccgcctcaccgtcaagggtgagaaatccgacgccggcgtgtcctcgttccaggccctggccatgtcgatggccggccgcatgggcatcggcaacatcgccggcgtggctacggccatcgccttcggcggccccggtgcgatcttctggatgtgggtgatgggcttcctcggcgcgtccacgtcgtacgtggaatgcaccctggcgcagatctacaagaccaaggacgccgaaggccgctaccgcggtggcccggcgtactacatcgaaaaggccatgggcctgaagtggtacgcgctggccttcgccatcgccacgatcatcgccgccggcttcctgatgccgggcgtacaggccaacgccattgccgacagcatcatcaacgcctgccgtggcaccgcgctgtgcggtccgatcgatggccaggccttcggcatggagtcggtgcaggcgctgaagctgggcatcggcatcgtggtcgcgctgctgctgggcgtggtgatcttcggcggcgtcaagcgcatcgccaatttcgcagaagtggtggtgccgttcatggccgccggcttcatcctgatggccatcgtcatcatgatcatcaactacgaccgcgtgccggagatgttcaacatcatcttcagcagcgccttcggtacccacgccgcgttcggcgcgatgatgggcctggcggtggagtggggcatcaagcgtggcatctatgccaacgaagccggccagggctcgggcccgcatgcagcggccgcctcggaagtctcgcacccggccaagcagggctacgtgcaggccttcgcgatctacttcgacaccatgatggtgtgcaccgccaccgcgttcctgatcctggccagtggtacctacaacgtgtattcggcggcaggcgccggcgccccgccgatcttccagggcctggccggcattcccgaaggtgcgggctacgcccaggccggcgtggaagcggtgctcccgggctggggttcggcgttcgtgtcgatcgccatcttcttcttcgccttcaccaccatcatggcgtactactacatggccgagaccaacctcagctatgtgaaccacaacaggaagcgcccgctgaccgtgctggtgctgcgcctgggcatcatcggcatggtggtgttcggcgcgttccataatgcgaccctggcctgggcgctgggtgacatcggcgtcggcctgatggcctggctgaacatcattgccatcctcatcatccagaagccggcgatgctggccctgcgtgactacgaacgacagaagaagctgggcctggatccggtgttcgaccctgatgccctgggcatcaagaacgccgatttctggcgccagcgcaagcaggagagtgtgtaa

SEQ ID NO: 496546 - DNA, 837 bp, Stenotrophomonas maltophilia
gtgaacaacccctggaacaaccgccgcccgtccgcccgtccgccgcgcgcaacgccgttgccgcgcccggaggtgccggccacgggcggtggtgggcgcggtggcagcgacgagctgcgcctgtacggcctgaatgccgtgctggccgcgttcgaagcgcggccacaggcgctgcgcaagctgtacctgctggaggcgcgcattccgcgcctgcagccgctgctgaagtggtgcgtggccaaccgcgtggggtatcgcgtggttgaagacggcgatctgaacaagcttgccggcaccacccaccacgaaggcgtggtggccgatgtgctgcgcgcagcggcgctgccgctggcgcagtggctggagcaggtcggcgacggcccggcgctggcgctgtggcttgatggcgtgggcaacccgcacaacctcggtgcgatcctgcgctcggccgcacacttcggcgccaaggcgctgctgctgccggccggcagcacgctggcgctgtccggtgccgccgcgcgcgtggccgagggcggtgcagaagcggtgccgctggtgcagctcccggagaccgcccaggcgatgacgcagctgcgtgcggccggcttcggcctggcggcgaccctggtggagggcggtgacgacgtgttccgcacctcgctgccggcccgcctggtgtatgtgatgggcgccgaaggcgagggcatggaccgcagcctggcgggagcgtgcgaccagcaggtctcgattcccggcagcggcgcggtggagagcctgaacgtggcctcggccacggcggtactgctggcgcagtgggcgagccgccgcggcgattga

SEQ ID NO: 496547 - DNA, 993 bp, Stenotrophomonas maltophilia
atgcatcgaatccaacaccacgcgctgcgcgcatccccgctgctggtgctttgcgcgcttgcagcctcgccggcgctggccgaagaacgcagcctggacggcgtcaacttcaccgggccgctgatcacccccaacccggctggcctgccgcagggcaactggtacatcgaaccctatctggtgcggatcgacagccgcgatcattacgacgatggcggccatcgccgccgcagtgggcaacgcagcggcgcatgggcaacggtggtaccgatcatctacggcttcagcgaccgggtgatggggcaggtcaatctcagtgcatcgcgtgccgaacagggcggcgcgcgcagcagtggtttccgtgccggtgacaccaccgcgcgcctgcagtacctgttgcaggcgcccaatgccgatggcacgcgtccggccatctcggtcgcgctggtgcagcgcttcagcaccggcagccatgaccgcatcaccggcaatccgctcgatgcgcagggcgacggtgtgcagcgcaccactgccgcagtgggcgtgcagcaggtggtctggctgggtaacgaccgcccgctgcgctggcgtgcccagctcagcgccgggcctgcgccgtcgcggacggcgatctccggggccagcgtctacggcaccgacgacagcttccaggggcacatctcccgggggtcggtgctgggcctgtcggtcggcgccgagtacagcttcaatccgcgctgggtgggcgtgatggaagtggccgccagccgcgagaccggccagcgcctgaggggtttcgcgcgcaacgccagcggtggtttcgaacgcatcgacgagcatcgcccggccagccgcagcgtcactctggcgccggccgtggagtaccacttcagcccgtcactgggcctgatcgccggcgtcgagttcagcgtggctggccgcaacaccggccgcatcatcagcccccaggtcgccctgggcatgttcttctga

SEQ ID NO: 496548 - DNA, 1452 bp, Stenotrophomonas maltophilia
atgaacatcgaatccatcgtcaacacgatcctcggcatcgtctggagcccctatctggtagtgctgtgcctgctcaccgggctgtacttcagcgtgcgcacgcgcttcatccagctgcgtgcattgccggacatgctgcgcctgatgttccgccatgagcgctccgatgccggcgtgtcgccgttccaggcgttgtccctttcgctgtccagccgcgtgggcgtgggcaacatcgccggtgtcgccatggccatcgccttcggcggccccggcgcgatcttctggatgtggatcgtcgccttcctcggcgcctcgagcgccttcatcgagtccacgctcgcgcagatctacaaggagcgcgacggcaaggggcagtaccggggcggcccggcgtactacatcgaaaaaggcctcggccaacgctggtatgcagtgctgttcgcattggtgacggtgctggcgggcgcgatgctggctggcactcagtccaatgcgatcaccagcgcggtgaacgaggcctgggacgtgccggtgatgaccaccacggcggttctgctggtggtgctgggtgccatcctcatcggcggtgtgcggcgcattgcgcgcgtggccgaatgggtggtgccgctgatggccgtggcctacctgctggtcgcggcgctggtgatggtgctcaacgcggacagggtgccggaggtgatcatgctggtgctgcgcagtgcattcggcgtggatgcggcgttcggcgcgatgatcggcaccgccatccagtggggcgtgcgccgtggcgtgctgtccaacgaggccggcatgggcagtggtgcgcatccggccgccgccgcggaagtctcgcatccggtcaagcagggcctggtgcagtcgttctcggtctacatcgacacaatggtggtgtgcagtgcgaccgccttcctgatcctgtccaccggcctgtacaacgtctacgacccggcggtgaacggtattccggatgaggcgcgcctgctgctgggcaatctgccgggagtcgaagccgggccacgcttcgtgcagcacgcggtggaatcgacgctgccgggcttcggccgttcgttcgtggcgctggcgatcctgccgtttgcgttcaccaccatcctggcgctgtattacatggccgagaccaacgtcagctatctgtgccgtgatcggccgacgccctgggtgatgggcggcttccagctgctgttcctggcggcaaccggctactcggcggtgaacagtgcaacggtggcctggtcgctgggcgacatcggcgtcggcctgatgagctggctgaacatcatcgccatcctgctgttgcaaaggcctgccctggccgcactgcgcgattacgaggcgcagaagcgcaagcagcgtgatccgctgttcaagccgcagacgatcggggtaagcaacacccgggtctgggagagctaa

SEQ ID NO: 496549 - DNA, 1422 bp, Stenotrophomonas maltophilia
atgcgtcgccgcgtccttgccatcgcatcctccctcgccctgctggccgtcccggccttcgcggcaccgcgcaccaccaccctgccccccgcctcgctggcgaccgccgcgcagctgcgcgaccaggcgctggccgatgacaccggctggaaggtggtcgagtcgctcaccaccgagattggtccgcgcattgccggcagcgaagccgatgcccgcgccgttgcctgggccgaagccaagttcaaggccctgggcttcgacaaggtgtggaaggagccggtgacgttcccgaaatgggagcgccgcagcgaacacgccgccgtgaccggcaggaacccgcagccgctgcagatcaccgcactgggcggcagcccggggggcaccgtggaagccgaggtggtgcgcttccccgacctggccgcgctgcaggccgcaccggcaggttcgctgaagggcaagatcgccttcgtcgattaccagatgctgcccttccgcgatggccgcgattacggccgcggcggtgcgatccgcagcaagggcccgtccgaagccatccgcaagggcgcggtcggcttcctgatgcgctcggccggcaccgactcgcaccgcgtgccgcacaccggcatcacccgtttcgatgacggcctgaccccggtgccgtcggccgcgctgtcagtgcccgatgccgaccagctggcccgcctgctggcccgtggcagcaccacggtgaaggtggcactggattgcggctgggacggcaccgccacctcgtacaacgtgatcggcgagatcaccggccgcagcctgccgaaggaagtggtggtgatcggtggtcacctggattcgtgggacctgggcaccggcgccgtggatgacggcgcgggcgtgggcatcaccatggccgccggccacctgatcggccagctcaagcaggcaccgaagcgcaccatccgcgtgatcgccttcgccaacgaggaacagggcctctacggcggcaaggcctatgccgaggcacacgccaaggacgtggccctgcaccagctggccgccgagagcgacttcggcgcaggccgcatctacgccttcaataccggttcaccgaatccggaaggctcgcgtgaagcgacgaagcagattgccgaagtaatgaagccgctgggcatcgagtaccaggccgacaagggtggcccgggccccgacgtcggcccgctggccgccaagggcggtgcgtgggcgtggctggcgcaggatggctcggactacttccacctgcaccacaccgccgacgacacgctggacaagatcgacccgaaggcgctggcgcagaacgtggccgcgtataccgtgttcgcgtacctggcggcggaagccgacggcagctttggcagcgaggccaaggcgaccacgccgccgaacgagtga

SEQ ID NO: 496550 - DNA, 405 bp, Stenotrophomonas maltophilia
atgggaatgctcaccgagttcaaggaattcgcgatgcgcggcaacgtcatcgacctcgccgtcggcgtggtgatcggcgcggccttcggcaagatcgtgaccgcactggtcgagaagatcatcatgccgccgctgggctacctgatcggccgcgtggacttctccagcctggcctggacgctgtcgccagcccggctcggaccggatggcaaggagatcccggcggtggtggttggctacggcgacttcatcaacaccgtcatccagttcgtgatcgtggctttcgcgatcttcctcgtggtcaaggcgatcaaccgcctgtcgcgcaagaaggaagcggcaccggcggcgccggccgaagaagtggtgctgctgcgcgagatccgcgacagcctgaagaagtaa

SEQ ID NO: 496551 - DNA, 717 bp, Stenotrophomonas maltophilia
atgtccgatgtctccgatgtgatccctgccgtagccttgccgcgtgtgccggtagccggtggtggcagtttccccgtgcaccgcatctactgcgtcggccgcaactttgccgaccacgcccgcgaaatgggtgcggcagtgccggcggccgatgaccgtggccgcccgatgttcttcagcaagccggccgatgcgatcgtggtcggccacgacgatgcgatcccctacccgccagcgaccgccaacctgcaccacgaagtggagctggtggtggcgatcggccgcgatgcgcccgccggcgagctggccgtggccgacgccgacgcactggtctacggctatgccgtcggcctggacctgacccgccgcgacctgcaggccgcggccaaggacaagggccacccgtgggacgcggccaagggcttcgacgcctccgcgccgatcagcgaaatcgtccacgccgaggaagtcggcgacctggccgcgctgaacctgtcgctggaggtcaacggcgaggtgcgccagcaggctctgctcgaccagatgatctggaacgtgccggagatcctgcatgagctgtccaagctgtggcagctgcgtgccggcgacctggtgttcatgggcacgccgtccggcgtggccgcgctcaagcccggcgaccgcttcagcgcgcgcctggaaaacgtggccgagcgccacggcgtgatcgccggctga

SEQ ID NO: 496552 - DNA, 282 bp, Stenotrophomonas maltophilia
atgttcaatcgcgcatccgccttcaaccagttccgcaccctgttcgcgccgcgcaagccgcgccacccgctggtgcgcgttgccgtgggcctgcttggcctggcgatcctggccgcgatggtgttcatcggtgtgttcgtcggtgcggcgatgatcctggtcggcctggcgtggaagctgctggcctcgcgcaagccgggtgttgcccgcccggtcgacccgaccgtggtcgaaggcgagtaccgcgtggtacgcaagccggtgctgccggcctcgcgctga

SEQ ID NO: 496553 - DNA, 336 bp, Stenotrophomonas maltophilia
atgactgccgctgctgccctgatcgccctggatgccattgccgatggcgcgtttgccgaggtcgaagcggtggtcgatggcgatgccgaatcgctggtgctgtaccgcgacggcgcgcaggtgcgcgcattcctgaacatctgcccgcatgccggccgccgcctggactgggcgccggggcagttcctgaagagccgcgagggccacctggtgtgcgccgcgcatggcgcgtcgttcgcgctggacagtggcgactgcatcgccggcccgtgcaagggcgaccgcctgcgcgcggtgccggtgggcgtgcgcgacgggcaggtctacctggcttga

SEQ ID NO: 496554 - DNA, 1848 bp, Stenotrophomonas maltophilia
atggataccgcgctgacgctgaccaacgacatgaagctcgtgctcgggctggtcggcttcacgatggcgatgttcctgttcgagcgcatccgcgccgacgtggtcgcgctggtggtgctggtggtgctcggtgtcaccggactgatcgcgccggaggaaatcttcggcggtttctccggtaacgcggtgatgagcatcatcgccaccaccatcctcggtgcgggtctggaccgcaccggggcgctgaaccggctggccgcctggctgctgcggcgcggccacggtgtcgagcagcggctgctgatgatgaccacggccatcgccggcctgaattcatccttcatgcagaacccgtcggtgatggcgttgtacctgccggtcgcctcgcgactggcagcgcgcaccgggctgacgatgcagcgcctgctgctgccgatctcggcggcgatcgtgatgggcggcgcgctgaccatggtcggcaattcgccgctgatcctgctgaacgatctgctggcctcggccaacaacaacctgccctccggcctggccaccatcgagccgctgcgcatgttcgcgccgctgccgatcggcgtggcactgctggtcgcctcgctgctgtacttccgctactacggcgaccgcaagctgatcgaggaagaaaacctggtcaacgacggggtcaccccggcgcgaaccgagagctactttgccaagacctacggcatcgaaggcgatgtgttcgagctggtggtcagcgccgaaagcccgctggtcggcatgaccctgggcgaggccgagaccctgcacgatgcgccactgctgctggccctgaagaccggcaatgacacccgcctggcgccgccggcggagatgcgcatctgggtcggcagcgtgctcggtgcgatgggcccgcgccagcagatcagcgacttcgcgcagaaccagttcctgcgcatgtcctcgcgcctgaagcacctgggcgacctgttcaaccccagccgcgccggcatttccgaggcggtggtgccgccgacctcgaacgtgatcggcaagagtgcggccgacctgcgcctgcgcaaggagcgcggcatcagcctgctggcgatcaaccgtgacaagcaggtgatccgcgaggacgtgcgtgacgtgcagctgcgcgccggtgacatgctggtgttccacagcatctggaccgacctggcgcaggctgccaagagccgcgacttcgtggtggtgaccgactacccgaccggcgagcagcgcccgcacaagttcaagatcgcgatggcgatcttcgcgttgaccatcctgatcgcgctgaccagcaagctgccggtggcgctgacgctgatgaccggcgtggccggcatgctgctgaccggcgtgctgcgcatggacgaggcctatgcctcgatcaactggaagacggtgttcatgatggccgggctgattccgctcggctgggcgatggactccagcggtgcggccgcgtgggtggccggccataccatcgacaagctgccgaccggcattccggtgtgggtgctggaggtggcgctggcgctgctgaccacggcgttctcgctggtgatcagccatgtgggcgcgaccatcgtgatggtccccattgcggtgaacctggcactggcggcgggtggcaacccgaccgcgttcgcgctgatcgtggcgctgtcggcgtccaacaacctgatgacggcctccaacccggtgatctcgatgatcaccggcccggccaactacaccccgcgcgagatgtggcgggtcggcggcccgttgtcgctgatctacacctgcgtggtggtgctgatgatcaacctgatgttctga

SEQ ID NO: 496555 - DNA, 735 bp, Stenotrophomonas maltophilia
atgaccaatccttttgacagcgccggttccaaggctccgcccaagcccttcaccgtaagcgagggccgccgcgaggtgcgcagcttcgtgttgcgccagggccgcttcacccccgcccagcagcgcgcgttcgacgaacgctggccgcgcttcggcctcgactacaccggccaaccgcgtgacctggacgccaccttcggccgcccggcacacaaggtgctggaaatcggcttcggcaacggtgccgcgctgcgcttcgccgcccagcacgacccgtcacgcgattacatcggcatcgaagtgcacgccccgggcgtgggccggctgctgaacgcgctggccgacgacaacgccgaccacgtgcgcctgtaccaccacgatgcggtggaagtgctgcagaacgagatcgccgatggcgcgctcgatgaagtgcgcatctacttcccggacccgtggcacaagaagcgccacaacaagcgccgcctgctgcagccggcgttcgccgaactgctggtgcgcaagctgcgcccgggcggccgcctgcactgcgcgaccgactgggaagactacgccgagcagatgtgggatgtgctcgatgccaccgccggcctggtcaaccgtgccggcccgcgtggcagcgtgccgcgcccggactggcgcccgcagacccacttcgagacccgcggccagaagctcggccacggcgtctgggacctgttgtacgaccgcacctga

SEQ ID NO: 496556 - DNA, 795 bp, Stenotrophomonas maltophilia
atgaacgttcatgtctcccccgattcgctggtgatcgccggcaagacctatggctcgcggctgctgaccggcaccggcaagttcaaggacctggaagaaacccgcctggccaccgaggccgctggcgcccagatcgtcaccgtggccatccgccgcaccaacatcgggcagaacccgggcgagccgaacctgctggacgtgctgccgccggagcgcttcaccatcctgcccaacaccgccggctgctacaccgccgaggacgccgtgcgtacctgccggctggcccgtgagctgctggacggccacaacctgaccaagctggaagtgctgggcgaccagaagaccctttacccggacgtgatgcagaccctgaaggccgccgagcagctggtcaaggacggtttcgaggtgatggtctatacctccgacgacccgatcctggccaagcgcctggaagagatcggctgcgctgcggtgatgccgctggccgcgccgatcggttcgggcctgggcatccagaacaagtacaacctgctgcagatcatcgaagacgccaaggtgccgatcatcgtcgacgccggcgtcggtaccgcgtcggacgcggcgatcgcgatggagctgggctgcgacggcgtactgatgaacaccgccattgccggtgcacgcagcccggtgctgatggccagtgcgatgcgcaaggcggtcgaggccggccgcgaggcgttcctggccgggcgcatcccgcgcaagcgctacgccagcgcctcctcgccggtggatgggctgatcggctga

SEQ ID NO: 496557 - DNA, 201 bp, Stenotrophomonas maltophilia
atgaacatccagctcaacggcgaaccccgtaccctgcccgcttcggcgaccctccacgacctgctgcaggccgagcagctgctgcagcgccgggtggcggtggaggtcaacggcgagatcgtcagccgcagccgccatggcgagcacgtcctggccgaaggcgacgtggtggagatcgtgcacgcgctgggcgggggctga

SEQ ID NO: 496558 - DNA, 1854 bp, Stenotrophomonas maltophilia
atgctgctcagcaaacgcccgatccgctccctgatggcggccgcgatcgcgctggccgcgcttccggccatggcaggcgaatccccctattccaaggccgtgttcttcggtgacagcctgaccgacgctggctatttccgcccgctgctgccggccgatgtgcgtccggtgaccggccagttcaccaccaacccgggttgggtgtgggcgcagcaggtcgccaactactacggcctcaacggcacgcccaacggcaatggccagaacggtgacaactacgccgtcggcggcgcccgtgtatcggccgacgaagcgggtggcctcggagccattccgtcgctgaagtcgcaggcgacccgttaccttgctgcgaatggtggcaaggctgacgccaatgccctgtacaccgtctggggcggtgccaatgatctgttcgcggccacgcgcgcagcggccggtggtgcctcgcaggcccaggtgcagggcatcatcggcgccgcggtcaccgaccagatcgcgctggtgggcgccctgaagcaggccggtgcccagtacgtgctcgtgccgaatctgccggacgtgggcatcactccgcagttccgtggccccaacgccgccgccgccactgcactgtcggccggttacaacaaggccctgtacggtggtctgaagcaggcgggcatcgagttcattccgctcgacaccttcagcatcctgcgtgaagtgaccgccaacccgggcatgtacggcttcaccaacgtcaccagcaccgcctgcaagatcgatccggccaactcgacgcagagcatcctgacctgcaacccgaccagctacgtcagcccggatgcggccaacacctacctgttcgccgatggcgtgcacccgaccactgccggtcatcagctgctgggccagtacgcggtctcggtgctggaaggcccgcgcctgcagcaggtgctgagccactcggcacagaccatcggccgctcgcgtgccgaccaggtcagcatgcacctcggcggtcggccggctgacggcctgtcctggtggggcggcgtgcgtggcgacctgcagcgctacgaccacgccgacctgtacgacggcctggccccggccggcctgttcggtatcgactggtcccgcgacggcatggtgttcggcggtttcgccggcttcggccgcctcagcgccgacttcggcaacagccgtggcgacttcacccagaaggacaccaccgccggtctgttcgccggctggtatggcgaccgcatctgggtgaacggccaggtcagctacacctggctgtcctatgacgtgaaccgcaaggtccagctgggcccggccacccgtgagcatggtggttcgccggacggcagcaacctgaccgcggccctgaacgccggttacgagttcggcaccgaaggcggcttccgccacggcccgatcgcctcggtgatctggcagaaggtgaagatcgacggttacagcgaaagcgctgcggctggcaccctggccaccgcactgggctacgaccgccagaacgtcgattcgaccgtcggccgcatcggctggcaggcccgtttcgatggcggcgccgtcaagccgtacgcgcaggtgacctacgatcacgagttcgaggacaccaagcaggccagcgcctggctgcagaccctgccggaactgggcagctaccgcgtgccgggcctgaagttcgacaagaactacgccaccgtcgtgctgggtgcccgcaccgaactgttcggcctgcagagcaacttcggcctgagcgcttcgaccggccagaagcgcgcgcaggacgctaccctgttcgccaacttcagcggcacgttctaa

SEQ ID NO: 496559 - DNA, 219 bp, Stenotrophomonas maltophilia
atggaaacgaaggacgacgtcgtcggcagccttcatgagatctacaagaactccggtgccggcacctcccgccagctggcggcagtgcgcgcactgggtcgcgccggtgggccgaaggccgcgcagcttctgtggcagatctatgaggggacctcggccggatcggtcacgcagatggcctgcatcgcagcgctgggtgaatccgcgcgcgggttctga

SEQ ID NO: 496560 - DNA, 879 bp, Stenotrophomonas maltophilia
atgaagctcgccatcctgtcccgcaacagctccctgtattccacccgtcggctggtcgaggcggcgcgcgcgcgcggccacaccgtgcgcatcctggacccgttgcgctgctacatgcgcatcgccgccgatggcttttccatgcactacaagggccggccaatgaccggcgtggacatggtcattccgcgcatcggtgcctcgatcacccgctacggcaccgcggtgctgcgccagttcgagctgatgggcgcgcgcacgcccaatccgtccgacgccatcctgcgttcgcgcgacaagctgcgcgcgcaccagctgctggcggccaagggcatcgacatgccggtcaccgtgttcggcgacaaccccgacgacaccgtcgacctgctgtccatgctgggcccgccgccgcacgtggtgaagctcaatgaaggcacccaggggcgcggcgtgatcctgaccgagaaggccagtgcctcgcgcggcatcgtcgaagcgctgcgcggcctgtacgccaacttcctgatgcaggaattcatcggcgaggccaagggggccgacctgcgctgcttcgtggtgggcgaccaggtggtggcgtcgatgcagcggcaggcaccggagggcgacttccgctccaacctgcacgccgggggtaccgccgtggcggccaaggccagccgtgccgagcagcaggtggcggtgcgttcggccaaggcgctgggcctgtcggtctgcggcgtggacctgatccgttccgcgcgcggcccgctggtgctggaggtcaactccacgcccgggctggaaggcatcgaagcggcctgcggggtcgacgtggcgacacgcatcatcgagcacgtagagaagatcaaaaaaccctga

SEQ ID NO: 496561 - DNA, 480 bp, Stenotrophomonas maltophilia
atgtaccgcatcatgatgatcgcgttgctgctgggcctgtctggcgctgttgccgccaagccggagaaagtggctgtacagatggaccggcagggctcggtcgccgagcagatgcgtcaggtggaaaccgccctggccgcccccgactatgccgaactgtccgccgaggatcgcggccaggtgcagcagtcgctgtcgcgtatccgccagcacatgggcgaacgccagaccgtgcaggagctgccgccgcagctgcaggccgaggtcttcaacgagcaggaacgcatcaacaccctgttggcgcgtggccatgaagacagccggcagatctgcaggtacgaacgcaccaccggcagcaacatgcccaagagccgctgcctgaccgtggccgaacggcgccggatcgaagagaaaggcaaggcgctgatcaacgaccagcgcagctacaacacgctcagcccaccgcccgccgggcgttga

SEQ ID NO: 496562 - DNA, 471 bp, Stenotrophomonas maltophilia
atgcagcgcatgacccccttcgccctgatgctgggcctggccctggccaccaccgcccacgccaagcccgagaaagggcaggtgaagttcgacgccaacgcaccggtggccgaacagatccgcaacgttgagacggcgatcaacagcgaggactacagcgagatcgggctggaagacaaaagccgcgtgcagcaggcgctgggccgcatcaagatcaagatgggcgaccacgaacgcgtggagcaggtcagtccgcaggaccgcaccgagatcttcaacgaccaggaagtgatcaacacgatcatgacccgcgcccacgccgacagccgcatggtctgccgtcgtgaacgcaccaccggcagcaacatgccgcagagtgtctgcctgaccgtggcccagcgccgcaaggcgcaggaagacagccgcaaggcgctcaacgacaaccagcgcttcaacaactacaagccctga

SEQ ID NO: 496563 - DNA, 462 bp, Stenotrophomonas maltophilia
atgtaccgcaacacgacacttgccctgatgctgtcgctcggcctggtagccaccgtgcaggccaaggcgcagaaggacaccgtgcagatggatgccttcaccccggtgtccgagcagatccgccgcgttgaaacggccatgggcagcgaggactacagcgagatcgggctggaggacaagagtcgcgtgcagcaggcactgaaccggatccgggtcaagatgaatggccgggagaaggtggatgagctggccccgcaggagcgcaacgacctgttcaacgagcaggagatcgtcaacaccatcatgacccgcgcccaggccgacagccgcatgatctgccgccgcgagcgccttaccggcagcaacatgccgaccagcgtctgcctgaccgtggcccagcgtcgcaaggcccaggaagacagccgccgggcgttgaccgaccagcagcgcatcagccgctga

SEQ ID NO: 496564 - DNA, 678 bp, Stenotrophomonas maltophilia
gtgcgcattctcgtaatcgaagacaacagcgacatcgccgccaaccttggcgactaccttgaggatcgtggccacaccgtggacttcgccgccgacggtgtgaccggcctgcacctggccgtggtccacgagttcgacgccatcgttctggacctgaacctgccgggcatggatggcatcgaagtgtgccgcaagctgcgcaacgaagcgcgcaagcagaccccggtgctgatgctgaccgcccgcgactcgctggacaacaagctggccggtttcgattccggcgccgatgactacctgatcaagccgttcgcgctgcaggaagtggaagtgcgcttgaacgcgctgtcgcgccgcggcaagggcgtgcagacccgcgtgctggaaaccggcgacctggaatacaacctggacacgctggaagtgcgccgccagggcaagctgctgcagctcaacccgaccgcgctgaagatcctgcaggccctgatggaggccgcgccggccgtggtcacccgccaggagctggaaacccgcgtgtggggcgaggagctgcccgactcggattcgctgcgtgtccacatccacggcctgcgtgcggtggtcgacaagccgtttgaagtgccgctgatccagacccgccatggcatcggataccgcatcgccaccccggaagcctga

SEQ ID NO: 496565 - DNA, 1329 bp, Stenotrophomonas maltophilia
gtggcaaccaagggggagcgccggcgttcgccgtatcggcggcgcctgcgcagccgcatcatcgtctcgttcgtgttgttgggcttctgcctgacgacactgttcgcgtttgccaccaactgggcccgcatgcgcgtggaaaaccagctggtggaagacgtgatgaaccgcaacatcaacgagtacgtgcggcggttctacgagagcccggatcgcaaccccgacctgcccgtccagcagatgcgtgcgcgcctgatcaagcctgacaagtttgacgcgctgcgcgaggaagagccggactggtatgagttcaaggatggcctgtacaacatgggcggcgtggacgagcgcggccagcgctattcctacaagcttgccgtgcgcaagacgcccgatgcctgggcattcctggcctacgacatgaccgacagcgtgcgcggtgggcagcagctcaaccgcgcgctggtgctgtcggtgctggtgttcagcctgttgtcgctggtgctgggctggtggtcggcatcgaaggtgatgaagccggtctcggacctggccgcgcggctgcgtgcctatcgcggcggcaccagtgatcccgagccgctggcgccgcggttccccgacgacgaagtggggcagctggcgcaggcgctggatgattattcgtcgcgactgaccgaagtggtgcagcgcgaccgcgagttcaatgccgacgtcagccacgaactgcgcacgccgctggcggtgatccgtggcgccaccgaactgctgctgacccggcccggcctggatgacaaggtgctgcagcggctacagcgcatccagcgcgccgaacagcagtgcagcgacctgatcggcgcgctgctgctgctgtcgcgcaacgagcgcgggcagggcaccagcaacgtcgcgcgcgtggccgaacagctgctggacgcccaccgcgcgcagctgggtggcaagccgctggagctggcgctggaaggcgagcgcaacctggtgatcgatgcgccggaggcggccttgtcggtggcgctgggcaacctgatcggcaacgcggtgaagtactcgcaggatggcgaagtgcgcgtctttgtcggcagcaattcagtgtcggtcactgacagcggcccgggcctgagcgaagaagacgccgccaagctgttccagcgcggctatcgcggcacccatgccggccattcgcagggcggtggcatcggcctgtcgatcgtcagccgcctgtgcgatctgtacggctggcaggtcagcgtgcgccccggtggcgagcgcggcgtgatcgccacgctgacgttctcgccgaagccgttgtaa

SEQ ID NO: 496566 - DNA, 387 bp, Stenotrophomonas maltophilia
atgtccgcacgccccgtgttccctcaactgcacgccctgatcggcgaagccgccgacctgctgccggccgacgtcgccgcgcgcatcgaaaccctgctcgatgatcccaaggatctgctgcccgcgctgctggcccgcatggacggtcgcgatgcagccgacggtcgccgactggaagcgcagggcctcagcccggcccaagcggccaccatggccggtctcagccgcaccctggccggcttgaatgcactcatgcaggtgctgcacgccgccgaagccgcccgcgaacagggcggtgcccaccagcagctcagcccggatgtcgtcgacggcctgctgctcggcgcccgcgaactggcccgctacgcccgcctgcagctggagtag

SEQ ID NO: 496567 - DNA, 867 bp, Stenotrophomonas maltophilia
atgttgcaccctaccctgcccctgaacgcgctgcgcgccttcgaggccgccgcccgccaccagaacttcacccgtgccgcgctggagctgtgtgtcagccaggccgcgctgagccatcagatccgtgggctggaggaccggcttggcatccgcctgttccatcgcctgccacgcggcgtggcgctcaccgatgaaggggcagcgctgtacccggtgctcaacgaagcgttcgagcgcatttccgccagcatcgcgcgctacaccggcggaccggcccgggaagtactgacgctgggcgtggtcggtacctttgccaccggctggctgctgccacggctggcggcgttcgaggcggcgcacccggacatcgagctgcgcctgcagacccacaacaaccgcatcgacctggccggcgaagggctggacctggcgatccgcttcggtgatggcgactggcagggacaggcctgcacggcgatcctggatgcgccgttcgcgccgctgtgcgcaccggcattggcgcggcggctgaagcaaccgcgcgacctcgccacactgccgttgttgcgttcctaccgcagcgacgaatggccgcgctggttgcaggcggccggggtgagcggcgtggaagcccgcgggccggtgttcgattcctcactgacggtggcgatggccgccgccgggggcgccggcgtggccttgctgcccttgtgcatgttcgagcaggaactggccgaaggccgcctgctgcagcccttcggcaccaccttggagctgggccgctactggttgacgcggctgcgctcgcgcgccgagcgcgaaccggccaagcggttccgcgaatggctgcaggcgcagggcacgtaa

SEQ ID NO: 496568 - DNA, 912 bp, Stenotrophomonas maltophilia
atgctcgcccgtcgccgattcctgcagttcagtggtgctgccgtggcttcctcgcttgccctgccgctgctggcacgtgctgcgggcaagaccaccgccaacgcacccaccgatgccaccctcaccgccgccactgacttcgccgcgctggaaaaggcctgcgccgggcgcctcggcgtgaccctgctggacactgccagcggtcgccgtttcggccatcgccaggacgagcgcttcccgatgtgcagcactttcaagagcatgctggcggccaccgtgctcagccaggccgagcgcacgccggcattgctggacacccgcgtgccggtgcgcgacgccgatctgctctcgcacgcaccggtcacccgccgccatgcaggcaaggacatgacggtgcgcgatctgtgccgtgccacgatcatcaccagcgacaacaccgccgccaacctgctgttcggcgtggtcggtggcccgcccgcagtgaccgcgttcctgcgcgcgagcggtgatgcggtgagccgcagtgaccggctggagccggagctgaacagctttgccgagggcgatccacgcgataccaccacgccggcggcgatggccatgaccctgcagcgcgtggggatgggtgaggtgctgaaaccggcttcgcggcagcagctggccgactggctgattgacaacgaaaccggtgatgcctgcctgcgtgcgggcctcggcaagcgctggcgcgttggcgacaagaccggcagcaacggtgaagacgcgcgcaacgacatcgccgtgctgtggccactggccggcggcgcaccgtgggtgctgacggcttatctgcaggcaggtgcgatcagctacgagcaacgcgctagcgtgctggcacaggtggggcgcattgccgatcgcctgatcggatga

SEQ ID NO: 496569 - DNA, 1215 bp, Stenotrophomonas maltophilia
atgagccatgagttgatctacctgctgctgatcttcgcgctgctggtgatcccgcgcgcactgcagcgcttcagcctgccggcgccgttgacctgcctgctgttcggcatcatcggcatgctctggctgggcgaccaggcacacgacgcggtgatcggcctgctggccacgctgggcatttcctcgctgttcctgttcgcgggcctggaagtggatctgcaggcgctgcggcgtggcatgtggccgctgctggcgcacctggtgatccgtaccggcacgctgttcggcgtgggctggctggcctggcgctatgcggggctgccatggcaggccgctgggctgctggcgctggcgctgctgacgccctccaccggcttcatcatggattcgctgtcgcggctgggcctgagcgaggacgagaggttctgggtcaccagcaaggccatcgccggcgaactgctggcgctggcggcgttgttcatcgtgctgcaggccggcgacccgggccacatggcgctgtccagcctggccctgctggcgatgatgatcggcctgccgctgctgttcattgcgctgggccgctgggtggcgccgcacgcgccgggctcggagttctcgctgctggtgatggtcggcatggtggcggcgtacatcacctatctgctgggcgtgtattacctcgtgggcgcgttcatcgccggcctggtcgcgcgcctgctgcaccagcgcatgccgctgctggcctcgcacgagaacctgcacgcgctgcgcctgttcgcctcgttcttcgtgccattctatttcttcaatgccggcaccaaggtgcccagcgaagccctcagtttcgaggcgctggggctgggcatcgtgatcaccctggtggtgctgccgctgcgcatcggcgtggtctggctgcagcgccgggtgatgttcggcgagagcttccgcagcagcctgcgcgtctcgctggcgctggccccgaccctgatcttcaccctggtgctggcggcgatcatgcgcgagcgtttccagattccggcggtgctgttcggcgcgctgctgctgtacgccgcactgaccacactgttgccgtcgctggtgttccgcacacccttcgacgtcgatccggtggagcaggagccggcgggcgagggcgagtccgcgccggtagcggccaccgagacgcggccggaacctcacatcgccgaacgctga

SEQ ID NO: 496570 - DNA, 642 bp, Stenotrophomonas maltophilia
atgaaactgcctgccgttgtcaccgcttccgccctcctgctcagcctcgctgcctgctcgcagcgttccgatacggtcgcgcatgatctggcgaccgcaccggccgatgccttcatggctgccatcgccgcgcattgcggccaggcctatgagggccgggtggtggaggacacgccggcaccgaccggcaaggacccgttcgccggccagcgcctggtcatgcatgtgcgcggctgtgccgaccccgcccatgaactgcggattcccttccatgtgggggatgaccattcgcgcacctgggtgctgacccgcaccggaaacggcctgcgcctgaaacacgatcatcgccacgaagacggtagccccgacgcgatcaccctctatggcggcgacagcacgccaccgggcaccgccgagcgccagcggttcccagccgactccgattcggtggcgatgttccgtcgtgccgacatgctggcctccacgcacaacacctgggcgatggagatcgaccccgaccagactttcgtctacgaactgacgcgcccggaaggccgccgtttccgcgtgaagttcgacctgagcaagccggtcgagctgccgcccgcaccgtggggcgacgagaaggcgccagcaccctga

SEQ ID NO: 496571 - DNA, 735 bp, Stenotrophomonas maltophilia
atgaaatcgttgtccctggccagcctggccgtgaccctgagcactctggccgtgctcgccctgccctctgctccggccgctgcgcaggacggggtaatccgctgcgaaagccagaacaaccgtgaacgtgtctgcagcaccggctggcgcaatgcgcagctggtccgccagctgtccggcagcgcctgcgacgagggccgcacctggggcagccgcaatggcagcatctgggtcagcaatggctgccgcgccgagttcgttgaagcccgcggcggctggggcggtggcaatggcggtggctggggcggcaacaacggccgtcccggcgaaaccatccgctgcgagagccagagcaaccgtgagcgcagctgcccggtcggctggcgcaacgcccgcctggtccgccagctgtccggcagcccctgcgatgaaggccgcacctggggcgtgcgcaacggcgcggtctgggtcagcaacggctgccgcgccgagttcgccgaggcccgcggctggggcggcggcggtggctggggcggcggcaacagcaattattcgatcacctgcagcagcaacaacaaccgcacgcagaactgcgactgggatgagcgccagggccggccggtgctgcagcagcagctgtccggcagtgcctgccaggaaggccgcagctggggctatgcacgcggccaggtgtgggtgagcaacggctgccgcgcacgcttcagcgcgcgctga

SEQ ID NO: 496572 - DNA, 1752 bp, Stenotrophomonas maltophilia
atgcgtacccacttctgcggcctggtcgacgagaccctgattggccagactgtcaccctcgccggctggaccgacgtggcccgtaaccagggcggcgtctgcttcatcgatctccgcgatcatgaaggcatcgtgcaggtgaccgtggaggtcgacaacgccgacgtgttcgccgtggccgcgtcgctgggctatgaggacgtgctgcaggtggagggcgtcgtgcgcgcccgccacgcggtgaacgacaagatgcgcaccggcaaggtggaagtgatcgccaccgccatcaccgtgctgaacaaggccgccccgctgccgttccacgcccacgagaacccgggcgaggaaacccgcctgaagtaccgctacctggacctgcgccgccccgaaatgcagcgcatgcagcgcacccgcatcaagctggtgcaggcgctgcgccgccacctggacgaaaagggcttccaggacatcgagaccccgatcctgaccaaggccactccggaaggcgcgcgcgacttcctggtgccggcgcgcatgcatccgggcgagttctacgccctgccgcagagcccgcagctgttcaagcagatcctgatggtggccgggttcgaccgctactaccagatcgcgcgctgcttccgcgacgaggccctgcgtgccgaccgccagctcgaattcacccagctggacatggagttcgccttcgtccgcgaacgcgatgtgcaggacttcgtcgaggacatgatccgcgccatcttcaaggaagtggtcgatgtcgagctggatgccagcttcccgcgcatgacctgggccgaggcgatgcgtcgctatggttcggacaagccggatctgcgcatcgcgctggaactggtcgacgtggctgaactggtcaaggacagcgagttcccggtgttcaccggcccggccaacgatgccgaaggccgcgtcgccgcgctgcgcatcccgggcggcgcgtcgctgagccgcaagcagatcgacgagtacgccgcgcatgccgccaagtacggcgccaagggcctggcctacatcaagatcgccgacaacggcgaagtcagctcgccgatccagaagttcttcagcgaagagcgcttcgcggcgctggtggcccatgtcggtgccggcaacggcgatatcgtgttcttcggtgccggtggctacaacaaggtctccgacttcatgggcgcgctgcgcctgaaggccggcaaggactttggcctggtcgccgacggctgggcaccgctgtgggtcaccgacttcccgatgttcgagtgggacgaggaagaacagcgctacgtcgccctgcatcaccccttcaccgcaccggccgtggacgacatcgccgacctgcgcgccaatgcccgtaccgccgtctcgcgcggttacgacatggtgctcaacggcaatgaaatcggcggcggttcgatccgtatccaccgtccggacatgcagagcgcggtgttcgagctgctgggcatcggtgccgaagaggcccgcgccaagttcggcttcctgctcgacgcgctgaactacggcgcgccgccgcacggtggcatcgccttcggcatcgaccgcatcgccgcgctgatggccggaaccgagtcgatccgcgacgtcatcccgttcccgaagaccaccggtgcacaggatctgatgaccgacgcgccgtcgccgatcgtcgacgcgcagctggccgaagtgcacatccaggttcgccccaagaccaactga

SEQ ID NO: 496573 - DNA, 324 bp, Stenotrophomonas maltophilia
atgaccgagtttgcgttttcgctggagtgggaaaagctgggcaatgaaggctccgaggccaccctggtcaccgagcgtgcacgcgtgttcggggggtggctggtccgcgtcggtaccaatccggccgcgatggccctgaccttcgtcgccgacggcgaaggccgttgggacggtgaagacttcggcgtcgaggactacgaggacgacgaagaggaagaagagtacgacgaggacgaggaaggcgaggaagaagaggacgaggacgaagaggaatacgaggaagagggcgaggaagaagaagcggaatcgcctggaaaggcttga

SEQ ID NO: 496574 - DNA, 522 bp, Stenotrophomonas maltophilia
atgtattcgatccgccgcgccactgtggacgacgcgccgaccctgtcggcgctggccgcacgcacgttcactgaaaccttcggccatctgtacccgccgcaggacctgcaggccttcctcgaggaggcctacacggtcgagcgccagcgcgtgatcctgtcccaccccgattacgcggtgtggctgctggaactggatggggaggcggtcggccatgccgccgccggcccctgtggcctgccgcatccggatgtgaaacctggtgacggcgaactcaagcgcctgtacctggtcaagacgcagcagagctgcggctggggcagccgcctgctggaaaccgcgctggcctggctggaacacgaaggcccgcgcacgttgtggctgggcgtgtggtcggagaacttcggcgcgcagcgcttctacgcccgctacggcttcgagaaggccggcgagtacctgttccctgtcggcgacacccaggacctcgaattcatcctgcgccgcgcgccgcgcgcggcctga

SEQ ID NO: 496575 - DNA, 633 bp, Stenotrophomonas maltophilia
atgactccccccgtattgctgctgcatggcatctggaatgcccgtgcctgggtcgggccactggcctggcgcctgcgcgcgcgtggtttccaggtacacgcgttcggctatccctcggtgttcggtggccccgatgtggcagtgccgcagttgctggaacgtctggccgacgccgggccgttgtcgctggtcggtcacagcctgggcggactgctggcactggaggcgctgcgccgcgatccgcagctgccagtgcagcgcgtggtctgcctgggctcgccgctgcgcggcagtggtaccgcgcgctcgttgtccgatcatggctggggcctggcgctggggcgcagcagcgagctgctgctggacggcctgccggactggcagggcaaggccgaggttggcctgatcgccggttcggtaccgcacgggctgggcagcctgctgggcgcgatcgacgatgcgtccgacggcaccgtggcactggccgagacccgcctgccgggcctggccgaccattgcgtggtgcgtaccagccacagcggcctggtggtgtcgcccgacgccgcgcggcagaccgcgcatttcctgcgccacggccacttcgaccacagccgcgacgcggcggcggcatag

SEQ ID NO: 496576 - DNA, 732 bp, Stenotrophomonas maltophilia
atgggtagaggcccctccatcgaagcccgcaagaacgcgtccgacgcgaagcgcggcaagattttcaccaagatcatccgcgagatcggcgttgccgcgcgcggcggtggaggcgaccccaacaacaacccgcgcctgcgcgtggcggtggacaagggcctggccgtgaacatgtccaaggacgtgatcgagcgcgccatcaagaaggccaccggtgaactggaaggcgtcgattacgaggaaatccgctacgaaggctatgccccgggtggcgtggccgtgatcgtcgactgcctgaccgacaaccgcgtgcgcaccgtggccgacgtccgccatgcgttcagcaagtgcggcggcaacatgggcaccgaaggatcggtggccttcatgttcaagcgcctgggcgtgctcagcttcgccccgggtgccgacgaggaagccatcaccgaagcagccatcgaggccggcgccgacgacatcgtggtctacccggatgacggctcgatcgacgtggtcaccagccctgacgcgttcaacgcagtcaaggacgcaatggtcgccgccgggcatgtcgccgaccacgccgagatcaccttccgcgccgacaacgacatcaaggtcgaaggcgaggtcgccctgcaggtcaagaagctgctggacatgctcgaagacctggacgacgtgcaggacgtgtattccaacgccgaactcggcgccgacgcctacgcctga

SEQ ID NO: 496577 - DNA, 522 bp, Stenotrophomonas maltophilia
atgacccgcatcctcggcatcgaccccggttcgcagcggaccggggtcggcatcatcgatgtcgacgccgccggccgcgtcagttacgtgcaccaccagccgctggtgctgctgggcgccgacgacttcccgcagcgcatgaaactgctggtgctgggcctggccgatctgtgccgcgagtaccagcccaatgaagtggccatcgaaaaggtgttcatggcgcgcaatcccgattcggcgctgaagctgggccaggcccgcggcgcggcgatctcggccgtggtgctgcgcgacctgccggtgcacgaatacgccgccagcgagatcaagctcgcggtggtcgggcgcggtggtgccgaaaagcaacaggttcaacacatggtcgggctcatgctcaacctgaaaaccaagctgcaggccgacgcggccgacgcgttggcggtggcgatcacccatgcccacgtaagggcgacggccaaccgcctggggctcagtgcccgccaggcgtggggccgcaaatga

SEQ ID NO: 496578 - DNA, 594 bp, Stenotrophomonas maltophilia
atgatcggtcgactgcgcggcatcgtcgcctacaaggcgccgccgtggctggtggtggacgtgaacggagtgggctacgaactggaggcgccgatgagcaccttctacgacctgcccgagctcggccgcgaggtcaccctgtacacccattactcgcagaaggaagacagcgtctcgctgtacggcttcctgcgcgagggcgagcggcgcctgttccgcgacgtgcagaaggtcagcggcatcggcgcgaagatcgcgctggccgtgctgtccggtgtcagcgtcgaagaattcgcgcgcatggtccaggccggcgacatcaccgcgctgacccgcatcccgggtatcggcaagaagaccgccgaacgcatggtgctggaactgcgtgaccgcgcggcccagttcggtgccggcggcgcgctgcccaccggcagtggtccggccccggccgatccgctgtccgatgccaccgtggccctgcagcagctgggctacaagccggccgaagcggcccgcatggcccgcgatgccttcaatgaaggcgacgaagtggccaccgtgatccgcaaggcgctgcagtccgcgctgcgctga

SEQ ID NO: 496579 - DNA, 1920 bp, Stenotrophomonas maltophilia
atgtccagcagtcaaaccccgcacgcagccgcccccggcggccatggccacgccccctccgctggaggactggcgctggtcatcggtgcgatcggcgtggtgttcggcgatatcggtaccagcccgctgtacaccctgaaggaagcgttctcgccacactacgggctcaacagcgaccacgacaccgtgctgggcgtgctgtcgctggcgttctgggcgctgaacctggtggtgaccctgaagtacgtcaccatcatcatgcgcgccgacaacgatggcgaaggcggcatcatggcgctgatggcgttgacccagcgcacgctgcgcaacggctcgcgctcggcttatgtggtgggcatcctcggcatcttcggcgcctcgctgttcttcggcgacggcgtgatcaccccggccatgtcggtgctcagtgcggtcgaaggcctggaggtggccgcgcccggacttcatgtcttcatcgtgccggtcaccctggtggtgctgctggcggtgttcgccgcgcaacgcttcggtaccgagaagatcggcaaggcgttcggcccgatcatggcaatctggttcgtgtcgctggcggcaatcggcatctacaacatcgtcgatgcgcccgaggtgctgaaggccttcaacccctggtggggcatccgcttcttcatggagcacggctggcacggcatcttcattctcggtgcagtggtgctggcggtgaccggcggcgaagcgctgtatgcggacatgggccacttcgggctgcgcccgatccgccacgcctggtacttcttcgtgctgccgtgcctggtgctgaactacctggggcagggcgcactggtgctcaaccaccccgaggccctgaagaatccgttcttcgaggcagtgccgtcgtgggcgctgtacccgatgatcatcctggccaccatggcggcggtgatcgcctcgcagtcggtcatcaccggcgcattctcggtctcgcgccaggccatgcagctgggctacatcccgcgcatgcgcatcaagcacacctcgcacgacaccatcggccagatctacatcccgggcatcaactggggcattgcggtgatggtgttcgggctggtgctggcgttccgcagttcgtccaacctggccgtggcgtacggcatttcggtgtcggccacgatgctgatcgacaccctgctgctggccgtggtggcgcggacgttgtggccgaagtcgcgtggctggctgctgccgctgtgcgtggtgttcttcatcatcgacctcggcttcgtcatcgccaacggcgccaagctgctgcagggcgcctggttcccggtggtgctgggcatcttcctgttcaccatgatgcgcacctggcgccgtggccgcgagctgctgcgcgacgagatccgcaaggacggcatccgcctggataccttcctgccgggcctgatgctggccccgccggtgcgcgtgccgggcaccgcggtgttcctcaccgccgacccgaccgtggcgccgcatgcgctgatgcacaacctcaagcacaacaaggtgctgcacgagcgcaacgtgttcctgcacgtggaaaccctgccgatcccgtatgcgatggaagggcagcggctgaagatcgaatcggtgggtgacgagttctaccgcgtctacgtgcgcttcggcttcatggagaccccggacgtgccgctggcgctgatgcgctcgtgcgaccacggtggcatctatttcgatccgatggacactaccttcttcgccagccgcgagaccatcgtcgccaccgccaaccgcggcatgccgatctggcgtgacaagctgttcgcgctgatgcatcgcaacgccgccccggctacgggcttcttccggattccaggcaaccgcctggtcgaactcggggcccaggtcgagatctga

SEQ ID NO: 496580 - DNA, 1041 bp, Stenotrophomonas maltophilia
atgaccgacgaccgcatcatcggcgccggcgccacccgcgaggatgacgccgccgacgccagcatccgccccaagcgcttggccgactacctcggccaggccccggtgcgcgagcagctggagatctacatcgaagcggccaaggcccgtggcgacgcgctcgaccatgtgctgatcttcgggccgcccggcctgggcaagaccacgctcagccacgtcatcgccaacgagctgggcgtggccctgcgggtgacctccggcccggtgatcgagaaggccggcgacctcgctgcactgctgaccaacctgcagccgcacgacgtgctgttcgtggacgagatccaccgcctgtcgccggtggtcgaggaagtgctgtacccggcgatggaggacttccagatcgacatcatgatcggcgagggccccgccgcccgttcgatcaagatcgacctgccgccattcaccctgatcggtgccaccacccgcgccggcctgctgaccgcgccgctgcgcgaccgcttcggcatcgtccagcgcctggagttctacagcgtcgaagagctgacccggatcgtgcgccgttcggccaccatcctcggcatcgactgcaccgccgatggcgccggcgagatcgcgcgccgcgcgcgcggcaccccgcgtatcgccaatcgcctgctgcgccgcgtgcgcgactacgcgcaggtgaaggccggcggccacatcgacgaggccgtggcacaggccgcgatgaagatgctcaaggtcgatccggagggcttcgacgagctcgaccggcgcctgctcaagaccctggtcgactacttcgacggcggcccggtcggcatcgaatcgctggccgcggcgctgtccgaagagcgtggcacgctggaagacgtggtcgagccgtacctgatccagcagggcttcctggtgcggaccgcgcgcggccgcatggccacccacaaggcttaccggcacatgggcctgaagccgaagaacccgccgcaggacctgttcgcggaggttcccgatgtcggttga

SEQ ID NO: 496581 - DNA, 432 bp, Stenotrophomonas maltophilia
atgtcggttgagccccgattcagttggccgacacgcatttactgggaagataccgacgcaggtggcgtggtctaccacgcccgctacgtggccttcatggaacgggcccggaccgaatggatgcgtgcgctcggctacggccaggagcgcatgcgcgccgagcacgggatggtcttcgcggtgcgctcgatgcagatggatttcatcaggccggcacggctggatgacaccctgcaggtgactgcccgcctggtccagctgaagaaggccagcatggtcttcgaccagcagatcctgcgcgacggcgagctgctgctgtccgcgcaggtccgcatcgccgcactggaagcggccagtttccgcccgcgtggcatggacgatgccgtccttgccgtgctgcaaccccacctccaccccgaatccgaacattga

SEQ ID NO: 496582 - DNA, 780 bp, Stenotrophomonas maltophilia
atgatcgcaacgctcctggccctgcaggccacggtcaccgaggcactgccggccgacgtcagcaacgccgcgacacagacccttgcccaggccaccaccggcggcggcatcaactacctcgaactgatggccaaggccagcctgccggtgaagatcatcgtgctgctgctgctggtcggctcgttcgtcagctgggtgatcattttccgcaaggcccgcgtgttcaagcaggccacccgcgaagccgacgagttcgagaaccgcttctggtccggcgccgacctgggcaagctgtacagcgcagccaccgaccgcagccgcagcgtgaccggcctggaagccatcttcgaagccggcttccgcgagtacacccgcctgcgcgacaagcgccggctggatggccgtgcgcagcttgaaggcgcgcagcgcgccatgcgcaccacctacacccgtgaagtggaccagctcgagcgcaacctggagctgctggccaacatcggctcgactgccccgtacgtgggcctggtcggtaccgtgttcggcatcatggtgaccatgcacgacatgatcagcagcggtgcgcaggccggtatcgccgccgtcgcgccgggcatctccgaggcactgttcgccaccgccatcggcctgttcgtggcgatcccggcggtgtgggcctacaaccgcttcaccacccgcgtggagcgcatgtcggtgcggttcgagaccttcgccgaagagttcagctccatcctgcagcgccagagcgctggcgacgagtaa

SEQ ID NO: 496583 - DNA, 429 bp, Stenotrophomonas maltophilia
atgtccgctgccatcggtcgccgcaagcgccgcaagctgaaatcggaaatcaacgtcgttccctacatcgacgtcatgctggtgctgctgatcatcttcatggtcaccgcaccgctgctcaccctgagcttcgacgtcgacctgccgcagtccaacgccaaggcgctggagagcaagcaggacccggtgatcgtctcggtgcgccaggacggccagctcagcctgaagctgcccgacgccaaggagccggccgccgtgtcggccgaggaactggaaggccgcctggccggcatcgccgcccaggacaagggcgtgcgcgtgatcgtcgccgccgaccgcgccgtggcctatgagaaggtcattgccgcgatggacgtgatcaagcgcgccaaggtagacaaggtaggcctggccaccgatgcacgctga

SEQ ID NO: 496584 - DNA, 1056 bp, Stenotrophomonas maltophilia
atgcacgctgacgccctgccacccccgcatcagcgcgaacccggctggggtctgcccctggcgctggcgttgctggtgcacctgctggtcgcgctggtcttcatcgtggcctggctgtggtcgccccagcgcaacaccgatgccgccgctggcgacccctcggtcgaggccagcctggcgctgtccgcctccgaggcgtccgccgcacgccaggcgctgcgccagtcggagaagctggaggacctgccgccgccggtcgccgagccgatcccggtgccggaagacaccattccgccgccgcagccgattcccgagccgcgcccgcaggacgcgcccacgccccagcagcaacaggcgcaggagcgtgttgcgcagccggacaccaaggaccaggaagcggtgagcgcactggccgtctcgcaggagaaggccaagcaggaacaggaagccaagcgccgccaggagcagatcgacctgaccgaacgcaagcgccaggaagaagcggagcagaagctgcgcctggccaaacagcaggaagcggacgagaagaagaagcaggccgagcaggagcgcgtcgcggctgacaaggccgaggccgagaagcagaagaagatcgccgagatccgtgcccgccgcgagcaggccgagaaggaagccaagctggccgagcggaagctgcgcgaggtcgccgccgcgcgcaatgctgccggcagtgccgctgccggctccagcggcgcttcccagccggcggccggtggtggtggcaacagcgacgatctttcagccaagtacgccgcagcgatccaggccaaggtgctgtcgcagtgggtgcgcccggatacggtgccgctgggccagcgttgccagatcaccatcacccagattccgggcggcacggtgatgcaggccaaggtcagcccgaactgcccctatgacgaggccggcaagcgttcgatcgaggccgcggtgctcaatgcgcagccactgccgtaccgcggcttcgagtcggtgttcgcgcgtacgctcaacttcacctttaccgcccaggatcgctga

SEQ ID NO: 496585 - DNA, 1320 bp, Stenotrophomonas maltophilia
atgaaaaagatgcctcgctggcttgccgtgtttgcggccctgttgctgccctttgctgccgtcgcgcagcagaaggggctggatatcgacatcatcggcggcaatgcctccgccctgccgatcaccatcgtgccgatgccctaccagggttcgtcggccgctccgcagaccgacgtcgccggcgtggtccgcgccgacctggagcgttcgggccagttccgcacgctgccggaagcgcagatcgtcgagaagcccttgcgtggcggtgacatccagttcgccacctggcgcgcgctgaagcagaactacatcgtggtcggccgcgtgctcgatgccggtgccggtgcctaccgcgtcgagtacgaactgttcgacgtgcccaagggcgagcgcctgctgggcctggcgatgaccgcccgtggcaacgccatgcgcgacgtcgcccaccagatggccgacgccatctacgagaagatcaccggcgtgcgcggcgccttctggacccgcatcgcctacgtgaccgccagcggcaagggcgatgccatgcgctatgcgctgatggtggccgactccgacggctacaacccgcagaccatcgtgcgttcggccgagccgctgctgtcgccgtcgtggagcccggatggcagcaagctggcctacgtcagcttcgagcgtggcaattcggcgatctacatccagaacatcggcaccggtgcgcgcgaactggtcaccagcttccgcggcatcaacagcgccccggcgttctcgcccgatggccgcaagctggccctgaccctgtcgcgttcgggcaacccggaaatctacgtgatggacctgggcagcaagcagctgacccagctgaccaaccacttcgccatcgacaccgagccgacctgggcgccggatggcagcgcggtgtacttcacctccgaccgcggcggccgcccgcaggtctacaaggtcggcgccggtggcggcagtgccgagcgcgtgaccttccagggcaactacaatgccaagccctcggtgtcctacgatggcaagaagatcgccgttgcgcagggctcgggcaacagctacaagatcgcgatgatggacagctcgctgggttcgccccgctggagcacgttgtccccgggttcgctggatgaatctccgagctttgcgcccaacgcaagcatggtgttgtacgccgcccgcgagggtggccgtggtgtgctgtacgccgtttccgccgatgcgcgcgtgcgccagcggttggttctggctgacggagatgtgcgcgaaccggcatggtccccataccgtacccagcgctaa

SEQ ID NO: 496586 - DNA, 519 bp, Stenotrophomonas maltophilia
atgaacaagtccacccgcgttctgcttgtttccctgctgtctgtggccgtcctggccggttgctcgaagaaggtgaaggaagagccggcaaccccggtcgacaccggcacctccaccaccaccccgaccggtccgtcgacctccggcctgtacggcccgggcgacctggacaccgacgcttgcctgcgccagcgcgttgtctacttcgacctggacaaggaagacgtgaagccggaattccaggccatcatggcttgccacgccaagtacctgcgtgaccgtccgtcctcgcgcatcaccctgcagggccacaccgacgaacgcggttcgcgcgcgtacaaccaggccctgggtgagcgtcgtggcaacggcgtcaactcggccctgcaggccaacggtggctcggcttcgcagctgaccgtcgtgtcctacggtgaagagcgtccggtctgcaccgagtcgaacgagtcctgctggtcgcagaaccgtcgcgtcgaaatcgtctacaccgcgcagtaa

SEQ ID NO: 496587 - DNA, 819 bp, Stenotrophomonas maltophilia
atgcgcattggcatcaaactgatgctggtcgttgcggcagccctcgtggctgccgcaccggcgcatgcacagcgacagagcctggccgaccgtgtcggcgcgctcgagcagcagatgtacaacaacagcgccaaccaggacctgttgaaccagatcaatcagctgcggcagcaggtcaccagcctgcaggcctcgatcgagcagttgcagcacgacaacgcccagctcaagcagtccgcccaggaccagtacctggatctggacagccgcctgaaccggttggaagggggcaatgccgccccggccctgccgcccgttccggcgagcgcgccgaaggccgcaccggccccggcaaaacccgcagcggcggccacttccgagcggccgccttccgtccacggtgatgccggcagtcttgccgccaccggcgacgagcgcacctcctacaacgtcgccttcgattcgctgaaggccggcaagtacgatgattcggcgcagttgttcctgagcttcctgcagctgtacccgaacggcgtctacgcgccgaacgcgctgtactggctgggcgagagctactacgccacccgcaacttcccgatggccgagacccagttccgcgaactgctctcgcgctatccgacccacgacaaggccgccggcggcctgctcaaggtcggcctctcgcagtatggcgagggcaaggtcgaccaggcccagcagacgctggaggccgtcgtggcgcagtaccccggctcggacgccgcgcgcaccgcgcaggaccgtctgcagtccatccgcctcggcaagcagatccgctga

SEQ ID NO: 496588 - DNA, 702 bp, Stenotrophomonas maltophilia
atgaccgccgttactccgtccagcgccgccgccacgcccagtgagatcgtgcagtcgcccctgccacgcctgaagatcaccgagatcttcacctcgctgcagggcgaagccgataccgccggctggccaaccgtgttcgtgcgcctgaccggctgcccgctgcgttgccagtactgcgacaccgcctatgccttccacggcggcacctggtgggatatcgacgacatcgtggccgaggtgctggcccagggcgtgcgccacgtctgcgtgaccggtggcgagccgttggcgcagaagcgctgcctggtgctgttggaaaagctgtgcgatgccggcatggacgtctcgctggaaacctccggtgcgctggacgtcagcgcggtggacccgcgggtgtcgcgcgtcgtcgacatcaagacgccgggttcggccgaagccgcccgcaaccgcctggaaaacctgccgctgctgaccgcccgcgaccagatcaagttcgtcatctgcaaccgcgaggactacgactgggccaaggcgatggtcgccgagcacggcctggtgcagcgctgcaccgtgttcttctcgcccagcaagggcgagatcaccgcgcggcagctggccgactggattgtcgaagaccggctgccggtgcgcttccagatgcagttgcataaaatcctgtggaacgacgagccgggccgatga

SEQ ID NO: 496589 - DNA, 666 bp, Stenotrophomonas maltophilia
atgaagaaggcagtcgtgcttctctccggcggcatggattcagccgccgtcatcgccatggcccaggaacagggcttcgccgtgcatgccctgagcgtgcgctatggccagcgccatacctccgaactggacgctgccgcccgcgtggccaaggcccagggcgtggtcgcgcacaagaccgtggacgtggacctgcgcagcatcggcggctcggcactgaccgacgacatcgacgtgccggaggccggcggtgccggcattccggtcacctatgtgccggcgcgcaacaccatcatgctgtcgctggccctgggctgggccgaagtgcttggcgccaacgacatcttctgcggcgtcaacgccgtggattactccggctacccggactgccgccccgagttcgtggcggcgttccaggcgctggccaacctggccaccaagtcgggcgtggaaggtgcgggcatcaaggtgcacgcaccgctgcagttcctcagcaagggccagatcgtcagcgaaggcgtgcgcctgggcgtggacttcggcctgaccgtgtcctgctacaacgccgacgctcacggcgccgcctgcggtcattgcgatgcctgccgcctgcgcgcgcagggctttgccgaggccggcgtgcccgaccccacgctgtacgcctga

SEQ ID NO: 496590 - DNA, 957 bp, Stenotrophomonas maltophilia
atgcgcctcacctgctgtctgatcgccatcctgctgttgccctgcacagcagtggcctcgccgtcccaggtcgtcactgacgacatcgcccgcttctgggccacctatgacgcggtgcgcgccgaacctgatgccgaacgccgcgtggtgctggtccagcaacgctacatcgatcccggcagccccggactgcatgcactgacgcaggtccgcaactacacggcccgcgaatacgccgaggccatgcagtcatggccacgcttctggacttcggtacggccgttgactgcgaacgcgcagcaggccagcgccacgctggaccgggacctggacgcgttccgcgcgctctaccctgcactgcgtccggccaccatcacctacgcgatgggcgtgctgcgtaccggcggcaccacgttgggcgacaaggtgttgatcggggcggagatggcgctgggcgatgagcgcgtggacgtaagcgagctgcccgagccgatgcgcggccgcctgcggatcttctacgacagccgccccggtgcgaacaacgcgcagaacaacctgcacgagtacgtgcatacccagcagcgcgagaccactggcagcctggcccagtacgcagtacgcgaaggcgtagccgaatacgtggcagagcgcatcagcggtcgccgtccggcactgccgctgtacgcctatgggcccgcgcacgaggcacaaatccgcacgcgcttccttgccgagatgcacggtgacagcctggacaactggctgtacaacagcgcgcgcaatccgttcggggtgagtgatctgggctactacgccggataccgcatcgcgcaggagtacatgcgccaacagaccgacgagggggccgccatcgcgcggatgatcgaactggactacgccgatccggacgcggtgcgcggcttcatcgaggcatcgggatggttgcaggcccgctag

SEQ ID NO: 496591 - DNA, 369 bp, Stenotrophomonas maltophilia
atgactcacacgcgactcgaggagctcgcacagcggttggccgctaggacccaggaactgcgcggcgagcgcaccccggcgccggcattgcgggtggtggcgggagacgcacatgtggtccgcggggagaggcgcatggacgcgatcatgcgcgagtggcattgccgcatgatccgcaacgtacgccgacgctggggcgaacccatgcagcatgtgatcgaccaggcatgttgcggtgtggtcaacatcgagcagctcgccgacgacgcactgatccagttgcacaaggacatggagcgcgcggaggagtgcatccgcgagggcatttccttccacgacgccgggctgttgcgcgcgcattacggctga

SEQ ID NO: 496592 - DNA, 507 bp, Stenotrophomonas maltophilia
atggacgccagtaccgctcgcaccctcaacatgcgcctccgcgtggccgccgccggcggcccggccgaatgggcccgcctgtacggtggcacccgctgggcccagccccaggtcagccagtggatttccgagagcaacccgaagagcatcggccatcggcttgcgcgcgatcttgaatcagtgatgcagcttccacatggaacgctggatcgcgtcgatcaggacggagacgtgtcgcttcagtctcaatctacgggactggatttcgagaaaatgagcgctgcggtcaaggtgctttcgcactacctggagctggtcggcgatccaccggaatggatctacgatcccgtgctgctggagaccgcattcatggtcgtggacgagttcggtcagccctctgcaccggacaatgtgctcgacctgacgaagcttctggcaagacggatcagggaggcaaaggatgactcacacgcgactcgaggagctcgcacagcggttggccgctag

SEQ ID NO: 496593 - DNA, 312 bp, Stenotrophomonas maltophilia
atgaccaaaacggtattgactatccattaccgtggcagtaatgtgtggcccatgaacctcatcgactacgccatctcccaagggggctacggcacccccagctgccccgtcatgcgccgcctggcccaccagaccggttgcgcgctgcggaccctctacatgatcgcccgcggccacaagctgcccggcgcgcgcctgtgccggcgcatcgagctggccactgcgggcgccgtgcgccgcgaatccctgcgcccggatgtgttcggtccggccccgtcgcccgtcaaaggagaagccacccatgcagcttga

SEQ ID NO: 496594 - DNA, 429 bp, Stenotrophomonas maltophilia
atgcagcttgatacgttcggtgagtatgtccgcagccgcctggagcactggggcggcgaatatgcgctgcatcgcgactgcgaatacctcggcttccagtcgcgcaacctgctggcggtgctgatcgagcatcgtggtgacatgccggggcgggcccagggctacaagcctctggaaaccgatcagctggcgcagcagatcgaagacatcatcacggcggtcgcgcgtgacaacgtggcgatggcctgtgcgctgcgcggctactactgcgggcgtggccgacgcaaggtcgaacgattcgaaacggcgaatctgctgctggccaacagcgggcagcggccggtatccaaccggcattacctcaacctggtcgaacttggcttccagcgcgtacgtggctggatggagggcatcgcccaggccgcatga

SEQ ID NO: 496595 - DNA, 198 bp, Stenotrophomonas maltophilia
atgaaagaagaaatcatcagcacggccggcgcggcggccatcaagtcggcgccgccggttaccgtcgccggtgcgcttgcagccggcatcaccctggaccgcctggtcgtggtcctcaccatcatctacctggcggcgcagattgcctatctgggctggcgctggctgcgcgaatggcgccgcagggagcgcgaatga

SEQ ID NO: 496596 - DNA, 537 bp, Stenotrophomonas maltophilia
atgagccggcccggcagtacattgccggtacgcagcctggtcgccgcgcttgcgctgagtgctgcgggcctgatcgccatcgttgaccgcgagggatacaccgacgccgcagtggtgcccacgcgcaatgaccggcccacctatggcttcggctcgaccgttcgcgaggatggcacgccggtgaggctgggcgaccgcaccacgccggtacgcgcgctgcatgccgtgcaggctcatctggccagggaggaagggcagttccgcgcgtcgctgcccggtgtggcgctcagccagggcgagtacgacgtctatgtcgatttcctctaccagtacggcatcggcaactggcgcgcgtcgtcgatgcgccggcatctgctgcagggtgagtatcaccaggcctgcgatgccttgctgctgtggaggcgggcagggggctacgactgttcaacccgcatcgacggccgccccaacaccgtgtgctggggagtgtgggagcgccagcagcagcgccacgcgcgttgcctggcggagcagtga

SEQ ID NO: 496597 - DNA, 465 bp, Stenotrophomonas maltophilia
atgccgcgcatgctggtggtgatggcgtcgctgctgctgtggtcgttgctgatgttcatgactggctggcgttggcgcggtgatcgcagcgacctcgcgatggcgcgtgccgatgtggagcaacaggccggcgcggtgcagtccgaacggcggttgcgccgggatcaggaagaacggagcgaggcgatggcctcactgggggaacaacatgaacaggatcgtgagcgcgcggccgaggtggatgccgatgtggtggctgccctgcgcgctggcactctccgcctgcgcgacgacctcgccgcgtgccataccggccgtctgtccgaagccgccgcccgcaccggcgaacgtgatgcgggcgcccagttacgagcagaggttgcggcagcgcttgttcgaatcggacgcgatgccgacgaccagctccgtgcctgccaggccgtgatcgaactggatcgccgttga

SEQ ID NO: 496598 - DNA, 864 bp, Stenotrophomonas maltophilia
atgcgcgtcgtcgctctctccgccctgatcctgctggccgccgcagggccgggcctcgcagctgttcccaccgtgccggcagcaccgccggcatcgaccgctgcggccgcaccactggtcatcggcgagaccttcaccgtgcagtcgaaggcactgggcgagacccgccgcatcaatgtctatcgtccgcagccctggggcctggatccgaaggcgccgctgccggtgctgtacatggccgatggcggcatcggcgaggatttcctgcatgtggcagggctggtgcaggtgctgaccggcaatggcagcatgcgtccgttcctgctggtcggcatcgagaataccgagcgccgccgcgacatgaccggccccagcagcgacccgcaggaccagaagatcgcgccacgcatcggtggctcggcggcctaccgcagcttcctgcgcgatgaactgatgccgcaggtacgccagcgctacccgaccacagacgagcgtgcgctgatcggtgagtcgctggctggcctgttcgtggtcgagacgctgctgcaggagccgacgctgttcaacagctatatcgcgctggaccccagcctgtggtggaaccgtggtgcgatgctggccggagcatcccggcagctgccggcggtgacgcgtgcacagccgcacgtgttcctggccagcagcgggcaaccggaactggccgcctccacggcacgactggccgcgctgctgcagcaggcctcgccgtcgccgctggtgaagtacctgccgctgccggaggaaacccacgcgaccgtctaccacccggccgcattgcaggcgctgcgcacactgttcccggcgccgccgccggcctcgccctga

SEQ ID NO: 496599 - DNA, 939 bp, Stenotrophomonas maltophilia
atgcagcgtgtgcgtggatggagtgtggcggcctgcctggccatggggggctgtgcgatgtcggtggcgccaccggcaactccggatgaagcgaaggaaagcgcggccaccgccgcgcagggcgtggtgctgccggataccgaggcgctgcgcgtgcacgacccggtgggacgcgattacccgatctgggtggcgttgccggccgactacgccgcacatccggagaagcactatccggtgctgtacgtgaccgatgcgctgtacagttttccgctggtgcgcagcgtgcgcaacctggtggggcagcagggcgtcaacatcgagaacttcatcctggtcgggctgccgccgcaggaggggctgacctccaagcagagccgctcgcgcgactacacgcccagcaccccggcgcgtacggtcgatggctactacagcgacgacgtctcctacggcggggccgcgcactaccgcgatttcctggcggcgcaggtgctgccgatggtcgatgcgcgctaccgcaccgatcccacccgccgcatgttcgccggccactcctatggcgcgctgttcggcgcctatgtgctgaccacccagccggacttgttcagcacctacatcctgtccagtccgtcgctgtggttcgaccagctactgctgccacgcatgcaggacgttgccgtcatcccggcgcagcccacgcgcgttctgttgtcggtgggcagctatgaaacggacaagcccgggccgcgctattcaaccggcaacgacatgctgcgccagaccgccgacttcaccgcccagcttcagcgcagtggccgcaagctgaaggtggacaacgtggtgatcgacggtgaggaccacctgaccgtctacccgcgggcgatcacccgtgcgctgctggaagtgatgccgggcgaggggccgtataccggcggttga

SEQ ID NO: 496600 - DNA, 423 bp, Stenotrophomonas maltophilia
atgttgctgtccaagcgccacgttgaaccccgcgtcctgctcatcgaggacgccgaggaaacccgcgagctgagccgactggcgctggaaagccaggcctgccacgtagtgggcgtgagctctgccgaagcggcgctgggcctgctggcggccggtgagcgtttcgacctgctgttcaccgacgtcaatctgggtgcgatcagtggcattgaagccgccaaccgggtccgcagcctgtatccccagctgccgatcctggtgacgtcgggcatggaccagcaccaggtgctgccgcagctgcgcgacggcatccatttcctgcccaaaccttacaacatgagcgagctgctcgacgccatccggctgtgcttccggcacgccgatgtgggcgtattgaccgggccggatgcacaggccgcctga

SEQ ID NO: 496601 - DNA, 768 bp, Stenotrophomonas maltophilia
atgaccgtattgtcccgcctgcccaccaccgcgcgcctgttgctggtgctgctgggtgtcggccttggcctgaacctgcgggatatcgccgcggccatcggcacaccggttcccgcactgcccatcccctatggcggcagcctgttggacaacgcgctggcggtactggtggcactgctgctggccgcgctgctgcggccccgtggcatgggcctgatggccagcttgggactgcgcggaaacggctggggcggcccgttgtgggtgctgctggccagcctgccctgctggctgggactggcgctgctcggaactccgaacacggcgctgactgggctggatgccacgatgctggccgcgctgttcccgctggccgaggaactgctgttccgtggcctcggcttcgtgctgctggtgaagatcgtgcgcggtccgtggccgttgctcgcgctgccgcaggcactgctgttcggcatggtgcactggctcggcttcggcgggttcgacggcggcggcatcgcactgttcattggcgcggtgatcgcgctgggcggcttcatcttcgcctggctcgaccacctcgacggcgacaccctgtggtgcggcctggtcctgcatgtttcgatgaaccttgcctggaatgtgttcagcctcgatgacgccatcgcattgggttggcaggccacctgcctgcgcatcggcaccgccctgctcgcggtggcggtgctggcctggcacgtgcggttcaggcgccagagagggctgtaa

SEQ ID NO: 496602 - DNA, 306 bp, Stenotrophomonas maltophilia
atgctgtgccccgtgtgcaagacccagacgctgcagatggccgaacgccacggcatcgagatcgattactgcccaagttgccgcggcgtgtggctggatcgtggcgagctggacaagatcatcgagcgcgcaggcgccggtgcggccgtaccaccgccagcgcccgtgcaggctcagccggcgtcgccgccaccggtgatgcaccgtgatacccgccacctcggccagcgctacgaggacaaccggggccagggctacaagaaaaagaagaaggacagcttcctgtcggaactgttcgatttctag

SEQ ID NO: 496603 - DNA, 513 bp, Stenotrophomonas maltophilia
atgtcgttgcagatccgccgcgccacccttgccgatgtcgacgccctgtcggccatcgcgatcgccacctacaacgaaacctggggcgattcctatccgccgcaggagctgcatgatttcctgcaggcgcactacagcagcgaaccgcagcgcactgaactgtccgacccacgcagtgccatctggctgctgatggacggcgacgccgtggtcggctacctggccgccggtgccaacaccctgccgcatgccgatgcacgcgagggcgacatcgaactgaagcggttctacatcctggccgcacaccagaacggcggccatggtgcacgcctgatggacgcgttcatggcctggctggaccagccgcagcgccgcaccctgtgggtgggcgtatgggaagaaaacttcggcgcgcagcgcttctacgcgcgctatggctgcagcaaggtcggcgagtacgacttcatcgtcggtgatacccacgaccgcgagttcatcctgcggcggccatga

SEQ ID NO: 496604 - DNA, 996 bp, Stenotrophomonas maltophilia
atgagccgctcactgctttcccccagcctgctggccctgggcctggccgccgcattgccggtgttcgcgcagtcgcacgccgggcatgacatggccgcgatggatccgcccgcaaagaccgccaacgcgccggtcgaacaggccgatcattcgaagatggattcgggcgccacagatcatgccggcatggatcactcgaagatggaccatggcgcgatgcaaccggcggcgatggaccattcgcagatggaccacggggcaatgggccatgccacgcccgcgcccaccgaaccgcgcgaccccatcccggtgccgtccgatgccgatcgtgccgctgcattcccaccgatcgcgcacggcgcgatggagcatgcgccggagatcaacagcctgctgctgatcgaccgcctcgaacattgggacggcaagagcagcaacggccaggcctgggaggccaccggctggatcggtggcaacatcaaccgcctgtggctgcgcaccgatggcgaacgcagccgcggccgcaccgagtcatcgtcgctggaagcactgtatggccgcagcgtgtcgccgtggtgggacgtgctggtcggcgtgcgccaggacttccgcccggctgactcgcgcacgtgggcggccatcggcatccaggggctggcaccgtacaagttcgagagctcggccacgctgtatatgggttccggcggccaggtgctggccaaggccgaggtcgagtacgacgtgctgctgaccaaccgcctgatcctgcagccgctgctggaagccaccatcgcggccaaggatgaaccggagtacggcattggtcgcggactgaacaaggtcgaagccgggctacgcctgcgctatgagttcagccgccgttttgcgccatacatcggcatcagccacgagcgcacgtttggcgacaccgccgactatgccggtgaccacgcacgcgacacacgctgggtgaccggcgtgcgaatgtggttctga

SEQ ID NO: 496605 - DNA, 1812 bp, Stenotrophomonas maltophilia
atgaatacccgcattccccccggtccgggcgccgtgcccatgccgtcgcgccgcctgttcgtgcagggcctggccgccggcggcgtggttgccggcatcgccgccgtcggcgtaccacagcgcgcgctcgccgccgccacggccaccccgcgcctggccggcgccccagccgtgctcagcgacacccgcatcgaactggccatcggcgaatcactggccaacttcaccggccgcacccgcccggcgatcaccgtcaatggatcgctgccggcgccgatcctgcgctggcgcgaaggccagaccgtggacctgttcgtgcgcaacacgctggaacgccacccgacctcgatccactggcacggcatcctgctgccggccaacatggacggcgtgcccggcctgagcttcaacggcatcggccccggcgagacctaccactaccacttccagctgaagcagtcgggtacctactggtaccacagccactcgatgttccaggagcaggccggcctgtacggcgcgctgatcatcgatccggccgaaccggcgccgtaccggcacgaccgcgagcacgtgatcatgctgtccgactggaccgacatggatccgggtgcgctgttccggcgcatgaagaagctcgccgagcatgacaactactacaagcgcaccctgcccgacttcctgcgtgacgtgaagcgcgggggctggtcagccgcgctgtccgaccgtggcatgtgggggcggatgcggatgacgccgaccgacatctccgacatcaacgcccacacctacacctacctgatgaacggcaccgccccggccggcaactggaccgggctgttccgcagcggcgagaaggtgctgctgcgtttcatcaacggcgcctcgatgacctacttcgatgtgcgcattcccggcctgaagatgaccgtggtcgccgctgatggccagtacatccacccggtcagcatcgatgaattccgcatcgcgccggccgagacctacgatgtgctggtggaaccgagcggccaggatgcctacacgatcttctgccaggacatgggccgcaccggctacgctgccggcacgctggcggtgcgccatggcctgcaggcgccgattcccgagcgcgacccacgcccgttgctgacgatgagcgacatgggccacgacatgggcagtggtggccacggcggccacgacatggccgcgatgaagggcatggaaggcggctgcggcgccagcatgggccacggtgcgcatggcggcggtgatgccgccagcaaggcgccaaagcacccgcccagcgagcgcaacaacccgctggtggacatgcagagctcggcgaccgaaccgaagctggacgaccccggcatcggcctgcgcgacaacggccgccaggtgctgacctatggcgcgatgcgcagcctgttcgaggaccccgatggccgcgagcccagccgtgagatcgaactgcacctgaccgggcacatggagaaattctcctggtcgttcgatggcattccgttcgccagcgccgaaccgctgcggctgaactacggcgagcgcatgcgcatcgtgctggtcaacgacaccatgatgcagcacccgatccacctgcatggcgtgtggagcgatctggagaacgcgcaggaggaattccaggtgcgcaagcacaccatcgacatgccgcccggcacccgccgcagctaccgcgtgcgcgccgatgcgctcggccgctgggcctaccactgccatctgctgtaccacatggaagcgggcatgatgcgcgaagtgaggatcgaagaatga

SEQ ID NO: 496606 - DNA, 384 bp, Stenotrophomonas maltophilia
atgtccctggcttcgaccctgcttcgtgtcgtgctcatgctcagcctgttgctcaacgggctgaacgcggccatggccagcggtcatgaagaaatggggcggatggcacacgccgtcgcggccgccgcagctggcggtgacgccgactgccaccaccacgccggcatgcaggccgacccggccccgcaggccaaggcccccgcccacgacgcccactgccagatcaaggactgcgtgcgcagctgtgcccagcacccgttgctggtggtgcagccgttgccgttcatggccggcccggcgttgtcgctggcaccacagccgatgccggccaccggccgtccggcgccgccgctgccgccgatctcacgccctcccatcggctga

SEQ ID NO: 496607 - DNA, 1806 bp, Stenotrophomonas maltophilia
atggcttcccgtcccgcgcacgacctgctccaacgcgtctttggttacgacgatttccgtggtccgcagcaggacatcgtggagcatgtggctgccggtcacgatgccctggtgctgatgcccaccggcggcggcaaatcgctgtgctaccaggtcccggccctgctgcgtgacggttgcggcatcgtcatctcgccgctgatcgcgctgatgcaggaccaggtcgaagccctgcgccagctcggcgtgcgcgccgagtacctgaattccaccctggatgccgagactgccggccgcgtcgagcgcgaactgctcgccggtgagctggacatgctctatgtcgctcccgagcggctgctgaccggtcgcttcctgtcgctgctgtcgcgcagccagatcgccctgttcgccatcgacgaagcacactgcgtgtcgcagtggggccacgacttccgcccggaataccgccagctgaccgtgctgcacgagcgctggccgcagatcccgaggatcgcgctgaccgccaccgccgatccgccaacccagcgcgagatcgccgagcgcctggatctgcaggaagcacgccacttcgtcagctccttcgaccgccccaacatccgctacaccgtggtgcagaaggacaacgcccgcaagcagctgaccgacttcctgcgcagccaccgtggcgaggccggcatcgtctactgcatgtcgcggcgcaaggtcgaggagaccgctgaattcctctgcggccagggcttcaacgccctgccctaccacgccggcctgccgccagacgtgcgcgcgaacaaccagcgccgcttcctgcgcgaggacggcatcgtgatgtgcgccaccatcgccttcggcatgggcatcgacaagccggacgtgcgctttgtcgcgcataccgacctgcccaagtcgatggaaggctactaccaggaaaccggccgcgccggtcgcgatggcgaggccgccgaggcctggctgtgctacggcctgggcgacgtggtgctgctcaagcagatgatcgagcagtcggaggccggcgaagagcgcaagcagctggagcgggccaagctcgaccatctgctgggctactgcgaatccatgcagtgccgccgccaggtgctgctggccggtttcggcgagacctacccccagccctgcggcaactgcgacaactgcctgacaccgccggcctcgtgggacgcgaccattccggcacagaaggcgctgagctgcgtctaccgcagcggccagcgcttcggcgtcggccacctgatcgacatcctgcgtggcagcgagaacgagaaggtgaagcagcagggccacgacaagctcagcacctatgcgatcggtcgcgatctggatgcgcgcacctggcgcagcgtgttccgccaactggtcgccgccagcctgctggaagtggacagcgagggccacggcggcctgcgcctgaccgacgccagccgcgacgtactgaccggccgccgccagatcagcatgcgccgcgacccggccagcagcaccagcgggcgcgaacgcagtgcgcagcgtaccgggctgtcggtactgccgcaggatctggcgctgttcaacgccctgcgcggcctgcgtgccgaactggcccgcgaacagaacgtgccggcgttcgtgatcttccacgacagcaccctgcgcaacatcgccgaacagcgcccgaccagcctggatgcactggcacgggtcggcggcatcggcggcaccaagctgagccgttacggcccgcgcctggtcgagatcgtgcgcgaagagggctga

SEQ ID NO: 496608 - DNA, 1386 bp, Stenotrophomonas maltophilia
atgtccgctgcccccaccaccgccatttcccgcgatccggccaccggccagcagatcgccagccatcccttcgccacggatgccgagctggaagcgatcctcgatcgcggtcaggccggtttcgccgcctggagcgcccgcagcctggaacagcgagcgcaggtgttgcgtgcgatggcgggcgtactgcgccgtgaccgcgagacgctggctgccctggctaccgccgagatgggcaaggtgcaggccgaagcactggccgagatcgagaagtgtgccgtgctgtgcgactggtacgccgaccacggtgcgcagttcctgcgcgacgagccgacccaggtgcccgacgacaaggcttacgtgtcctacctgccgctgggcgtggtgctgggcatcatgccgtggaatttcccgtactggcaggtgatgcgcgcggcggtaccgatcctgatgggcggcaacggcttcctgctgaagccggccgagaacatcgtcggcaccgcgcagctgctcgatgccgcctggcgtgatgccgggctgccggaaggcaccttcatcgccgccaacatcagccgcgagggtaccagccgtgcgatcgccgatgaccgcatcgctgccgtcaccctgaccggcagcgtagccgcaggccgcagcatcgccgcccaggccgggcaggcgctgaagaaggtggtgctggaactgggcggctcggatccgttcatcgtgctggccgacgctgacctggatgcggccgtcgatgcggcggtgacctcgcgcttccagaacaccgggcaggtctgcattgccggcaagcgcatcatcgttgaagacgcggtgtacgaccgcttcgtggcgcagttctgccagaaagtgcaggcgctgaccatcggtgatggccgtgaagcgggcaatcgcattggtccgatggcacgccaggacctgctggaacagttggacgcgcaggtgcgcgcctcggtggacgcaggcgcgaagctgctcgtcggcggccatcagctcgatcgcccgggcgcgttctacgcgcccaccgtactggcggacgtagagccgggcatgcaggcctttgacacggaaacgttcgggccggtggcctcgatcagccgcgcccgcgatgccgaccacgcggtggaactggccaaccagagcgagttcggcctcagcggcaacctgtggaccggtgaccgcgcgcgggccatgcagctggcgcgccggctgcagaccggcggtgtgttcgtcaacggcttctccgcttccgaccctcgcgtgccgatcggcggtgtgaagaagagcggcttcggccgcgagctctcgcacttcggcatccgtgaattcgtcaacgcgcagacagtgtggttcgacaagcattga

SEQ ID NO: 496609 - DNA, 1641 bp, Stenotrophomonas maltophilia
atgtccaagggttcagatctgctcgtcgccgcacttgagaacgaaggcgtcgagcgcattttcggcattcccggcgaagaaaacctcgacgtggtcgagtcgctccgccattccagcatcgaactggtcatcacccgccacgaacaggcggcggtgttcatggcggccacttacggccgcctgaccggcaagccgggcgtatgcctggccacgctcggcccgggcgcgctcaacttcaccaccggcgccgcctatgcgctgctgggtgcgtggccggtgatcatgatcaccggccagaagggcatcgtcgccagcaagcaggcgcgcttccagatcgtcgacatcgtcggcacgatgaagccgctgaccaaacaggcgcggcagatcgtctcggcacgcaccattccgaccatcgtccgcgaggcgttccgtgtcgcccaggaagagcgcccgggcccggtgttgctggagctgcccgaagacattgctgccgatgaggtcgagggcgtggcgctgattccgccgcacgcggtggaccgtcccattgccagcccggaggcgctggatcgggcagcagagctcatccgcaatgcaaagcggccgctgctgatgatcgcttcggcggcctcgcggccgcagtccagcgacgcgctgtccgcgttcgtgctgcgcgccggcatcccgttcttcaccacgcagatgggcaagggcgcggtggccggtggttcaggcctgtacatgggcaccgcggcgctgaccgagcgcgattacgtgcacatggcgatcgaccaggccgacgtgatcgtgaccatcggccacgaggtcaccgagaagccgccattcgtgatgcgcccgggtgggccgacggtgatccatatcgggtactcgcaggcggcggtggaacaggtgtatttcccgcaggtggaggtgatcggcgatatcggtcgttcgctgacccagctggccgaccgcatcgagggcgcggtgccgaatgccgctgcgctgctgccgctgcgcgcgaccatcctcgaacacctggccgaccgggccgaagaggccgggttcaccccgcagcggctggtgcacgacgtgcgccaggtgatgccgccggatggcatcgtggcgctggacaacggcatgtacaagatctggttcgcgcgcaactaccgcacccaggtggccaacacgctgctgctggacaacgcgctggcgacgatgggcgcgggcctgccgtcggcgatcatggcctcgatcctgtatccgcagcggcgggtgctggcggtgtgcggcgacggcggcttcatgatgaacagccaggagctggagacggcccgccggctgggcctgaacctggtggtgctgatcctcaacgacggtgcctacggcatgatccgctggaagcaggccgtggacggattcaccgactacggcatgaccttcagcaaccccgatttcgtgaagtacgccgaggcctatggctgcaagggccacgaggtgacggccatcgagcagttcatcccgaccctggaagcggccttcaacgagggcggggtgcacctggtgtcggtgccggtggactattcggagaaccagcgggtgctggtggatgagttgcgccaggcgttccccggcaacaggtag

SEQ ID NO: 496610 - DNA, 1512 bp, Stenotrophomonas maltophilia
atgagcgaagctaccgataccccccccgtcgacgaaaacaagttgatcgccgagcgccgtgagaaactcaaagcgctgcgtgggcagggcatcgcgtacccgaacgacttccgtcgcgaggacttcgccggccgcctgcaggaagaattcgcagatgccgaaacctggaccgccgaggccctggaaggcaacggccgccaggtgaagatggcgggccgcctgatggccaagcgcatcatgggcaaggccagcttcgcgcagatccaggacgagtccggccgcatccagctgttcctgcagggcgcggtgctgggcgatgcctataccgccttcaagggctgggacgtgggcgacatcatcgccgtcgaaggcggcctgacccgtaccaagaccggcgagctgtcggtcaaggccgaatcgatccgcctgctgaccaagtcgctgcgcccgctgccggacaagtggcatggcctggccgacgtcgagcagcgttaccgccagcgttacgtcgacctgatcgtgaccccggagtcgcgcgcggtgttcatcaagcgctcgaagatcatccgcgccatgcgcgcgtggctggacaaccgcgacttcctggaagtcgagacgccgatgatgcattacatccccggcggcgcggcggccaagccgttcaccacccaccacaatgcgctggacctggacctgtacctgcgcgtggcgccggagctgtacctcaagcgcctgaccgtgggtggccttgagcgcgtgtacgagatcaaccgcaacttccgcaatgaaggcgtcagcacccgccacaacccggaattcaccatgatggagctgtacgaggcctatgccacgtacaacgagatcatggacctgaccgaaggcgtgatccgtgacgtggccaaggccgtcaacggtggcaccgaggtcgaatgggacggcgcgaagatcgacctgggcccggcattccgccgctggcgcatggacgaggcggtgcgccaccacaatccggaaatctctgcggcggactgcaccgaccgcgacgcgctgctgcgccattgcgagcgcttgaagatccgcgtcaagccgtcctacggctggggcaagctgctgctggagatcttcgaggccaccgtcgagcacaccctgatccagccgaccttcatcactgaccatccggtggaggtctcgccgctggcccgtgccaacgacaatgacccgggctacaccgaccgcttcgagctgttcgtcaacggcaaggagctggccaacggcttctccgagctgaacgatccggaagaccaggcccagcgcttccaggcccaggtggcggcgaaggaaggtggcgatgacgaggccatgcactacgacgccgactacatccgtgcgctggagtacggcatggcaccgaccggcggcctcggcatcggcgtggatcgcctggtgatgctgctgaccggcagcagctcgatccgcgatgtactgctgttcccgtacatgcgtccggagcagtaa

SEQ ID NO: 496611 - DNA, 1146 bp, Stenotrophomonas maltophilia
atgcagggtgcgagcgttcgcagcggcagagtatcctcgcctgctgatgatccagcgtggtcgagaaaccaggcagagtacgcgttgaacatcgtcatcgttgacgaccagacttcggcccggacgatgctgcgtcacgtcatcgaagacatcgcgccggaactgagcgtgtatgacttcggagacccgctgaccgcattggcctggtgcgaagcccatccggtcgacctgctgctgctcgattaccgcatgccggagatggatgggctggaattcgcccgtcgtttccgtcgcctgcccaagcaccgcgacattccggtgatcctgatcaccgtggtcggtgacgagccgatccggcaagcggcactggaagcaggcgtcatcgacttcctggtcaagccgatccgcccgcgcgagctgcgggcgcgctgctacaacctgctgcagctgcgccagcagaccgagaacgtgaagcagcgggcgctgtcgctggagcagcgcctgctggccagcatgcatgaggtcgaagagcgcgagcgcgaaacgctgtcgcggctggcacgcgcgatcgagttccgtgatgccggcaccagcgcctacctggagcgcatggcgcgcgtggccggactgatcgccgaacagctcgggctgcccgaagaggaggtgcgcctgatcgaaatggctgcgccgctgcatgacatgggcaagatcgccattcccgatgcggtgctgctcaagcagggcaagctcaacgaggaagaactggcgatcatgcgccggcacccgcggattggccatgaactgctgagcggcagccagaatcgcttcatccaggttggcgcgttgatcgcactgcgtcatcatgagcgctatgacggcagtggctatcccgatgggctggtcggcgacgcgattccgctggaagcgcgcatcgtggccgtcgccgatgtcttcgacgccctgatttcgccccgtccgtacaaggaagcatggaccatggaagccaccctggcttatctctacgctcagcgtggccgcctgttcgatccccgatgcgtggacgcgctgctgcgcggccgcgaacagctcgaccagatctgcgccgagcattcgatggcgtccgcgcgcccggggctgggcgcgtga

SEQ ID NO: 496612 - DNA, 2178 bp, Stenotrophomonas maltophilia
gtgaaacgcctgttgtcgcagctgcggctgcgcctgtcccagcgccaggacagcgagcacggccagcagatcgtccgcatcgtgctgatcagcctgatcctggcctacgtactgttgccggcaccgcgccacgatctgccgcacacccagtacgtcggtgtgctggcgatcgtgctgaccggcctgagcctgtcactgttgctgttcggctggctgctgtggcggccggcgcgttccgatccccgccgcgtgctgggcatgctggctgactacggcctcattgctgccggcatggtgcagatgggtgagccgctggcctgggtctacatcgtggtgatgtgggtgacggtcggcaatggcatgcgctttggcaaccactatctgtacgtggcggtggccatggcgatggtgagcttcggctgcaccgtgatgctgacgccttactggcaacagaatttccgcctggccatcggcctctggctgggcctggcagcggtgccgctgtacttctcgacattgctgcggcagctgaccgaagcgatggccgaggcgcgccgcgccagcgaggccaagagccggttcctggccaacatgagccatgagttccgcacgccgttgaacggtctcaacggcatgaccgaagtgctggccaccacgcgcctggatgacgagcagcgcgagtgcctcaacaccatccaggcgtcgtcgcgcagcctgctggcactggtggaagaagtgctggacatctcggccatcgaggccggcaagctgcgcgtggtggccgaggacttcgccgtggccgacgtgatccaggcgatcggtctgatcctgttgccacaggccaaggccaaacggctggattaccgggtgaaggtggccgatggtgtgccgccacgcgtgcgcggcgatgtcgggcacctgcggcagatcctgctgaacctggccggcaacgcggtcaagttcaccgaccatggccgggtcgagatacgtgtcggcgtggtgcaggccgatgccagcggggcggtgcggttgcgcttcgacatcctcgacaccggcatcggcgtgccacctgccatgcgtgcacggctgttcgacgcgttcgagcaggccgatgtcagcatggcgcgccgccacgaggggacggggctgggcacgaccatcgccaagggcctggtcgaggcgatggacggtgacatcggctatctggaaaacccgccgcgcggcagccacttctgggtcgagctgccgttcgcgccgccgcagccgcaggtgccgggcgcggtgccgagcctgagcggcgacgaagacgcgggcccgggcggcaacgtgatcgcttttgccgatccgttcctgcgccatcgcgcccgcgtgcgcagcatgcagatcctggtggccgacgaccacgaggccaaccgcatggtcctgcagcgcctgctgcagaaggccggccatcgcgtgctgtgcgtggacggcggtgaggcggtgctggatgcgctggccgacagcgagttcgacgcggtcatcgtcgatctgcacatgccgggcatgagcgggctggacatgctcaaggaactgcgggtgatgcaggccggcggcggtccgcgcacgccggtactggtactcagtgcggatgtaacgcccgaggcgatccagcgctgtacccaggccggcgcacatgccttcctggccaagcccgtcgttgcggtgcgcctgctcgatacgctggccgagatcgccagcaatgcccagctgaagaccatggccgcaccggtggtgcgaccggcggcgccgctgcaggatggcgtgctcgacagcagcgtgctggacgaactggcttcgctgggcatgggcgagggcttcgaacgtgagttcatccgccagtgcctggaggacgtggcgagctgcatgggcaaggccgagcaggccggcgaggccacgcagtgggatgtgttccgcgaacaatcccacgcgatcaagggcgtggccagcaacctcggcctgatgcgcgcgtccaaccgtgccggcgagctgatgcggatggccgactggcagctcaagaccgaatggcgtcagcgcctgggcatcctgcaggaggcgatcaaggaaggccggcgggcgctggacgcgcgggccgaacgccgcatgcgcggcgccgccgatgatggtgaagcgcgctga

SEQ ID NO: 496613 - DNA, 873 bp, Stenotrophomonas maltophilia
atgagtaccatcgaaaagctgccttcaagcggctcaccgttcgccaccatccgtaccgaagacagcgccgacggcgctgcccactggctgttcatgcacgccgatgccgccaccgggatccgtccctgctgccgcaaggacatgctcgacgaaatgtggagctacatggcggccatcacccgcagccctgccgaacgccacaacgggacattgcggcatttcgtgctggcctccgatgccgtcgcctacaacctgggcggcgacctggacctgttcacccgcctgatccgcgaaggcaaccgcgacctcctgctgaactacgcccagcgctgcgtggagggcgtgcaccacctgcacaccgggttcggcggcgacgtccgttcgatcgcgctgatccagggtgacgccctcggcggcggcctggaaatggccctggcctgccacgccatcgtcgccgaggaaggcagcggactgggcctgccggaggtgctgttcggcctgttcccgggcatgggtgcgtactccttcctgtgccggcgcgtgtccccccatctggccgagaagatcattctcgacggccgggtctacagtgccgaggagatgcatgccatgggcgtggtcgacgtgctggtgaagaagggcgaaggccgggcggcggtcgaggaactgatccgccagcagcagcgcacgccgcagtcctatctggcgatgaatgccgcacgcgccatcgcccagccggtcagctacgacgaactgctggagatcaccaaggtatgggtcgattccgccctcgcactcggcgaccgctcgctgcgcaccatggatcgcctgatcaaggcccagacccgtcgcgccagtctcgacgcggcctga

SEQ ID NO: 496614 - DNA, 1677 bp, Stenotrophomonas maltophilia
atgagtctggatcgtccctggctgcagagctatccgaaaggcgttcccgccgagatcgacgtcaacgagttccattcggtagcttcggtcttcgacgcttccgtcgcgaaattccgcgaccgtcccgcctactccagcttcggcaaggtcctcacctacggcgagaccgacgcgctggtcgaacagttcgcggcctacctgctcggtgagctcaagctcaagaagggtgaccgcgtcgccctgatgatgcccaactgcctgcagtacccggtggccaccttcggcgtgctgcgagccggcctgaccgtggtcaacgtcaacccgctgtacaccgcccgcgagctcaagcaccagctggtcgatgccggcgtgaccgcgctggtggtggtcgacaacttcggcgacaccgtcgagcaggtcatcgccgatacgccggtcaagcatgtggtcaccaccggcctgggcgacctgctcggcgccaagggcgtgatcgtcaacttcgtgctgaagtacatcaagaagatggtgcccaactaccatctcaagggcgcggtgcgcttccgccaggcgctcaagctcggcagccgccacagcctgcccaaggtcgagatcgaccacgacgacatcgcgttcctgcagtacaccggcggcaccaccggcgtggccaagggcgcgatgctgaccaaccgcaacctgatcgccaacatgcagcaggcctcggcctggatcagtgcgtccggcatcgagatgggcaaggagtggatcatcaccgccctgccgctgtaccacatcttcgcactgaccgcgaacgggctggtcttcatgaagttcggtggctgcaatcacctgatcaccaacccgcgcgacatgaagggcttcgtcaaggagctcaagtcggtgcgtttcaccgccatcaccggcgtcaacacgctgttcaacggcctgctcaacacccccggtttcgacacggtcgacttctcctcgctgaaggtcaccctgggcggcggcatggcggtgcagcgcgccgtcgccgagcgctggaagaaggttaccggcgtgaccctggtcgaggcctatggcctgaccgagacctcgccggcagcctgcatcaacccgcttaccctgaccgagtacaacggctcgatcggcctgccgatcccctccaccgatgcctgcatcaaggatgacaacagtgccatcctgccgctgggcgaggtcggcgagctctgcatcaagggcccgcaggtgatgaagggctactggcagcgcccggaggaatcggccaaggccatcgacgcggacggctggctgcataccggcgacatggccaagatggacgaacacggcttcttctacatcgtcgaccgcaagaaggacatgatcctggtgtccggcttcaacgtgtacccgaacgaagtcgaggacgtgatcgcgatgatgccgggcgtgctggaagtggccgcggtcggcgtcccggacgacaagtccggcgaggtggtgaaggtggtcatcgtgaagaaggacccgaacctgaccgccgaaatggtcaaggagcatgcccgggccaacctgaccggctacaagcaccccaaaatcgttgaattccgaaaggagctgccgaagaccaacgtcggcaagatcctccgtcgcgaactccgcgatacgcccgcccagtaa

SEQ ID NO: 496615 - DNA, 1683 bp, Stenotrophomonas maltophilia
atgagcacccacaacgagtacgactacatcatcatcggcgccggttcggccggcaacgtgctggctacccgcctcaccgaagatgccgatgtcagcgtgctgctgctggaagccggtggcccggactaccggctcgacttccgtacccagatgccggcggcactggccttcccactgcagggcaagcgctacaactgggcgtacaagaccgatccggagcccttcatgaacaaccgccgcatggactgcggccgcggcaagggcctgggcggctcgtcgctgatcaacggcatgtgctacatccgcggcaacgcgatggactatgacaactgggccagcatgccgggcctggaagactggacctacctggactgcctgccctacttccgcaaggccgaaacccgtgatatcggccccaatgactaccacggtggcgacggcccgctgcgcgttaccacgcccaaggccggcaacaacgagctgttcgctgcgatggtcgaagccggcgtgcaggccggctacccgcgcaccgacgacctcaacggctaccagcaggaaggtttcggcccgatggaccgcacggtgaccccgaagggccgtcgttccagcaccgcccgcggctacctggacctggccaagccgcgcccgaacctgaccatcgtcacccacgcgctgaccgaccgcatcctgttctcgggcaagcgcgccgtgggcgtgcagtggctgcacagcgaccagccgcagcgcgccaccgcccgccgcgaagtgctgctgtgcggcggcgccatcgcctcgccgcagatcctgcagcgctcgggcgtcggcccggccgacctgctgcgcagcctggacatcgacctggtgcaccacctgccgggcgtcggcgccaacctgcaggatcacctcgaaatgtacctgcagtacgagtgcaagaagccggtgtcgctggcgccggcactgaagctgtacaaccagccggcgatcggtgccgagtggctgttcctgggcaccggcatcggcgccagcaaccagttcgaggccggtggcttcatccgcagcgacgccgaattcgactggccgaacctgcagtaccacttcctgccggtggcgatcaattacaacggctccaacccgatcaaggcgcacagcttccagatgcacgtcggttcgatgcgctcacccagccgcggccgcatccacgtacgctcgaaggacccgcgcgaacatccgagcatcctgttcaactacatgtcgcacgaccaggactggcgcgagttccgtgcggcgatccgcatcacccgcgagatcttcgcgcagccggcgctggccccgtacagcggccgcgagatctcgccgggaagcgcgctgcagaccgacgcgcagatcgatgcgttcgtgcgcgagcacgccgagactgcctatcacccgtcgtgctcgaacaagatgggccatgccgacgatccgatggcggtggtcgatggccagggccgcgtacacgggctggaaggcctgcgcatcgtcgatgcctcgatcatgccgcaggtagtgaccggcaacctcaacgcgccgaccatcatgatggccgagaagctggccgacgtgatccgcggccgcaccccgctcgcccgtagcaccgcgccgtactacaaggccaacggcgcacccgttcgcaagcagggttga

SEQ ID NO: 496616 - DNA, 1473 bp, Stenotrophomonas maltophilia
atgaccaccctgcccgtccaacagctctacatccacggccagcgcgtcgatgccaccagcggcaagaccttcaagaccgtcaacccggccaccggtgaggtgatcgccgaagtgcaggttgccagccaggccgacgtcgagcgcgccgtgcagagcgcggccgaaggccagagggtgtgggccgcgatgacggccatggagcgctcgcgcatcctgcgccgcgccgtcgagctcctgcgcgagcgcaacgacgaactggcccacctggaaaccctggacaccggcaaggcgctggccgagaccaccaccgtggacattgtcaccggcgccgacgtggtcgagtactacgctggcctggccaccgccatcgaaggcatccagctgccgctgcgcgaatcgagcttcttctacacccgccgcgaaccgctgggcgtggtggccggcatcggcgcctggaactacccgatccagatcgccatgtggaagtcggccccggccctcgccgccggcaatgcgatggtgttcaagccgtccgaagtgaccccgttgaccgcgatccggctggccgagatctacaccgaagccggcgtgccggccggcgtgttcaacgtcgtgcagggcccgggccgcgagatcgggcagtggctgaccgagcacccggtgatcgagaagatttccttcaccggcggcgtcgccaccggcaagaaggtcatggccagcgcggcgtcctcgtcgctgaaggaagtgaccatggagctgggcggcaagtcgccgctggtgatctgcgatgacgccgatctggaccgcgccgccgacatcgcggtgatggccaacttcttcagctccggccaggtctgcaccaacggcacccgcgtgttcgtgccgcgcagcatgctggccgcgttcgaggccgccgttgtcgagcgcgtcaagcgcatccgcatcggcgacccgatggccgccgagaccaacttcggcccgctgaccagcttcccgcacatggaaaacgtgctgcgctacatcgaaagcggcaaggccgaaggcgcccgcctgctgaccggcggcggccgtgccaccgaaggcgcgctggccaatggcgcgtacgtgctgccgaccgtgttctccgactgccgcgatgacatgacgattgtccgggaagagatcttcgggccggtgatgagcatcctcgcctacgacgacgaagacgaagtggtgcgtcgtgccaacgacaccaccttcggcctcgccgccggcgtggtcagcaaggacgtcagccgcgcccaccgcatcatccaccgcctggaagccggcatctgctggatcaacacctggggcgaatcgccggccgaaatgccggtcggtggctacaaggaatccggcgtcggccgcgagaacggcatctcgaccctcggccactacacccgcatcaagtcggtgcaggtcgagctgggcgactacgccagcgtgttctga

SEQ ID NO: 496617 - DNA, 591 bp, Stenotrophomonas maltophilia
atgccgaagaaaggcgtggaaccggtacggcgcgaacagctgatccgggccactttccagaccatcgacgagatcggcatggccgacgcgaccgtcgccaccatcgcgaagaaggcagggctgtccagcggcatcgtcgcccactacttcggcgacaaggacggcctgctcaatgctgcaatgcggcagatcctgcgcgagctgaaggacgccgtcgcccgctaccgcgccgaggccagcgatgacccccgcgagcagttgcgtgccatcgtcgatggcaacttcgacgacagccagatcaacggtaccgcaatgcgcgtctggctcacgttctgggccgccagcatgcaccagccggaactggcccggctgcagcgcgccaacgaccagcgcctgttctccaacctgtgccaccagttcaaccgcctgctgccccacccgcaggcccgcctggccgcccgtggcctggccgcgatgatcgacggcctgtggctgcgtggcagcctggtcggcggccagttcaacgccgacaagtcccggcgcatcgcctacggctacatcgacttccagttgcaggctgccgcgctataa

SEQ ID NO: 496618 - DNA, 1551 bp, Stenotrophomonas maltophilia
atgtcttccctggctcatcccaagcgttcgcccctgcgcttgaaccgttttgtctttctcagctcctcggtgtcgatcggcatcctcgggctgctcaccgttctctatcccgaaggcagcgagcactggctgcaatgggcgcaggccgaggtgtcggccgcgttcggctggtggtacatgctgctgatcgtgctgtgcctggggttcgtgccgtggctggcgttctcgccgtatggccgcatccgcctgggccacaacgaggagtcaccggcgtttggctacgtcgcctgggtctcgatgctgttctcggccggcatcggcatcgcgctgctctactacggcgcctacgagccgctggaccatttcctgcatccgcccgggcaacccggcgggaccgtggccgccggccgcgaagcgatggtgctgaccttcctgcactggggcctgcacggctgggcgctgtacgcgctggtcggcgtggcgctgggctacttcgcgtaccgccgcgacctgccgctggcgctgcgctcggcgctgtacccgatcttcggtgagcgcatccacggtcgcatcggcgacatggtcgatggtttcggcatcctggccacgctgatctcgatggtgaccaacctcggcatcggcgcgctggtggtgcagtccggcctggtctacctgttccacatcccggatacgccgcaggtgctggtggccatcgtgctggtgatgatggtggtggccaccatcggcgtggtcgccggtgtggaaaagggcattgcctggctgtccaacctcaacgtgcgcctgctgtgtggcctgctgctgttcgtgctggtcaccggcccgaccctgcacctgttcgacggcctgatccagaacaccggcgattaccttggtgcgttcgtgcgcaagagcttcgacatgtacctcaacgacccgaagggccgtgagtggatggggtcgtggacgctgttctactgggcctggtggatcgcctgggcgccgttcgtcggccttttcgtggcgcgcatctcgcgtggccgcaccatccgcgaagtgatcatgggcgtgctgctgatcccgctcggcttcaccctggcctggctgtcgatcttcggcaacaccgccatcgacctggtgctcaaccacggccaggcgatcctgggtgaggtggcccagcacgatgcggcgatgacgctgttcaagctgctggaatacctgcccggcgcgccgtacgttgccggtgcggcggtggtgatcggcttcgtgctgttcctgaccccggtcgactcgggcacgctgatgatcgccaacctgtgcacccgtcgcgttgacgatggtgtggaagacggccatgacgccccgatctggctgcgcgtgttctgggcggccggcatcaccgtggccagcgtcggcctgctgctggccggcaatttcagtgcgatgcagacggcggtggtgctgtgtggcctgccgttctcgttcacgctggcgttctacatgtggggcctgctgaaggcgctgcgcaccgacccggacgcaccccgccgctga

SEQ ID NO: 496619 - DNA, 2754 bp, Stenotrophomonas maltophilia
atgagcgattcgttctccacccgcagccagctgaacgtcggcggcaagacctacgactacttcagcctgcccacgctgggccagcgcttcgatatctcccacctgccctactcgatgaagatcctgctggagaacctgctccggcacgaggacggcggtatcaccgtcggcaaggaccacatcgaagccgtggcccgctggaacccggcggccgagccggacaccgagatcgccttcatgccggcgcgcgtggtcctgcaggacttcaccggcgtgccatgcgtggtcgacctggccgcgatgcgcgacgcggtcgtcaagctgggcggctcgccggagcagatcaacccgcagatcccctccgaactggtcatcgaccactcggtgcaggtcgatgtgttcggcaagccggacgcgctggacctcaacggcaagatcgaattccagcgcaaccaggaacgctacggcttcctgcgctggggccagaaggccttcgacaacttcaaggtggtgccgccgaacaccggcatcgtccaccaggtgaacctggagaacctggcccgcgtagtgatgaccgccgacaaggacggcaaggcggtcgcctaccccgataccgtgttcggtaccgacagccacaccaccatgatcaacggcatcggcgtgcttggctggggcgtgggcggcatcgaagccgaggccgccatgctcggccaaccgtcgtcgatgctgatcccgcaggtggtcggcttcaagctgaccggcaagctgcccgagggtgccaccgccaccgacctggtgctgaccgtcacccagatgctgcgcaagctcggcgtggtcggcaagttcgtcgagttctacggtgacggcctgcagcacctgccgctggccgaccgtgccaccatcggcaacatggccccggagtacggcgccacctgcggcatcttcccgatcgacgccgaatcgctgaactacctgcgcctgtccggccgcagcgaagagcagatcgacctggtcgaagcctatgccaaggcacagggcctgtggcacgaaccgggcagcccgcatgcccagtacagcaccacgctggaactggacatgggcacggtgaagccgtcgctggccggcccgaagcgtccgcaggaccgcgtgctgctggaagacgtgcagaagaactaccgcgaagcactggtcggcatgaccagcaaccgcgacaagcgcagtgatgatgtttcctcgttcgtcaatgaaggcggcggcgcggcggtcggcaacgagcagctggccaagggcttcgccgacatcgagatcgaaggccgaaaggtgcggctgaaggatggcgcggtggtcatcgccgccatcacctcctgcaccaacacctccaacccggcggtgatgatcggtgccggcctgctggcccgcaatgcggccgccaagggcctgaaccgccagccgtgggtgaagacctcgctcgggccgggctcgcgcgtggtcaccgactacctggaaaaggccggcgtgctgaaggagctggagaagatcggcttctacgtggtcggctacggctgcaccacctgcatcggcaactccggcccgctgccgaccgaagtcagcgccggcatcgccgccggcgatcttgtggtcacctcggtgctgtccggcaaccgcaacttcgagggtcgcgtgcaccccgaagtgaagatgaactacctggccagcccgccgctggtggtggcctatgccatcgccggcaccaccgacatcgacctgaccacccagccgctgggcaccggcagcgatggccagccggtgttcctgcgcgacatctggccgagcaacaaggaaatcggcgatgtcatcgccgccaccatcggcccggagatgttcaagcagaactacgccgacgtgttcaagggcgacacccgctggaacaccatcgcctcgccggacggcaacctgtacgcgtggagcgatgcctccacctacatcaagaacccgccgtacttcgatggcatgaccatgcagaccggcagcatcgacgacgtgcacggcgcacgcgtgatgggcctgttcggcgattcgatcaccaccgaccacatctccccggccggcaacatcaagaaggactcgccggcgggccgcttcctgcaggaacgcggcgtgcagccggccgacttcaacagctacggcagccgccgcggcaacgacgacgtgatggtccgcggcaccttcgccaacatccgcatcaagaacctgatgttcggtggcgaggaaggcggcaacaccctgtactaccccgccggtggtggccagccggagaagctggcgatctacgatgcggccatgaagtacaaggccgacaaggtgccgctggtggtgctggccggcaaggaatacggcaccggttcgtcgcgcgactgggcggccaagggcaccctgctgctgggggtgaaggcggtcatcgccgaaagcttcgagcgcatccaccgctccaacctggtcggcatgggcgtgctgccgctgcagttccgcaacggcgagaacgcgcagagcctgggcctggacggctcggaagtgatcgacatcaccggcctgcaggacggtgccagcaagcgcgccacggtcaccgcgaccaaggccgatggcacgaagaagaccttcgaggtctcggtgatgctgctgaccccgaaggaagtcgagtacttccgtcatggcggcctgctgcagtacgtgctgcgccagctggcagccaagtaa

SEQ ID NO: 496620 - DNA, 225 bp, Stenotrophomonas maltophilia
atggaagccactgttgcagaacgcggacagatcaccctgcccaaggcggtgcgtgatgccctcggcctgaccaagggcacgctgctgaaggtcgagctggacggcagccgcatcatcctgcgcaagagtgttgacgatgcgatttcacgggcgcgcggcaagtttgcgctggacggcttcgaatcgtccgacgcagcggtacgcgcggtgcgtgacgaggaataa

SEQ ID NO: 496621 - DNA, 399 bp, Stenotrophomonas maltophilia
atgatcgccgtcgattcaccggtgctggtcgagctgctcagcaatggtccgcaggccgatgccgtggaagccatcctgcggcagagcctggtcggtggccgcgtggtggtctgtggcgcgaccctggccgaggtctgcgcatcgctgcgcggcggcgccgaggtgctcgaagcgctggaagaaatgggcgtgcacttcaacccgatggaagccaagtcggcgctgcgcgccggcgagatgcaccgccgtcatcgccagcgcggcggcagccgccgcagcctggacgaattcatggtcggcgcccacgcactgctgcagtgtgacggcctgatcacctggaacgacacgttttaccgcgactacttcaagggcctgaagctgatcgtgccgcacgcctga

SEQ ID NO: 496622 - DNA, 2592 bp, Stenotrophomonas maltophilia
atgttggaagcctaccgccaccacgtcgccgagcgcgctgcgcttggcatcccgccgctgccgctgagcgcgcagcagacggccgatgtcatcgaactgctgaagaacccgccgcagggcgaggccgagttcctgctcgacctgctgacccaccgcgtgccggccggcgtcgatgacgcggccaaggtcaaggcgtcgtacctggcggcgatcgccctgggcagcgagcagaacccgctgatcagccgtgagcgcgccaccgaactgctgggcaccatgctcggcggctacaacgtggccccgctggtgcagctgctggacgacgccagcgtcggcaccatcgccgccaacggcctgaagaagaccctgctggtgttcgatgcgttccatgacgtgcaggaaaaggccaaggcgggcaatgccaacgcccaggccgtgctgcagagctgggccgatgccgagtggttcaccagcaatccggaagtgccgcagagcctgaccgtcaccgtgttcaaggtgccgggcgaaaccaacaccgacgacctgtcgccggcaccggacgcgaccacccgcccggacattccgatgcacgccctggcgatgctgaagaacaagcgcgacgatgcgccgttcaccccggaagaagacggcaagcgcggcccgatccagcagatcctgtcgctgaaggaaaagggccacctggttgcctacgtcggcgacgtggtcggcaccggttcctcgcgcaagtcggccaccaacagcgtgctgtggtggaccggcgatgacattccgttcatcccgaacaagcgcgccggtggcgtctgcctgggcggcaagatcgcaccgatcttctacaacaccatggaagatgccggcgcgctgccgatcgagctggacgtatcgaagatggagcacggcgacgtcatcgagctgcgcccgtacgaaggcaaggcgctgaagaacggcgaagtgatcgccgagttccaggtcaagtccgacgtgctgttcgatgaagtacgtgccggcggccgcattccgctgatcatcggccgtggcctgaccggcaaggcgcgcgaagcgctgggcctggccccgaccgacctgttccgcctgccggtgcagccggccgataccggcaagggcttctcgctggcgcagaagatggtcggccgcgcctgtggcctgccggaaggccagggcatgcgcccgggcacctactgcgaaccgaagatgacctcggtcggctcgcaggacaccaccggcccgatgacccgcgacgagctgaaggacctggcgtgcctgggcttctcggccgacctggtgatgcagtcgttctgccacaccgccgcttacccgaagccggtggacgtgaagacccaccacaccctgccggagttcatctccacccgtggcggcgtttcgctgcgcccgggcgacggcgtgatccacagctggctcaaccgcatgctgctgccggacaccgtgggtaccggcggtgactcgcacacccgtttcccggtgggcatttcgttcccggccggttcgggcctggtcgccttcgccgcagccaccggcgtgatgccgctggacatgccggagtcggtgctggtgcgcttcaagggcaagatgcagccgggcgtgaccctgcgtgacctggtcaacgcgatcccgctgtacgcgatcaagtccggcctgctgaccgtggccaaggctggcaagaagaacatcttctccggccgcatcctggaaatcgaaggcctgccggagctgaaggtcgaacaggcgttcgaactgtccgacgcctcggccgagcgttcggccgccggctgctcggtgcgcctgaacaaggaaccgatcatcgagtacctgaccagcaacatcacgctgctgaagtggatgattgccgagggttaccaggatccgcgttcgctgcagcgtcgcatcgagaagatggaagcctggctggccaacccgcagctgctggagccggatgccgacgccgagtacgccgccgtcatcgagatcgacctggccgacatccacgagccgatcgtggcctgcccgaacgacccggacgacgtgaagaccctgtccgaagtggccggggccaagatcgacgaagtgttcatcggttcgtgcatgaccaacatcggtcacttccgcgccgcggccaagctgctggaaggcaagcgtgacctgccgacccgcctgtgggtggccccgccgaccaagatggacgcctcggagctgaccaaggaaggcgtgtacggcaccttcggcgccaccggcgcgcgcatggaaatgccgggctgctcgctgtgcatgggcaaccaggcgcagatccgtgaaggctccactgcgatgtcgacctcgacccgcaacttcccgaaccgcctgggccgcaacaccaacgtgtacctgggttcggcggaactggcggcgatctgctcgcgcctgggccgcatcccgaccaaggaggagtacatggccgatgtgggcgtgatcgccgccagcggcgccgagatctaccgctacatgaacttcgaccagatcgaggaataccaggacgtggccaagacggtcgctgcctga

SEQ ID NO: 496623 - DNA, 1749 bp, Stenotrophomonas maltophilia
atgcgccgttcatttctgctgacttccagtcctacccatcgccgcagcgtcatcgcccgggccttgggcgctctgctggcctctgcacttctgactatggcgccatcagtcggcgcaacgccggcgtctgcgatgccgctgtctatcaagccgccgccacgtctcgacaggactacacgccacagcctctgtcatgagggtcgatgcgtggtgctggatggcacgggccggcaactggccgagcatcggggaatgcaatacctccgccccttcaaaaatggggtggcggtcttcgaaaggggggagaacaggggcatcatgaattcagaagggcgtatcgtccttgaagcgcattacgattcggttgaggtacatggcaacggggtgatcgaagccaaggtattgctgcggaaaccgcccaaggcgtacacgcgaattgacttcttcaatgcacggggccgattggcgcgtcggtttgaggagaaaggcgagaacgatctcctgcgctctgcgtcctgggctggaaacccggctgtagaactctgcaacaaagagaagcagcgctgtacgacccgcttccttgacgcgaagggtaagtccggtcccgttttcagtgtctttggtagttttggtcccgtgggtcatgagggggaagtggccatcgcttcgcgcgatggtgtccactttggcctggttgatcgatcactggcaggcatagggcgccaggactacgatcagatgaccttcaacagttcgggtttcgcgctcgccacccagggcgggaacgacacggtgctggatccccacggggtgcaagtggcgcccatgggtcgatatcggttcaagtttggtcggggtgggtacctgctttctgcggtagccgaagacggccagtgcctgcatttcacgcgcgcgggtttgatgtttccgacgcctgcaggccactgtatgaagacagatgagttcgctgaacgagtggggtatgtaatcttcagttcggaagatgatgaatacgttgtaggcctggatgggtcgctgcgctccctgcaacgcgctgcaggcctgcatccgctgaaccgcaggatcgtcgagtatcaaaagcccggcgaagcgggggtgcgtttcatgatgctggaagatggcagcatctcgtcttccctgtactaccgacttgcgccttttcaaaccgcggaaggactggatgaccaactgctgttggcccaagccgatggaggatggggtgtaatagatgctacgggtgcttggctgattcctcctcgctaccgtcggataaaaccattgggtccgaatctggtcgccgcattcgaacggccgggatatgacgccgggtatcacatactcgatctgcgcggaaatgcgctggctgatttcactccgcatactccctcagcagagcttctggcggatggaacaagagtctatgcgctctcgttgcggggtcgctggggccttctggatgagtcggggcggtggaggctggcgccccgctacggctacgtgaatgtttcgaaaggccgagtttccgtgcgtgagcgaaacagtgccggtgaggttacggtcaattttcttgacccagacacaggaacgacgctgttcgaacagggatttctatcgattcattctcgaccggatggtctgtttgagacgttgaagacagatcagaccatggagctgatcaagcttgacgggaccgttctggggcgtctgcatcctcgtcccagccaatag

SEQ ID NO: 496624 - DNA, 372 bp, Stenotrophomonas maltophilia
atgatcaaaggcatatggaaggccgccctggcggccgtactgctttcattgccactggcacccgccagcgccagtggcgatctgttctacttcgaggccaagctgggtgatgtgttcttcatgctgatgctggtgggtcgcgaagaccccggcgcggtaagcgtcagctggaaaggcacgtcgatcccgccgtaccccaacgtgcaacgccgctactacatcgaattcgaccgcgcccgccgccaggcctatgtgcgtccgctccgccacgacggattgccctggttcgaaatggacgtctccggcaagcgcggcaacgtgctcatagcaggccgtcggttggaaggcagcgcagactggaccgtgcagtag

SEQ ID NO: 496625 - DNA, 1200 bp, Stenotrophomonas maltophilia; identical to SEQ ID NO: 430764

SEQ ID NO: 496626 - DNA, 1065 bp, Stenotrophomonas maltophilia; identical to SEQ ID NO: 430763

SEQ ID NO: 496627 - DNA, 510 bp, Stenotrophomonas maltophilia; identical to SEQ ID NO: 430762

SEQ ID NO: 496628 - DNA, 2304 bp, Stenotrophomonas maltophilia; identical to SEQ ID NO: 430761

SEQ ID NO: 496629 - DNA, 465 bp, Stenotrophomonas maltophilia
atgagccagtaccgcctcaacctgttcatccagcccgaacatgccaagcgcctcgaagaactggccgccaagaaaggcgtctcgaaatccagcatcgttgccgccgccctggcgtcctggctatcgccggatgccggcgaccagcgcgaggcggccatcgccaggcggctggatcgcctgtcgcgccaggccgaacgcctggagcgcgaccagaacatcgaaatcgaaacgctggcgctgttcatccgctacttcctgaccgtcagcacgccgattcccgaagcccatcaggacgcggcccgcgcgcagggcaaggcgcgcttcgagcagttcgtggaacagcttggccgccacctgctgcgcggccgcagcttggtgcgcgacgtggtggaagaactgcaccctgacccggtgcggatggaggatgcggcggcgctggccgaggcgcgggagcgtgcgtcatga

SEQ ID NO: 496630 - DNA, 2001 bp, Stenotrophomonas maltophilia
atgcaaggtcagggcgtgttgttcgggcagatcgccgccgtcttcggcatcgtgatcgccggtgtgtggggtgccacacaatggacagccgccgccctgggctatcaactacgccttggctcgccctggttcgatttcttcggaacgccggtctatcacccctggcggctgttcgagtggtggttcttcttcgatgcctacgcgccgcaggtcttcgacatcggcggggccttcgcgggcggcagcggcctgctggccgtggtggtggccatcgccatgtcggtgtggcgctcgcggcaggccaagctggtcacgacctatggttcggcgcgctgggccgaagccgacgacattcgcaaagccgggctgacgcagccggccggcgtcttcctcggcaagtatcgcaacgagtatctgcgacatgaaggcccggaacacgtcctgaccttcgcgcccacgcgctcgggcaaaggcgtgggcttggtcgtcccgacattgttgtcctggccggcttcggccgtcatccatgacatcaagggcgagaactggcagatcaccgcaggctggcgctcgcgcttctcgcactgcctgctgttcaaccccacggatgcgaagtcggcggcctacaacccgctgctggaagtccggcgcggcgcgcatgaggtgcgcgacgtgcagaacattgccgacatcctggtcgatcccgaaggcgcgctggagaagcgcaaccactgggagaagacttcgcacgcgctgctggtcggggccatcctgcatgtgttgtacgcgggcgaggacaagacgctgcgaggcgtcgccaacttcctgtccgacccggccagcccgttcgagctgaccttgcaccggatgatgacgacgaagcacctgggcgatgcaccgcacccggttgtcgcgtccgctgcgcgcgaagtgctcaacaagtcggataacgagcgttcgggcgtgttgagcaccgccatgtcgtttcttggcctctaccgcgaccccacggtggccgaagtcacctcgcgctgcgattggcgcatcgccgacctgatcgcatccgagcatcccgtctcgctgtatctggtggtcccgccttcggacatttcgcggacgaaaccgctcattcgcctgatcctcaaccagatcggccggcgcctaacggaatcgctcgacggcagcgacggcatcgcgcgccgccacaagctgctgctgatgctcgacgagttcccggcgcttggcaggctcgatttcttcgagacggcgctggccttcatggcgggctacggcatccgcagcttcctcatcgcgcagtcgctcaaccagatcgacaaagcctacggccagaaccattccatcctcgacaactgccatgtgcgcgtgacgtttgcgaccaacgacgagcgcaccgccaagcggatctccgagacgctgggcaccgccaccgaactgcgtgcgcagcgcaactacgccggccaccggctcgcgccgtggctgggccacctgatggtgtcgcgccaggagacggctcgcccgctgctgacgccgggcgaagtgatgcagcttccgcccgacgaggccgtggtgatggtgtccagcgtggcgcccatcaaggcgaacaagctgcgctactacgccgacgccaatttcaagcggcgcgtgctgccgccgccggcgctcgcagccgggcagtacgccgatgcgccgccctcgcggccggatgactggagcggcctggcgattcctgccgtgcccgacgcccctgcaacgacatccgccgatggcctgggcaccgccgacgacggcggcccacgtcgccagcccgagctatccgaagtcgccgaatacagccccgagccgcagcacgcaggcaacgacctggcgctgctcgatgacgacgacgacctgccgctgccgcttcccggccagctcgacccggccatgcagcgcacggcccggctggcatcgctgaatcccaacgacggaatcgaactatga

SEQ ID NO: 496631 - DNA, 267 bp, Stenotrophomonas maltophilia
atgaagaagaccattccgttcctgctggctgctgcggtgctgacggcctgcggccccactgacacgccagagaagacggacgcgcccagcgttgaagaactggcatccgatcccgtgcggctgaaagaactgcgccagcaatgcaagacggatcgccccaagctgggcgacgtgctttgcaatcgagtcgccgaagccacgcgcaagcggttctatggcgacggcaatacgccctacacgccgccggagagtccgccgaagttctga

SEQ ID NO: 496632 - DNA, 945 bp, Stenotrophomonas maltophilia
atggagcttcgccatcttcgttgcttcctggctgtcgccgaagaattgcacttcgcccgtgcagctgagcgcctgcacatcgagcagtcgccattgtcacgcgccatcaaggagctggaggaagaactgggcgtggcgctgttcgcccgcaccacgcgcagcacgcgactgacccgtgcgggcaaactgttcctggatcacgtgccgcgcgtgttcactgctttgcagcaggcgcgcgacagtgcgaaggccgcggccaatggcttccacggccagttgcgcatcgccctgtccgacggcattacgccgtcgcgtctgccggccttgctggcgctgtgcaggcaggaagaacccgaagtcgaaatccgcctgaccgaggtgccgctgtcgcagcagatcaagggcctgcacgacgacctgtacgacgtggggttcgctcgcgccgacgaagcaggtgacggcatcgtagcgatgcctgtctggaacgatccgctgatggtggccgtgccggcccggcatgacctgctcaggtacaagcggattccgttggaagaagtgctgcgcttcccactggtgctctgcgacccggtggcgtgcgaaggccacgcgcgacaagtggatcgcctgctgcgccgcgtggacatggaaccgctggtggccgagcgggtggcgtcctgcgacctgatgatggccttggtatcggccgggttcgccctagggctgacgggcgcagcgcacatcacggccagccgcgaacaaggcgtggtcgcacgggcgctggcgggatgttcgcccgtgctcaccacctatctgctgcgcctggatgccgaaccatcggagacgctggctcgcttcatcgagcgcgtgcaggccatcgactcgcccgaggccgccaggccgacgccaggcgatgaacccgatgtcccggaggaatccgaaccatga

SEQ ID NO: 496633 - DNA, 336 bp, Stenotrophomonas maltophilia
atgtatgcctacgagacgatgccgctgaattccaatgaggatgacatgccggttgttgaattgatcatcgcattgaaggcatcgagtgatcgcatagaggaaatgcgtgacgtgctgcaggcattacgcgaggccgccattcaagatccaggatgtctggactatcgcattgcccgaggaagcctatcggaaaaccgatttttcctgctggagcgttgggtcgatgccgaggcactgttccgacacgagcatacgccgtacttcttggatggagtggcgcgcgtgcgagcatgctgtgaatccgtggattttcagccaattacctggttggaatga

SEQ ID NO: 496634 - DNA, 504 bp, Stenotrophomonas maltophilia
atggaaattcgtatcctgctttcccttgctgcctgcatcgcccttaccgcctgtgccaccgcgcccaagccgctgcaaggcacattcacccaagttagcccgcacgatgtggcggccggcgcgcaggccgttgcgcaagtgcgctggggtggcagcatcgtcgaaaccaagccaggaccggactcgacctgcgtgcaactgatctctcgacctctcgacagccatgctcgcccgaaccgcagcacaccggatgcggcaggcggacgcttcgtcgcctgtcacgcggacttctacgatccagtcgtgttcgccccgggacgcgaggtcaccgtcgtgggcacgatcgaaggtactaccacgaccaagatcggcgagtacgactacacattgcccagagtcaatgccagcgtgatttatctgtggcccgaaacgaaggaagcgcgcgtggtctatccatatccctactacggtcctgtctggggttaccgcggttggtggtggtag

SEQ ID NO: 496635 - DNA, 696 bp, Stenotrophomonas maltophilia
atgtatttactgaaaatcatttcgaaactggccgtcctggccgccgtcgccatccccttcgcggacatcagcagcgcgcacgctgcggttgtcgtagtcccgccgcccgcgccgccggcagcgaccgtcgtagtacggaaaccggcgccagtcgtagtcgcggtgccagcaccgcccgccacagccgtcgttgtgaggaaacccgcgccggtcatcgtctcgacgccaacacacccctcggccgtctatgctcgtacccgtaacttcagcgccgacggaaacggcaatcgcagcgccagtcgctccggcagcgccggcaccatctatggcgggagcgcccattatcaggccaatgcctatcgcaatgccgatggcagcgccgggaggagcgcgaccgcctccgtccaaggggcgaatggcgggcgtgcgagccgcacggccaacggttaccgggatggcgcaggcaatgccggctacaactacaacgcctcggtcgaaggtgccaatgggggcagtgctagtcgcagcagcaacttcgccaagaccgacgatggaagctattccggcagccgcagcactgagatgactggtcgcaatggcaacagctactccggttcgaccgaagtcagcaacggcacgctcacccacaccggcagctgcaccaacgcctcgggtgaggtggtgtcctgccgctga

SEQ ID NO: 496636 - DNA, 807 bp, Stenotrophomonas maltophilia
atgccaaagcagttcacgggtgcggtgcttgcgctcgcatctctcttcctttcagccaagccgatcaacgcgcgtgcgcaagatgcatggtcgtcggacgacgatcacaagatgcatggtctgatcggcctgggcgcggcgtcaatcccggatgcgccgggaagcgatgaccagcgaaccattcctcttcctgtcctgagcctgcgcttctcgggaagtgcgttctacgtgggaaacccgtttggcggatcgccacttcaagccggcgcagcatggaaaaccgatggcggctggcgtttcggcgcaggattttccacccaagccaacgagcctcgcgaagccgacaatcgccagcgagaagcgggtgtggaagacatcgagcgaggcagcgccgcattggtgttcgcgcaatggaactatgagcaggtatcggccacgctgaccggagccaaggcgctgggcgacagcgaacaaggaatgatcgcgacgctccgtctggagcgcgttattaccctgaatcccaggctgcgtatcaccttcggaccgtcggcgacctgggcagatgacgaaaacatgcggacctacttcggtgtcccgcttggcagtaccgaactcgcgcaatacgagccttccggtggccttcaggaaatcgcgatgcaggcggggatcagttacgcggtatctcccaaatggatcctcggcgcgggcctgcggatcgcgaggctgcagtccgaagcgcgcgccagtccgctggtcgaggacgagacccagcgcagcatgtctgcattcctggcacgtcgattctga

SEQ ID NO: 496637 - DNA, 288 bp, Stenotrophomonas maltophilia
atgcgatccctcattctgacttccttgctggtgctgcctggattggccctggccgcgccgcagttcggcggcgctgatcgtgccaaggccgccgagcagctggaagcgcggttcaagcaggccgacaccgatcaggacggcaagctgacccaagccgaggccgagaggggcatgcctcggatcgccaagaacttctccaagatcgacgccgccggaaacggttacgtgaccctggatcagctccgcgcattcgcccagcaagcggccgcggccggcaggggcaactaa

SEQ ID NO: 496638 - DNA, 1308 bp, Stenotrophomonas maltophilia
atgaaactgccctggcccaggtcgctactggcgcgtaattttctgctgctgatggttctggcgctggcgctggagttctcggtgttcgcgaccttctaccaactcctgcagaagccccgcagcgaagggctggcgacgcttgtcgcctcgcagatcaacacccaacgcgtcatcctcgcggcactgcctcctggcgagcgcgacgacgtgatccggcggatcaacgccgaaggcgccatgaagatcagccccgccattgaggggaatgcttctcacggggaggagagcggcggcatttggctgaccgattttgcccggcgcctggagagacaactgccgccaggcagccggccggcgatcacgcacctgggcgctgcccatgtacggatgcaggtgggtgatcaggcctactggctatcgttaccgcttcatgtgcagctgcgcgaccgggccatgaccgtcgccgtggccacttcggggctgatcgtcggcctgatgttgctggctgcctggctcatccagcgaagaatcaatcgcccgctacggcagctgcaacgcgcaacccatgccctgggtagcggccgggcgcccggtagactgcccgaagacggacccagcgaactggcagcggtcacgaggcagttcaatcgcatggccgagaacctggaacgcaacgaaggcatgcgtacgctgatgttggccggcatctcgcacgacatccgaacgccgttgaccaagctgcgcctgttgctggccatggaccagctggacgagcacaccgccagcggctacatccagcagatcgatgcaatcctcggccagttcctggacttcggccgaaccgagggtgacgaggcaccgtccatactcgacgtcaacatcctcgtacagcagcttgccgcggaattcggcgagcgtggggacactttcgctctgaatctggaccctgcccttcctacgatgtgcttgcggccgctggcattgcaacgtgccatcgccaacctgatggaaaatgccgtgcgctacggcaagacagggctggccgtagacacgcaggtcggcgatggatgtgtgagcatccgtgttcgtgacgctggccccggcattccgccggaccaggtggagtacctgacgcggccattcacgcgtgccgacgatgcacgctcgaacaacggaggcacgggtctgggtctggcgatcgtggaccgcctggcaaggattcatggcggggatctgcgcctggaaagtccgcctgaaggcggcctgcatgcgaccatcgtgctgcccgttcaggcatcgccgaactga

SEQ ID NO: 496639 - DNA, 732 bp, Stenotrophomonas maltophilia
atggcagactccgtggaagatgcaccgcaccgaatactggtcgtcgacgatgacctggaattgcgcgacatgctgcgccgctatctgggcgagcatcgcttcgacgtacagattctggcttccgccgaccgactcgacgaacgactacggcgtgaacccttcgacgtactgatcctggacctgatgatgcctggcgaggacggcttgtcgatttgccgtcgcctgcgcgcggagggaagcaccgttcccatcctgatgctgaccgcacgcggggcggcggtggacaggatcctgggccttgaaatgggcgctgacgactatctggcgaaacctttcgacccgcgcgagctgattgcacggctgcattcgatcctgcgccggcagtccatggtgaactgcgatggccgctgggccggtggcaacgtcatccacttcgggcccttcattctcaatctgactcggatggaggtgacacgccatggtgaggtactggcgctctccagttcggaatttcagctcttgcgcattatggcgaccaatgccgggcgccccttgagccgcgagcatctgctggagaagctgaaggggcgcgagtacgactcgctcgatcgcagcctggatgtgcaggtcctgcgtctacgacgcaagatcgaggacgacccgtcatcaccacgctacatccgcacggtatggggcgtaggctacatgttcgttgcccaggcctccgaatga

SEQ ID NO: 496640 - DNA, 873 bp, Stenotrophomonas maltophilia
gtggtcgcccgcggcgatctgctggctacgatcgatgatcgtgcgttgcgggcgcagttgcagacggcggaaggcgcgctgctgcgagatcgcgcacaactcgccaacgcgcgccgcgacctggatcgcacgcgggcgctggtcgacattggctccgcctcgcgccagcagctcgacacgcaagagactgcggtccagcaggccgagggcatagtcaaggcggactcgggctcggtggacaacctgcgcgtacagctgagctatacccggatcaccgcgcccatcgacggtgtggtgggcctgcgggcggtggatcttggcaatcttgtgcaatccggtgatgccaacggcgttgccacgctgacgagcgtatcgccgacgacggtgaagttcgcgctatcgatcgaccagatgtcccgtgtactcaacgcacggcgacaaggtcctgtacgggttgatgcgttgggccgggacggcggcgacgtgcttgccgagggcagcctggaggccatcgacaaccgcgtggacgccgcaacaggaacggtgatgttgcgcgcccagttcaacgatgccgcgcaccgattgtttcccaaccaattcgtcagcgcgcgggtccatctgcagacactggaaaacgccatggtcgtgccgctttcggcgatccggtacggcaaccagggtgcctatgtcttcatgatcaaagacgacaaggcgcatctgcagaacgtaacgatggggccgaccctggacagccaaagcgtggtggtcgccgacgcgctcaagcccggcatgcagatcgcagtcgacggcatcgacgcgctggaggacggtgttgcggtgcgcgtggtcgcgccggcgcaagccgggcgttga

SEQ ID NO: 496641 - DNA, 3042 bp, Stenotrophomonas maltophilia
atgaatctctccagcaccttcatccgccggccggtggccaccgcactgctgatggtcggcgtactgcttgccggtcttatcggctatcgcagcttgccgatctcggcactgccagaagtcgactatcccaccctgcaggtctacaccgagtatcccggcgctggacccgacgtaaccgcgaacacccttaccgcaccgctcgagcgccagctgggacagatcgcgggactggagcgtatgcggtcgagcagtgccaatggtgcctcggtcattacgttgcaattcggcctgtccacctcgctggaggaagtggagcaggaagtgcaggccgcgatcaacgcggcgcgggcacgcctgcccgacgacctgccttatcccccggtctacagcaaggtcaacccagccgacacggcggtgctgacgctcgccatgacgtccgacgtgctgccgctgacgcaggtgcaggcgttggccgagacgcgcatctcgcagaagatctcgcagatgtccggtgtcgggctggtaacggtcagcggcggccaccgtcccgcagtccgcgttacggtcgatacacgccagctcgccagccacgggctgacgctggcagacgtcgaggcggccctgaccgccgccaacgtcaaccttcccaagggcaccatagacggtccgacggtcgcctacgcgatcggcgccaacgaccagttggtcgaaccggaagaatatgcatcgttggtgctggcctggcacgatggtgcgccgctgtatctgcgcgaagtggcgcagatcgccaccggagcggaagacacgcgacaggcggcctacgcgaacgacacgccggcgatcctgatcagcatccagcgccaacccggtgccaacgtgatcaggaccgtcgacggcattcgcgccgcgctgccgagcctgtcggccgccctgcccagctcggtccgtctgcagatactgagcgaccgaaccgagacgatccgcgcatcggttcacgacgtgcaggtcgaactgctgattgcgatcgtgctggtggtagcggtgatctgggtattcctgcgcaactggccagcgacgatcatcccgggcatcaccgtcccattgtccctgcttggcacggtggcgatcatctatgggctggggttcagcctcaacaatctgaccctgatggcgttgaccgtggccactggcttcctggtcgacgatgccatcgtgatgatcgaaaacatcagccggcacatggcgatgggcaagtcgcgcatgcaggccgctttggaaggtgccggacaggtcggcttcaccatcgtatcgctgtcggcagccttgatcgcggtaatgatcccgctgttgttcatgggcgacgtggttggccgcctgttccgcgagtttgcagtgaccctctcggtggccatcgtggtgtcggcaggcgtgaccctgacgctggtaccgatgctgtgcgcgcgcgtgctcaagccggaggccgagcacgacgaggcagggttcttcgtgcgcctggagcgtggctatgcacgattgctggatcgcctgatgcagcgccgtgcggcggtcatgcttgccgtggccggcgcgacggtgctgaccctggcgctgttgtgggcgctgccgaagggcctgttcccggtgcaggacaccagcatgctgcagggcgcgctgcaagtcgatgcgcacagtgcgttctcgcgcatccaagagcgcgagcaggccgcagcgcggctggtggctgccgattcggccgtggagaacatctccatcagcgccggcgtgagccagaccaacaccgcgctcgggaccgtgccaatgctcgtgcgcctgaaggcgggaaaggacaccagcgccacagtcatcaaacgcctcgccgacaaggcgcagcgcgccggtatggtgctgcacctgcgcccggtccaagacctgacactcgatacccagtcctcgtccatgccctatgcggcaggcctagagtccaccgatcgtggcctgctggccgagtggacgtcgaagctgatggccgccatgcgagccgatccagcgttctctgcggtggacagccaggcagcccgccggggcctgcaggcacgtttggacgtggatcgggtcgcggcttcgcgcctgggcgtgaacatgcgcagtatcgatgacacactgtacgcagcgtttggtcagaatcaggtctcgaccatctataccgacctgagccagtaccacgtcgtactggccgccaagggcggcctgcaggacatacgggacgtgctgcagcgcatccacgtacccggcaccaatggcacccctgtcttgctggccgcgctggccacgatcgacgcgggggacgcgccggtatcattcgagcgtcaggggcagttcccttacgccgatatcggtttcgatctggccgatggcgtcaccctcggcgacgcggtgaagcggctggactccattgccaaggacatcggcctgccggctgcggtcacgctgcatctggaaggcgcggccggcagcctgggcggcgccatgtccggccaagccattctgatgctggcggcggtgctggtggtgtatctggtgctgggcatgctctatgagagcttcatccacccgttgacgatcctgtccaccttgccctcggcagtgttgggtgcgctggcggcgctgatgttgagcggcagccagttcgacgtgatcggaaccatcggcgtggtgctgctggtcggcatggtcatgaagaacgcgatcatgatgatcgatttcgcgctggagctggagcgtgaccacagcctggacggtaccgaggcgatcaagcgcgcctgcgagcagcgcttccggccgatcctgatgaccacgctggccgcattgctgggcgccgttccgctggcgttcggcagcggcatgggcgcggagctgcgccacccgctgggcctggccatcatcggtgggctgatcgtgagccagttgctgacactgttctccacgccggtgatctacctgttgctgcgtccggccgagcaggccctggccaagcggatctaa

SEQ ID NO: 496642 - DNA, 3069 bp, Stenotrophomonas maltophilia
atggcgatcgatctgtccggtccgttcgtgcgtcggccggtggccaccactctgatcgccgtcggcatcatgctgctgggcctgctggcctttcgcatgctgccggtggcttcgctgccgcaggtggaattccccaccatcgccgttaccgccaaccttcccggtgccgatccggataccgtcgccagttcgttggccacgccactggagcgccagttcagcgccatcgccgggatcaccgacatgacgtcggtcagctatagcggctcggtgcgcatcgtgatccagttcgacctggcccgcgacgtggacggcgccgcacgcgacgtgcaggccgccatcaacgccgcgatgagccgcctgcccagcgacatggacggcgtgccgacctatcgcaaggtcaaccccgccgaagcgccaatcatggcgctggcgctgacctcgcagaccgatgacagtgccgcgctgtacgacgcagcatccacgttgctgcagcagaagctgcttcagaccgaaggcgtgggcgatgtgcaggtcggtggcggcgcgctgccggccgtgcgtgtggagctggacgggcagcggctgagccagtacgggatcggtctggaccagatccggcagttgctgaacggtgccaatgcgcgtcgcgccaagggatcggtgcaggtcggcgacgccgaatacgcgctggccgccaacgacgatctgctgcaggcggccgcctaccgggacctggtggtgcgcgacaacgccggcgcggtggtccggctgtccgacctgggctcggtcaccgattcgacgcagaacgtccgcagcttcggcttgatgaacgggcggccgggcgtggcactgatcatcagcaagcgccccggcgccaacgtggtcgagaccgtggaccgggtccgcgcgcagctgccggaattgcaggccgccgtgcccgccaccatgaagctggacgtgatgctggaccggacccagaccatccgcgcctcgctgcacgaggtggagctgacgctggtggtgtcgatcctgctggtgatcgcggtgacagcggtcttcttccgcgactggcgcgccaccctggtgccggcggtcgcggtgccgctgtcgctgctgggtaccttcgcagtgatgtgggcgctgggctacagcatgaacatcctctcgctgatggcgctgatcgtcgcggccggattcgttgtggacgacgccatcgtggtggtggagaacatcatgcgccaccagcagatgggcaagagccgcgtgcaggcggcgctggacggcgcgcgcgaggttggtttcaccgtgttctcaatcagcgtctcgctggtggcggtgttcattccgctgctgctgatgtctggcctggtcggacgcctcttccgcgagttctcggtcacgcttgcggccgcggtgctggtatcgatggtcatctcgctcaccgtcaccccgatgatgagccgcatgctgttgcgtccggcggacgacgcgcggcaccccgatgggcagggcgcttcccccgatggcttctatggacgcacactgcgctggacgctgcagcgcccgcggctgatggcctgggctaccgctgcggtcgtcggcctgggactggtcgtgttcgcggtcatgcccaagggcttcttcccgcagcaggacacgggcttgctgctgggccaggtctatgggccgcagaacatctccttcgggcagatgcgcgatcgcttcagcgaagtggtacgcatgttgcgcggcaatccgtccgtcgaccaggtgatcggcgtcctcggggctaccggcagcagcgcctccaacgccggcgcgctctacgtcacgctcaagccgctgcacgatccgcgccaggacagcgcggatgtggtcatcgaccagttgcgcaagaccttcgccaatgaggccggcgtgcaagtgacgctgcaggccgtgcaggacatcggcgtcggcgggcggcagtcggccgggcaatatcagttcaccttgtcggccgacaaccgcgcggccctggatgtggccgctgcgcgggtcgaacaggccatgcgcaaggtttcgttgatcaccgacgtcagctccgacctgatggacggcagcgtcgaggcgcagatcgagatcgaccggcccgctgccgcgcggctcggcgtatcggcgcaggccatcgatcaggcgctctacgatagcttcggccagcgcctagtttccacgatctaccgggaaatgaaccagtaccacgtggtcatggggctggacccgtcgcaggctggcaaccccgcgacgctggaccagatctacgtcacgcctggtcacggcagcgagctggtgccactgtcggcaatagcgcgctggagcgtgcagaagaccagcctgtcacagtcccaccaaggccaattccccgccgtcacgctgtcctacaacctcagtcccggcgcttcgctgggaccggcgcaacgcgcgatacggcaggcggtcgatgcgctgcacctggacccaggcatcgccgcggcgcctgcaggcaatgccaaggccttcgccgacacggtcaagacgatgccgttgctgattgtcaccgcgctgctggccgtatacatcgtgctgggcatgctctacgagagcctgcgtcatccgctgaccatcctctccaccttgccctctgccggcatcggtgcgctgatcgcgctggcggcggggggcttcgagttcagcatcatcgcgctgatcggcgtgatcctgctgatcggcatcgtcaagaagaacgcgatcttgatgatcgatttcgcattgcaggtcgagcgcgccgagggactgtctccgcaggaggcgatcctgcgtgccagtctggtgcggctccgccccatcatgatgaccacgcttgcggcaatcctgggagcagtccccctggtcatcggttccggctacggctccgagttccggcaaccactgggcgtggcgatcatcggcgggctgatgctcagccaggtgctgacgctctattcgacaccggcgatctatgtgctcatggatcgattcggcaccctccaccgcaggaccccaccatga

SEQ ID NO: 496643 - DNA, 1425 bp, Stenotrophomonas maltophilia
atgacacgcatttcccgatctcgcaggcgcctgctcgccagcgcgctactgcctctggcgctggcggcctgcaccgtgggccacgactatgtccggcccgacctgcccgtccccgaacggttcgaggagggcggcatggtgtggacgcgtgccgacccggaaccgactgaatggtacggcgaggcctggtggcaggcctggcacgatcccgacctcaatgagctgcaagagcgcgcgcaacaggccaacctgtccattgcggcagcggacgccgcgtggcgccaggctcaggcggcaatcggcgaggtccgtgcggccgggaggccgcaggtcagcatgggcgtttcgcaaagccgcagcgagaacacggcggctgcgcaggggctgggcgagggacaggtgcgccagcaagctactgcacagggtaccgtgagctgggagctggacctgtggggagccgtgcgcaggcgcgccgaagcccaaagtgcgcaggccgaggcctcggcgcaggatctgcatgcgcaacggctgagcatcgccgcgaccgtggccagcacctatctgtcgttgcgccagaccgaagtgcagatggcgctactggagaatcaggtcgatgccaacggccgactgctggagatgaccgaacgggcgaatgagcttggcaccgcctcgcccaacgacgtggtggagacgcgcaacgcactggacagcagcatcatgggactggaagcggcctcggccacgcgcgcccggtgcctgcatgcgctggccgcgctcaccgggcaggcaccgtcatcgttcgtgctggctcccaggcccgaatacgggttcgaggcaccggcgcccccggcggtgatgccggccgaactgctgcggcgccgccccgacgtgatggcggccgaggcacgggtcaaggctgccaatgcgcaggtgggagccgcgcaggccgcgtatttcccgagcctggggttgtcggccaacggtggctatgtcggcggcagcgtcgacgatctgctcgatgcgccgctgcgaacctggtcgctcggcgcgcaactgctgggcacggtgttcgacggtggtgcgcgtcgatcgcaaacggcgcaggcgcgcgccggctacgaggctaccgttgcccagtaccgtcagagcgtgctgggcgcactacaggaaaccgaggatgcgctgtcggactatggttatcagcaacgccaggccgcatacgcggcgcgtgcgaccttcgaccgccaggaagtctggcagcgcaagcaacgcgagcagatgctgggcacggcgagcgagcgcgacgtgctggtggagacgttgagcatgctcgatgcgcaacagaccgcgctgagcgcgcaaggcgcattggcccaggatgcggtggcgcttttcaaggcggttggtggcggctggcaggagtag

SEQ ID NO: 496644 - DNA, 1137 bp, Stenotrophomonas maltophilia
atgacgctgacccgacgcatgttcctgggcgctgccggcgcggtgaccacgttgaccctgtggccgtggcagggccaggcccggacagcgggcgatacccggctgctggtcgtgcttttgcgcggaggactggatggactgcatacgctgattccccgcgacgatccccaataccgcagcctgcgcggcagcctggttcccgacgatgcaccggcgctggatggcagcttcgcgctgcatccgtcgctgtctttcgcgcacgatctttatcggcgcaagcagctgctgccggtggtggcggtggcccctccgtatcaggagcgttcgcatttcgacgcccagaactgcctggagaatggcaccggtcgccccagtggcgccgggaccggctggctcaaccgctgtgccggcgcaatggccgatggcgaggcattggccatcggcagcgtgatgccgctgatcatgcgtggcccgggggacgccgcgacctggtcgccgcccctgccggaggacgtcaatccgatcctgttgcagcggctcgagcccctctattcgcatgacgcggcgctatccgccagtttttcccgggcaatggccacccagggaacagtcgccggcgtgggcggccgcgcagcgcgcatggtggccgccaccacggcggcggggcgcttcatggccaaggccgacggaccgcgaatcgggttcgtggaggattccggctgggacacccacgccaacgaagccgcgatcctgaagaacaagctgtccgagctcgacgtgggactgcgggccttccacgaggccgcgcagccgatctgggaccgcacggtggtggtcgtggtgagcgagtttggccggaccgccaaagtcaacggcaccggggggaccgaccatggaacgggagggctggccttgctggccggcggggcggttcgcggggggcatattgccgggcagtggcctggactggctccgggcgatctcaacgaaggtcgggacgtgcgcgtgacgacggacatgagggccttgttcaagggcgtgcttgccgggcacctgcggctggacatgagaacactggacacggcggtgttcccggatagcggcaaggtgcgcccgatggatgggttgctggtttag

SEQ ID NO: 496645 - DNA, 1389 bp, Stenotrophomonas maltophilia
atgaaccgtcagcacgctgtcagcgcggccaatcgttttggcctgggcgcccggcccggtgagatcgattcgatcaccgacccgcaggaatggctcctggcgcagttgcgaatgccggcttcggagccggcgttggccgaattgcccggcagcctggaatatctgcgccaggacattgccctgcggcaaacccggcgcgaatccaggcaacgcggcccggccgggggcgcgatgccgctggccaggcgccagcggcaggcgcaattgcatgaactgctgctgcgccaccaggttgccgtggccagcccgaccagcttcagggagcgcatggtgcggttctggtcgaaccatttcgccgtgtccgtggacaagcgcgtggcggcgccctatgccgcgccgatggagcgcgaagcgatccgcccgcacgtgctggggcgattcgccgacatgctgctggcggtggaaacccatccggcgatgctgcgattcctggacaacacgcgatcggccggggcggactcgaaactggcagtccgcgcacatcggcggaatccggagcgggaactcgggctcaacgagaacctggcccgcgagatcctcgaactgcacacgctgggggtgcaaggcgggtattcgcaggcggacgtgaccgagctggccaaggccatcaccggatggagcgtgccggcgccgcaggacttcgagcgcggcgcgccggtgcgtgccttcatgttccgcgccaacgcccatgaaggcggatcgcgcgtggtgatgggcaagcgctacgccgaggacggactggcgcagggccaggccgtcctggccgatcttgcggtccatcccgccaccgcacggcacgtgtcgtggaagatcgcccgccacctggtcagcgacgagccgccgcaggcgctggtggaggcgatggcaagaacctggctcgcttccggcggcgacctggcgcaggtatatgccgcgttgatccgccatccggccgcctggggcgagtcggcacgcaagttcaagacgcccgacgactatctgctgtcggctgtgcgcgccggcggcgtgctggacagctcccgcccgcaggccctgtacaccttgctggacaggatgggacaaccgccgttcaccccgcgctcgcccgccggcttcgccgacgaggccgcacagtggagcggtccggatgcgctctggaagcggatccagagtgcgcaggcgctggccgaggccgtaccggaggatcggctcgatccggaaggtaccgcccgcgccatcttcgccgacacgctggacgaagaaacgcggtccgccctgcgccgggccgagtcgccgcgtgacggcctcgccctcctgttcgccagccccgccttccagtggaggatctga

SEQ ID NO: 496646 - DNA, 426 bp, Stenotrophomonas maltophilia
atgcacactgccattcgctggatcgccccgatgctgctctccacactggccgttaccggctgtgctgccgcccagcaccgggattgggacaacaatccgcccggccccgccggcggccccggcaccaactgggaaaacccgccgggctggcgtggcggtccgggcgcttcgcccaaccagcgtttctaccggcgcgacggcgtgcgttacgagttcaagctcgtcagcggcggttattactacagcccgcgctggggctattggcatccgcgatacggcttgtggaaccagggccgccgctgctggatggatatcgacaacaacccgccaggtccggccggtggccggggcaccaactgggaaaacccgccgggctggcgcggcgggccgggggcatcgccggatcggttcgaccgttgccgttga

SEQ ID NO: 496647 - DNA, 573 bp, Stenotrophomonas maltophilia
atgaagaagcagaatacggtgatcctgatgctggttttggccgttccaccggcgtgggccgcccaggataccggcgtcagcggcaacgggatggcggcaggccaaggctcggcgaatggacaaggcctcgctgtcggccaaggggaggccagcgggaccggcacggtctactaccgcggcgaagatggacttatccatcgcaaatcgggtaccggaaccgtggatggccgtggcgtcgcggtgggcgcaggcgaggtggacggaaaggcactggtcgccggccatgggcgggtcgaaggggatggcgccgtccggcccacgcatgggaacacccctgtcagcggtgccatcggaagcggcacggccacgggaacaggggcggccatcggcaaaggtcaggccagcggaacggggacggtgtattaccggggcgaagatggccggatccaccgcaaatcgggcaccggttcggtggccggacggggcgtggccatcggagatggttccgtcaagggcaaggccgccgtacgaggcaaaggccaggcccatggctatggcatcaagcggccttga

SEQ ID NO: 496648 - DNA, 690 bp, Stenotrophomonas maltophilia
atgcagcagagcccccgcatcctggtcgtcgacgacgaacccaacctgcgccgcgccgtggaagtcgcactgcgcttgcgcgggttcgaggtcgacacggccgccaacggtcgggaggcgttggcgcgcatcgcacagcgccgcccggacgccatcgtgctggacctggccatgcccgacatcgatggcctggcgcttctcccgctcatccgcaaacgcacacaggtgccggtcctgatgctcacggcaagcaccgaactgggggacaagatcgtggcgctggagggcggggccgacgattacctcaccaagccctttgccatggacgaactcaaggcgcggctggtggcgcaccttcggcgcggagcgggatcgagcgacctgctggcgtatgcggatctgcgtgtcgatccactcaggcgccgcgcatggaagtcggattcgccattggccctgtccgcgcgtgagttcgatctgctggtcggcctgatgcgcgagcaggggcgggtcttccgcaagagccagttgctggagtcggtctggggagtggacgccgaagtcggtacggaaacggtggatcgattcgtgtccttgctgcgtgcgaagctggaggccgatggaagcccgcgtctggtccagaccgtgcgcggcgtgggctacacactgcgcatcgaggagaaaatcggatga

SEQ ID NO: 496649 - DNA, 888 bp, Stenotrophomonas maltophilia
atgaagcgctccacgcgaacggcttggatttcggccgcggtgtgctgcgtgctggcgttggcgatcctgctgatggccttgctggtctatccgcgcgtgggtccgggcgtgctgaagcgctattgggcagtgtcggccatcagcctggtgctgtcggcgctggtcggatacctgatcgcgcaactggcccaggccacggtcgcacgcgacgcccaggcaaaggagtcaaggttgcgaagccatctggccgaggccgggcacgagttgcgaacgccattggcggtgatgtccgcctcgctcgacaacctgcggcacgccatccgccctggcgataccagcgcctatacccagctcgatggcctgcagcaggaggtcaaaaggatgagcgccctggtcgccgacgtgttgctgctggcccggctggatgtcatgcgtcgcccatcgaacgaatggatcgcgctcgtgccgacgctggaagaactcgcggccgaggtcaggcaactggaaccggatcgcgtgatcgccgtacaggcggctcccggacttcgtgtttgcatggacccgaccatgctgcgcgagatcatccgcaacctgctggacaatgcgcgcaagtacgctcccggatcgcccatcgacctgcgggcgaccgcagacaacggcatggtcctgatccaggtcggcgaccacggccccggcatggacgaggaagaccgcatcctggccttcgagcgccactaccgcggcagtacgtcggtcgggaaaccgggcagcgggctcgggctggccatcgtccaggcggcggtgtcgaagcacggcggctcggttgatctggacagccagccgggccgaggcacttacgtccgtgttcgcgtccccatgaatcaatga

SEQ ID NO: 496650 - DNA, 1983 bp, Stenotrophomonas maltophilia
atgaccgaccgccgcgacgacgatttccgcgtgcgccccagcgccccgaagaaccggggtaagggccaggggcagagcttcgtttccaaggtgctcaagcaggccggaaaagccagcagcggcaagtcggcggtgcgccgtcctggggcggctgccaccggccagcgtcccggctcacggcttgggcgcggccatacggcggcgcgcttcgccggcgcgaagctgacgcccatgtcgcggcgcgtgaccatcaaaaccttgctggtcaatcaccaacgggccagcccacagtcgctcgccaagcacctgcgctacatcgagcgcgacggcgcgggtcgcgatggcgaaccgggccgggcctacgggccacaggccgacgaagctgacctcgatgccttcaaggaacgctgcgccgatgaccgccaccatttccgcttcatcgtctcgccggaggacggggccgaactggacgacctgcgcacctacacccggcatctggtggatcgcatggaagccgacctgggcacgcggctggattgggtggcggtcgatcactggaacaccgacaacccgcacacccacctgatcgtgcgcgggcgcgacgacaccggcaaagacctcatcatcgcgggcgactacatcgccgatggcttccgccaccgcgccgccgagctggcgaccgaatggctggggccgcgcaccgagctggagatccagcagaccttggggcgcgaggtggaacaggagcggtggacgagcctggatcgcaccttgaagcgcgaggccagcgacgatggcctggtgcatgtcgaacggctcaacgaaccccgcttgcagcgccagcgcctgctgctgatcggccgcctgcagcgcttgcagcgcctgggcttggccgacgaggcgcagccgggctcctgggccatccataccgatgccgagaagaccttgcgcgccctgggcgagcgtggcgacatcatccgcacgatgcagcgcgccatgagcggacagccgcgcgagctggcggtgttcgagccgggcgatgacggccgcaccatcttcggccgcgtagcagccaaggggctggccgacgaactgcacgaccgcggctatctggtcatcgacggcgtggacggcaaggcccactacgtcgcgctgaacgcccgcgacgagctggcgaactatccgaccggcgccgtggtggaggtgaagggatcggccgacgtgcgcgccgccgacaggaacatcgccgcgctggcgagcgatgggctgtatcgcaccgatcatcacctggcgattgagcaaggccgagccaagcccggtcgtgacccgcaggaagtcgttgcggcccatgtccgccgactggaagccctgcgccgggccggcatcgtggagcgcgtggccgacgggctatggaaggtgccggacgacctggccgagcgtggccgccgctacgacgcgcagcgcctgggcggtgtggcggtggagctgaaatcgcacctacccatcgagcggcaggcccgcgtcatcggcgccacttggctggatcagcagttgattaacggcggccgaggcttgggcgacctgggctttggtggcgaggccaagcaggcgatgcagcagcgtgccgacttcctggccgaacgggggctggccgagaagcgcggccagcgcgtgatcctcacccggaatctgttggctacgctgcgcaatcgggaattggcgcaagccacgaaagacattgccgccgacaccggactggagcataggcccatcgccgacggtcagcgcgtggccggcatctaccgtcgctcggtcatgctcgccagcggtcgctacgcgatgctcgatgatggcatggggttcagcctggtaccgtggcggccggtgatcgaacagcggctggggcagcaactcgccgcgacggtgcgcggtggcggggtgtcctgggagtttgggcctcagcgctggcctggcatcggatag

SEQ ID NO: 496651 - DNA, 600 bp, Stenotrophomonas maltophilia
atgaccgctgattccaccaccgcacgcacacccgaaatcgcgccgcgttctcgctcgcgcctgcgcgctcgcatcgtgctggcgggcttcgccgtcgtcggcctcgctgcgctggcctgggcggcttttgtgcagccgctgccgcgcctgatctacaacccgtccgacagcgttccggccggctggtatcgcgtgcagccgcttgaccatcgggccgcctcgctgccacgtcggctggaagtgggcagcatcgtcctgacccgattgcccgccgacgctgccgcgctcgctgcgcagcgcggctacctgccggcacacgttccactactcaaacgtgtgggcgcggtcgcgccgcaacacgtctgcatcgtcgcccgtcaggttcgcatcgacggcgtgcctgcggccgccgcgctccttgtcgatcgactgggccggccgctgccatcctggcagcattgccgcccgctggccgagggcgagctgttcctcttgagcgtgaccaatccggcatcgttcgacagccgctatttcggcccggtcagcgcatccgccgtgatcggcgttgcgcatccgatctggctggagacacgcccatga

SEQ ID NO: 496652 - DNA, 546 bp, Stenotrophomonas maltophilia
atgaccgcatccgcttcgcctgccgctggcgcggccacggctgcgctgtcgctgcatcccgcagcactcgccggccaagccggcaacgtgccactgacccgcgtatcgctcgcctacatcgagccgcgcttcaagctctatctgcgcttcggcgaacctgcgcgcacgctgcggctcgaccactggcggcgctgcgcggtattcctgccgggcgcgatgttctgccgcatccgctggcaggccaacgactacggcaccgtgcgctggcagctcatggtgatccaggccggcacgccgctggacgccgtgcagcgcatccccggcgtgcggcccggcgcacgcctgctgctgcacgccgaaggcgaaaacgcggtgcgtgccgtgctggaacgcatcgacggcatcgaggcgcagggcatcgccgccatcgacgtgtcgcccgcgtactggcgcacgctgggcaaccgtctggcggcccgcctggcgctgcccgaatacaccgccgagcggcacgccgcctggctggccgggagggcgctgccatga

SEQ ID NO: 496653 - DNA, 264 bp, Stenotrophomonas maltophilia
atgagccagcgcaacggcaagcgcatcgccatcggcgcgcgtccgcctgcgaatccgcacgccgaggcgtgggttcgccagggcgaggccggcggcatccagaaaggcgacctctacaccgcgcgcctgaccctcgacatcacgcccgcgatgcgggcgcgcatcaaggtgtcggcattcacgcagggcgtgaccgtcgcggaactgctgcgcggtttgctggaacgagagtttccagaacaccggatggagaacacaccatga

SEQ ID NO: 496654 - DNA, 639 bp, Stenotrophomonas maltophilia
atgatcgtcgcgtttctcaaccaaaaagggggcgtcggcaagaccacgctcgccacccacatcgccggcgaactggcgctgcgcggccagcacgtcatcctgctggatgccgacccgcagggttcctcgctggactggacgcagcgcagaagtcagcagggcttgccacggttgttcagcgccgtgggcctcgcccgcgaaacgctgcatcaggaagcgccggagctggcccgccgcgccgatcacgtcatcatcgacggcccgccgcgcatcgccgctctggcgcgctccgcgctgctggcggccgagcgcgtgctgattcccgtgcagcccagcccgtatgacctgtgggccagcgccgagatggtggcgctgatccgtgaggcgcaggtgttccggcctgcgctgcgcgcggccttcgtcatcaaccggcgcgtcagtaccaccatcatcggcagggaagcgcggcaatcgctggccgaacagccgcttccggcgctgcgctcggaagtgcatcagcgcatcgtattcgccgacagcgtggccgctggccggctcgcacgcgagacggcacccgacagcgccgccgcccgcgagatcgtcgcgctgaccgacgaactgctgcggtggccgacatga

SEQ ID NO: 496655 - DNA, 1557 bp, Stenotrophomonas maltophilia
atgccccgctacaagccgcaagaacgcaatggcctgttcctgccggtggtgctgtccgagcagatcgtgccgggcagcttcgccttcgcactggactacctggtcaatcacgagttggatctgagcgaactggatgctcggtttcgcaatggcgagaccggcgccagcgcctacgacccacgggtgatgctcaagatcgtgctgttcgcctacagccagggattgctgtccagccgcgccattgagcgcgcctgcctgcacaacgtgcagttcatcgccctgagcgggaacagccagcccagccacgcgcacatcgccaagttcgttagccagttgggcgaacaggtcaaggcgctgttcgcccaggtgctggtcacctgcgatgggcagggcctgatcggtggcgagttgttcgccatcgacggggtcaagctgccgagcaatgccagcaaggagtgcagtggcacgcacgaagaacttcaccagcgcgccgtgcgactggagcgcgcagccgagcggatcgtgtcgatgcaccagggacaggatcgcattggcaacgacggtgactttgatgagcgccgtcgcaagcgtgtagaagcgttgcggcgcgaagcagcccgcacacgcgagttcctgtcccaggcacccaagcgcctcaatggccagggccaggagatcaagaccaacgtcaccgatccggagagcggcaagatggccaccggcaagggcgtgatccagggctacgccgcacaggcggccgtcgatggtgatcaccagatcatcgtggccgccgatgtcgtcggttcggtcgccgagcacggcatgctgctgccgatggtcgagcaggccgtagcctatcgccaggaccatacgctggtgctggccgattcgggctaccacaccaaggacaatgtcgagcagttggaagcacgcggcatccctgcgttgatcgctgacaagcagatgcgtaagcgcgatgaacggcttgccaaccaggctcggttcaagcccaagcacgacgtgctctacgacaagacactgaagacgcgcaaacccagcggcaaggaacgcttccgtccgcatgatttcgacttccgcgatgacggcacctgcctctgccccgcgggcaagacgctggtgagcaacggcagcacctacctggtggacaaggggctgcaccgccaggactacaaggcgagcgcggatgactgcgggccgtgcgaattgcgggccaagtgcttgcgtcatccggaccggacgcccgcacgcaaggtctacttgttcagcgcacgcagccctgactgggtggagccgaagaacgtagtcgagcgcgacgatgcgatcacgcgtatgcgcacggccatcgattcgccggaaggtcgcaggcgctatggaagacgcattggcaccgtggagccagtgttcggcaacctgcggcacaacaagcggctggcgcgcttcaacctgcgtggacgccacaaggtcaacacgcaatggcatctgtactgcatggtgcacaacatcgagaagctggcaggcagtggatggcgggcatga

SEQ ID NO: 496656 - DNA, 447 bp, Stenotrophomonas maltophilia
gtggcgacttcaatccgcgaaaccaccgggcgacgcctgcaccgcttttcgtgggtgaacgaatggcgcgagctggccgacgccagcggcatgccgctgggcatcgagctgatcctgccggactggttctatgccggcgtgctcgatgccgccctggtgctgaccatcgacccggcctatttccgcttgaagggcggcatcgaacgctggctgtaccgcctggtgcgcaagcacggcgggcggcaggaacacggctggcaattcgacttccggcacctgcaccgcaagtccggcagcgcggcgcgcttctcggacttcgcctacgacctgcgcgtgctggtcgcgcgtcagtcgctgcccggctacgtcctgggcatcgagccgatgccgggcgaaaggctggaactgctgaccttccggcccgtgccgtccacggcacggggataa

SEQ ID NO: 496657 - DNA, 957 bp, Stenotrophomonas maltophilia
atgagtaccccgtccaaactgtcccagctgcgcgaactgtccgtggtcgttgccgataccggtgactacgaggcgatcaagcgcctgcagccggtggactgcaccaccaacccgaccctggtgaagaaggcgctggacctgccggtctacgccgaactgatcgaacgcgaactggcctggggccgccagcaggccggcgaccgcgaagccgtggtgcacgccgtggccgaccgcctgaccatcggcgtcggcgcgctgctgagcacgctggtgccgggccgcgtgtccaccgaagtggacgccgaccaggcccacgacaccgccgccaccgtggccaaggcccgccagttcatccagatgtacgccgatgccggggtgccgcgcgagaagatcctgatcaagatcgccgccacctgggaaggcgtggaagccgcgcgcatcctgcaggccgaaggcatcgactgcaacctgaccctgatcttcaacccgacccaggcgctggcctgcagcgaggccggcgcgttcctgatctccccgttcgtcggccgcatcctggactggtacgttgccaacggccagaccccggccagcatcgacgaagacccgggcgtgaagttcgtgcgcggcgtctatgccgaattcaagcgccgcggttcgaagacggtggtgatgggcgcctcgttccgttcgaccgcacagatcgaagcgctggccggctgcgaccgcctgacgatttcgccggacctgctggagaagctggacgccgaccacggcgcgctgccgcgcaagctggtggccggtgcagcggacggcgcggcggtgaccccgatcgacgcggcgacgttcgcagcagacctggcggccgatccgatggccaccgagaagctggcgaccggtatcgatgcgtttgccaaggatctggaagcactgcgcgagcggatccgcgcggcactgtga

SEQ ID NO: 496658 - DNA, 405 bp, Stenotrophomonas maltophilia
atgaacaccgccagcggcctgccgccgtcgatcaccgtttctaccttcgacatggaccgcctggacgccatgctcgaatcccctgcgctgagccagacgcctgccgcgctcgcgcttgctgaagaactcaaccgggccaccgtgctggcaccggaccagattcccgaaggcatcgtcatgatgcattcgcgcgtggagtgcgaagatgaagtgtcgggcgaaaagcacgtcctgaccctggtcttcccccgcgaagccaatgtcgatgaaggcaaggtctccgtgctggccccggtcggcagtgccctgctcggcctggccatcggccagagcatcgactggaacgcgcccggcggccgcaagctgcgcctgcgcgtgactgcggtccacaacgaccgcccctga

SEQ ID NO: 496659 - DNA, 963 bp, Stenotrophomonas maltophilia
atgaacctacgtgatctgaagtacctggtagccctggccgaccacaagcatttcggccgggctgccgcctcctgcttcgtcagccagcccacgctgtcgacgcagatccgcaagctggaagaagagctgggcctgccgctggtggaacgcgcaccgcgcaaggtgatgctgaccccggccggccaggaagcggcggcacgggcgcgggtgatcgtgtccgaagtggaacagctgaaggaggcggcgcgacgcagccgcgatccggaagccggcacggtgcgcctgggcatcttcccgaccctcggcccgtacctgctgccgcatgtgatcccgcgcatccgcgagcgcttcccggagctggaactgttgctggtcgaggaaaagagcgacgtgctgctggaccgcctgcgcgaaggcaagctcgacgccgcactgctggccctgccggtgatcgacgaccagctgcatgccgaattcctgttcgaggaaccgttcctgctggccgtgtccgggcgccacccgctggcccgccgcgaacacctggacgtgcaggagctggccacgcagaagctgctgctgctggaagacgggcattgcctgcgcgaccaggcgctggaagtgtgccgcctgttcggcgccaacgagaagtccgaattccgcgccaccagcctggaaaccctgcggcagatggtcgctgccgacgtcggcatcaccctgctgccgagcctgtcggtgcagccgccggtgccgcgctcgaacaacatccggctgctcgatttcaccggcgaaggccgtcccagccgccgcatcgccatgatctggcgccgcagctcggccatgaacgacttcctgatggagctggccgaccagttcaagcgcctgccgccggcactgttcacgctggaggcgctcgatgccggcagcgatgcaccggccctgcccggccccgcgctgaacggctga

SEQ ID NO: 496660 - DNA, 1593 bp, Stenotrophomonas maltophilia
atgttggacgccaacctgcagtcgcagctgaagacctatctggagcgcgtgacccgcccgatccagatcaccgcgcacgccgacgacggcgccaagtcgcaggaaatgctggaactgctgcagaccctggacagcctgtcggacaagatctcgctgcaggtgctgcgcgatgggcagggccgcgtgccgtccttcgacctgggcaccccgggccaggacatccacctgaccttcgccggcctgccgatgggccacgagttcacctcgctggtgctggcgctgctgcaggtcggcgggcacccgtccaaggccaccgccgagctgatcgagcaggtgcagaacctggaaggcgactaccggttcgagacctacttctcgctgtcctgccagaactgcccggacgtggtgcaggcgctgaacctggccgcggtgctcaacccgcgcatccagcacgtggccatcgatggcgccctgttccaggacgaagtcgagaagcgcgagatcatgtcggtgccgaccgtgtacctcaacggtgaaatcttcgaccagggccgcatgaccctcgagcagatcgtggccaagctggacaccaacgccggcaagcgcgatgccgagaagatcgccgccaaggacgccttcgacgtgctggtggtgggcggtggcccggccggcgctgcagcggcgatctacgccgcacgcaagggcatccgtaccggcatcgccgccgagcgtttcggtggccaggtgctggacaccatggcgatcgagaatttcatttcggtgaaggagaccgagggccccaagctggccacggcgctggagcagcacgtgcgcgagtacgaggtggacatcatgaacctgcagcgcgccagtgcgctggtgccggccggcgaggacggcctggtgcaggtgcagctggaaaacggcgcggtactgaagtcgcgttcggtgatcctgtccaccggcgcgcgctggcggcagatgaacgtgccgggcgaagaccagtaccgcaacaagggcgtggcgtactgcccgcactgcgatggcccgctgttcaagggcaagcgcgtggcggtgatcggcggcggcaactccggcgtggaagcagccatcgacctggccggcatcgtgtcgcatgtaaccctgctggagttcgattccagcctgcgcgccgatgaagtgctgcagaagaagctgcgcacactgggcaacgtgaccgtgctgaccagcgcgcagaccaccgaagtgctgggcgacggcagccgcgtcaccggcctggtctacaaggaccgcgtcggcggcgatgcccaccgcgtcgagctggaaggcatcttcgtgcagatcggcctgctgcccaacaccgagtggctgaaggatgtggtggcgctgtcgccgcgcggcgagatcctcatcgacgaccgcggccagaccaacctgccgggcgtgttcgccgctggcgattgcacgacggtgccctacaagcagatcatcatcgccatgggcgccggctcgaccgccgcactgagtgcgttcgaccacctgatccgctcgtcggtgagcaacagcagcggtgccgttgctgaagcagcctga

SEQ ID NO: 496661 - DNA, 564 bp, Stenotrophomonas maltophilia
atgtccctcatcaacacccagatccagccgttcgaagccaacgcttaccacaacggcgagttcatcaaggtttccgacgccagcctgaagggccagtggtccgtcctgatcttcatgccggccgccttcaccttcaactgcccgaccgagatcgaggacgcagctgaccactacgccgagttcaagaaggccggcgccgaggtctacatcgtcaccaccgatacccacttctcgcacaaggtgtggcacgagacctcgccggccgtcggcaaggcccagttcccgctggtcggcgacccgacccaccagctgaccaacgctttcggcgtgcacattccggaagaaggcctggccctgcgcggcaccttcatcatcaatccggaaggcgtgatcaagaccctggagatccactccaacgagatcgcccgtgacgtgtccgagaccctgcgcaagctgaaggctgcccagttcaccgccgccaacccgaaccaggtgtgcccggccaagtggaaggaaggcgagaagaccctgaccccgtcgctggacctggtcggcaagatctaa

SEQ ID NO: 496662 - DNA, 822 bp, Stenotrophomonas maltophilia
gtggccgaggccagtgtccgcctcggcagcgtcgaagcccgccatgaggcggagctgctgctgctgcatgtgctggaacgcccacgcagttggctgttcgcgcatgccaccgatccgctggccgccgccgaccaggccgccttcgagacgctgttggcccgccgcgtggccggcgagccggtcgcctacctgaccggccgccgcggattctggacgctggatctggaggtcgatccggccacgctgatcccgcgcccggagaccgaactgctggtcgagctggcgctggaacgcctgccgcaggaccgtgcgctgcggctggctgacctgggcaccggcagcggcgcgatcgccttggcgctggccagcgagcggccacaggcacaggtgctggccaccgatgccagcccgggtgcgctggccgtggccgcgcgcaatgctgcgcgccatgaactgcgcaacgtccgcttcgccgagggcgggcacgattggtacgcgccgttgcagggcatgcgcttcgacctgattgcgagcaatccgccgtacatcgccagcgacgacccgcacctgcgacagggcgacctgcgcttcgaaccggcctccgcgctggcgtccggtgtggacggtctggatgacatccgccgcatcatcgacggcggccaggcgcatctgctgcccggtggctggttgctgatcgagcacggatgggaccagggcgcggcgatccgcgcgctgttcgacgccgccggttttgccgaggtgcagaccgtgcaggacctggagcagcgcgaccgcatcaccctgggccggcgaccggcctag

SEQ ID NO: 496663 - DNA, 942 bp, Stenotrophomonas maltophilia
atgcgtacgctgtaccccgccatcaccccctacgacgtcggcaccctgaaggtcgacgaccgccacacgctgtacttcgaacagtgcggcaacccggacggcaagccggtggtgatgctgcacggtggcccgggcggtggttgcagcgacgagatgcgccagttccacgacccgtccaagtaccgcatcatcctgttcgaccagcgtggtgcgggtcgatccaccccgcacgcggacctggtggacaacactacctgggacctcgtcgccgatatcgagaagctgcgcgagcacctgaaggtcgatcgctggcaggtgttcggtggcagctggggctcgaccctggccctggcctatgccgagacccatccgcagcgcgtgaccgaactggtcctgcgcggcatcttcatgctgcgccgctgggagctggaatggttctaccaggaaggcgccaaccgcctgttcccggatgcgtgggagcattacctgaagccgatcccgccggtggagcgtcatgacctgatctcggccttccaccgccgcctgaccagcgacgacgaaaccacccgcctggaagccgccaaggcgtgggcggtgtgggaaggcgcgaccagcttcctgcatgtcgatgacgacttcatcaacagccacgaagacccgcacttcgccctggccttcgcccgcatcgagaaccactacttcgtcaacggtggcttcttcgaggtggaagaccagctgctgcgcgacgcgcaccgcatcgccgacatcccgggcgtgatcgtgcacggccgctacgacgtggtctgcccgctggccaacgcctgggacctgaccaaggtatggccgaaggcaaagctggaaatcaccccggcgtcgggccattcggcgttcgaggccgagaacgtggacgcgctggtgcgcgccaccgacggcttcgcctga

SEQ ID NO: 496664 - DNA, 885 bp, Stenotrophomonas maltophilia
atggacctcaatgcagtgcgcatgctggtgcaggtagccgaagcccgcagtttcaccgtcgccgccaggcagctgggcctgagccagtccggcctgtcgcgcgcgatcggccggctggaggccacgctgggggtgaagctgctgcagcggaacacccgcaacgtggcgctgaccccggatggccgccagttcgtcgatcaggtggcaccgctgctgtgtggcctggaggatgccgaacgccagttggccgaccgtccctgcacgcccgcgggcaccctgaagatcagcgcgccctcgatgttcgggcgcaaggtgctggtaccgctgctggcgccgttgctgcaacagcacccgcaactgcaggtggaggccgtgctcagtgaccgtctggtcgatctggtcgaggaaggtttcgatgccgccctgcgcaccggcgtcatcgccgaccagcgcatcgtcgcgcgcccgctgcgtccgctgcgctgggtgacggtggccagccccgcgtatctggcccgctgtggcgcaccggacgatgtggccgcgctgcgggaccacgcgtgcctggcggtgcgcaacctgcgcagtggccggctggtggactggcagttcctgcaggagggccacctgcgcgacttcaccccaccgacgcggatggtgttcgacagcggcgatccgctggtggaagcggccatcgccggcatcggcatcgtgcaggtgatggatttcgcggtggccgacgcgctggctgacggccgcctgcaacgcgtgctgcagccgttcgagggccgcagccgcgcgctgtcgctgatctacccaccgtcgcgccagcactcgccgaagctgcaggtgctggccgacgcgttgctggccggggattggtaa

SEQ ID NO: 496665 - DNA, 1419 bp, Stenotrophomonas maltophilia
atgcctcccctcaagtacccgcgctgggcgctgaccctgctggccactgcccagctgatcatcgccctggatgccaccatcatcttcgtcgccctgcacgacatgggccgcgcgctgcagatcaacgcgcagcagctgcaatgggtagtcagtgcctataccgtggcgttcggcggcagcctgctgctgggcgggcgcgccgccgacctgatcggccgccgccgcttctaccggctgggcatgctgctgttcgcgctggcgtcgctgttcggcgcgctggcgccgaatgccaccctgttgatcatcgcgcgcgcggcgcagggcatcggtgccgcgttgctgttcccggccacgctggcgctgatcaacacgttgtatgcggaaggcccggtgcgcaaccgcgcactggcgatctggagcatggccagtgcggtcggcctggcgctgggcacgctgctcggtggcgtgctgacccaggcgttcggctggccggcggtgctggcggtgatcgttccgctggccaccgcctgtgcagtcgcggccggcgcgtggttgccggtcgatggcccgcgtctgcagggccgttccttcgatctggccggttgcctcaccgtcaccgccggcggcagcctgctggtcaccaccctggtgcaagggccggagtggggctggacggcccgggccacgctcatctgcctgctgctttcagccgtactgttgacggtgttcgtacagatcgaaaagcgcagccgtgacccgctgatgcagtttgcgctgctgcgcctgcccggcctgcgcgcggcactcggcctgaccttcgccttcatgagcagctatggcgtgcagtactacttcctggcgctctacttccaggatggttacggctggagcccgctgcaggccggcatggccttcctgctgccgaccgtggtgtgcaccttcggcatccgcattgccgaacgcatgctgcggcgccgttcgccacggcaggtgctggcctggggcttcgcggccggtgccatcggcatcaccgcggtggcgctggcgatgccgcatggcgccagctactggccgctgctgccgggcatcgtggtgctcagcgtgggccagggcatgagctggacggcgatgtggatcgtggccgggcagggcgtgccggggccgcagcagggtgtggcgtccggcatggccgccaccgcacagcagatcggcggcgcgttgggactggcggtactggtgatggtggccaacgccgcgcgtggcacgcaggaggcaaccagtcctgatgcgctgcagggcatggtcaatgcgcagtacggcgccgcgctgttcgccgcgctcggcgtggccatcgcgctgggcctgcgcccggcgccggtcgaatcggctgctgccgtctgcccggtcaacgaggcatga

SEQ ID NO: 496666 - DNA, 798 bp, Stenotrophomonas maltophilia
gtggctgacgccgatctgcacgtactgccggcgctgctgggcgccgacgacccggcgatctataccctccaccggccgcagggcgcctcgccgtacctgctgctggccgatcacgccggccagcaggtgccacgcgcgctgaccgggctcggcctggcccaggccgagctggaccgccatatcggctgggacatcggcatcgccggcaccacccgcgcactggccgaacggctggatgcatgggcgatcgaacagacctattcgcggctgctgatcgactgcaaccgcccactggcctcgccgacgctgattccgcaagtgagcgaccacaccgtggtcccgggcaatgccgggctgtcagcggcacagcggcagcaacgcatcgatgcgatccacgcgccctaccatgcgcgcatcgacgcggaactggatgcacgccgcgatgccggccgccccaccctgctggtgatgatgcacagcttcacgccagtgatgaacggcacgcagcggccgtggcacgccggcgtgctgtaccaccaggacacgcgctttgcgcatgcactgctgcaggcactgcgcgatgaaggcgacctggtggtgggtgacaacgaaccgtattcggtcagcagcaccagcgactacgcggtaccggtgcacggcgaagggcgcggcctggtgcacgtggaactggagatccgccaggacctgatcgccgatgccgccgggcagcaggcgtgggcggagcggctggcgcggatcttcagcgcgctgcaaccggagctgctggcgctgggttga

SEQ ID NO: 496667 - DNA, 555 bp, Stenotrophomonas maltophilia
atgagccagcgcaacaccgaagccccgcgtgtcgtctatgaaggcaagtaccagcgcatgctggtgcgcggcacctgggaatacagcgaacgtacccatgccggtggcctggccgcgatcatcatcgcggtgaccccggaggacaaggtgctgttcgtcgaacagttccgcgtgccgctgcaggcccccaccatcgagatgccggccggcctggtcggcgacatccacgccggcgaatcgatcgaagtctcggccgtgcgcgagctggaagaagaaaccggctggaccgccgatcacgccgaagtgctgatgatcggcccgacgtcctccggcgccagcagcgagaagatcgccttcgtacgcgccaccggcctgcgccggatcggcgaaggtggcggcgatgacagcgaagacatcaccgtgcacgagattccgcgcgcgcaggcggcggcctggctggtgcagaagatgggcgaaggctatgagctggatgccaagctgtgggcgggcctgtggatgatcgagcaccacctggacgggcgcccgcgtggctga

SEQ ID NO: 496668 - DNA, 936 bp, Stenotrophomonas maltophilia
atgaccctgccggcaccgccgccgtcgctgtacctggtcgatgccagcatctacgtgttccgcgcctggcactcgctgccggaccagttccaggacgcgcagggctggccgaccaatgctgtgcacggcttcgcccgcttcctgctggacctgctggagcgcgagcgcccgcggcacatcgccattgccttcgacgaagcgctcgacagcggcttccgccaccgcctgtatccggcctacaaggccaaccgtgatccggcaccggaagcgctcaagcgccagttcgtgcactgcaaggcgctgtgcgcggcgttgggccttgccgtcctcgcccaccacgactacgaagccgacgacctgatcggcagcgcactgcacgtgcaccgcggcagccatcgcggggtgatcatctccgccgacaaggacctgtcgcagctgctgctcgaccacgacgaacagtgggactacgcccgcaaccagcgctgggacgtggccggcgtgaaggcacggcacggcgtgcacgcgcaccagattgccgattacctggcgctgtgcggcgatgcggtggacaacattcccggtgtcagtggggtcggcagcaagtccgccgccgtgctgctggcccatttcggcagcttggatgcgctgtacgaacgcctggacgaagtgccgttcctgcgcctgcgcggtgccgcccagatggcggtgcgcctgcgcgagcagcgcgagcacgccctgctctggcgccagctgaccaccatcgcgctggacgcgccgctggaaggcagccaacccggcctgctgcgccagaccgccgaccccgagctgctcggcggcctgtgccagaccctgcgcttcggcccgatgacccgccgccggctgttcgatgccgccggcgtgcccgatattcttcccacccacagcgagcccgcatga

SEQ ID NO: 496669 - DNA, 687 bp, Stenotrophomonas maltophilia
atgatgttcatcacagtttggtattcaggggccggacgcgacacagacggcgtcattgaccaccccgactataatcaaacacccgtgatgaccggttcagactccatgcccgaccccgctgccctgctcgccctggatgcccgccgctcagtgccttcgcggcaactgggcgagcccggcccggacccggccaccctgcagcggatgctggcctcggccgtgcgcgtgcccgaccacggcaagcgcgtgccgttccgcttcctgaagatcgccggcgatgcacgtcacactctgggcgacttcctggccaagcgcagccgccagcgcgacccgcatgccggcgaggccgtgttcgagaaggaccgccagcgtttcagccacgccccgctggtgatcgtggtggtcgccagcccgcgcccggacccgaaggtgccggaacaggaacagctgatgaccgccggctgcgtctgcttcgccctgctgcaggccgcgcaggcgcttggcttcggcgcacagtggctgacggcctggatggccttcgatccggtcgtgcaggcccacctgggcctggtcgagggtgaacgcatcgccggcttcatccacatcggcaccgccaaggccgacgtgcccgagcgcgagcgccccgacccagcgaccctgctgcaggactggacgccgccggcatga

SEQ ID NO: 496670 - DNA, 2322 bp, Stenotrophomonas maltophilia
atgatgagcgtgcccacaccgatgggatcgccgggccgtgacccggcccagctccagcttgcccgggacatggtcctgcccgcgctgtgccaggccttcggggccgcactggcgcgtttcgacgatgccctgttcgaccgcgccggcaatgccggctcgtcgcagttgctgttcctggacgcgatgcgcgaactgcgccgccgccgtgaggagatcgctgccgccttcgccggccacctgcagcaggcgtgggccgcattggcggccggtgagccgctgtcggccgaggcgaccctgtcggggccggccgaggatggcctgagcctgctggccgaacacgtactggaatcgcggttggcggtgcgcaatttcgccactgtattgctgcgtgacttcaagccggtgctggcgcggctggaccgccgcctgggccggttgatcggcggcgtggaactggacgccgaccacaatcccatcagccccgaacatctgggcgtggccatccacgaggcctttgccggctgcgaactggccccggaagtgcatctggtgctgatcaagctgtgcgagcgcgacctgcgtgcaccggtcggccgcatctacgagaagctggacgagcagctggccgcagccggcgtgatgtcgcagatgggggctccgcagcgcccacaaccgccggcaccggatccgcgcatgaccgggatgctggatgacctggtcgagcatcgccacggcgcgggcgtcgatccggggttcagcgatgacgagcaggccgcaccggcctgggcgcagcgctttgccgcccgctggtccgagcgccgcgggcatatgcagcagcacctgggcggcgatgatggcgccgccggcgaggcctacgccggccagcaaggcatgctgctggaagcgttgcacgaactgctgcagcagacccgccatgtgcgtgaggacgccacgtctgcggcacaggtggcggtcggccagcagcgcccgctcagccagcgcgaaatgatgtcggtgctgtcgctgctgcaggccacgccgagcgcgacgctgcgtgcagccatcggcgaggacggcgaatcgctggcgcagcggctgaagagcgaagtgctgtccagcgccacccagctcggcgtcgatccgggccagacccggctggacccgcaggatgaggatgccatcgacctggtcggcatgctgttcgacgtgatgctggacgaacgtgaactggaaggccgctcgcgcgaactgatcggccgcctggtcgtgcctttcgtcaaggtcgccatgctcgaccgccgcatgttcgtgcagaagacccatccggcgcgcaagctgctcaattcgctggccgaggcctgcgagggcaacaccggcgagagccaggccgagcgcatgctgatggccaaggtcgaggagatcatcgagcgcctggtggccgagttcaacgagaacctggcgatcttcctgaccctggaagaagaattccgcgagttcctggtgcagcatcgccgccgcgtggaaatcgccgagcgccgtgccgcagagacgcagcgtgggcaggaaaagctggagatggcccgcagccgcgccagtgcggaactggatcgtcgcatcggtgatgccacccttccgccggccattgccgagttcctgcgccagccctggcagcaccacctgaccctggcgctgctgcgcgagggcgaagaaggcgcgtcggtggccgaggcactgagcctcggcgacggcctgctggaggaagtggccgaggcacgccggcagattgtcggcaagccatggctgcaggcctggcagccggtgctggccaaggtgtttgccagcgtcggtgtgcacggcgatgcggctaccggcgcgatcgacgccctgcacgacacgttgcagggcatcgccgagtcgcggccggaactgcagcgcgcgctgcccgagctgccgcaggtcgcgctgccggcaccgccggtggccgaatcgccagcggtggaactcagcgggcagatcgatgccgacgatttcgacaacgccgatgccgaccgcttccgacgcatggaaatcggcaactggttggacttcgtcgacaaggacggcaaggtccaggcgggcaagctgtcctgggtcagcccgatttcctcgcgcctgctgttcgtcaaccgtcgcggcgtgcgcttctgcgtggcctcgccagaagagctggcggtgatggtgcggctcggccgcctgcgtgcccacgttgacgatggcgccttcgacagcgccatgcagggcgtgatcgaccgcctcgacccgggcagcaccaccctgcactga

SEQ ID NO: 496671 - DNA, 1080 bp, Stenotrophomonas maltophilia
atggccgtggcgttgctggggatcaaggagaccgcgccgggtgaacggcgcgtggcgttgacaccggaaaccgcgcgcaagctcggtgccctcggcattacggtctggtacgaggccggcgccgggctggccgccggcttcaccgatgccgcctatgacgacgccggcgcacgtgtcttcgacgcgggccgctgggccgagatcgatatcctgctgtgcgtgcaggcacctcctgcgacggtgctggagcagctcaggcccggtgccagcgtggttggcctgctggcaccggccaacgatccggcgctggccgcgctggcggccgatgatcgcctgcagctgttcccgctgcagcagctgccgcgcaccacccgcgcgcaggcgatggatgtactcagttcgcaggccggcatggccggctacaaggcagcgctgattgccgccgaacgcgcgccgcgcttcttcccgatgctgaccaccgccgctggcaccgtgcggccggccaaggtgctggtgatcggtgccggcgtggcgggcctgcaggccatcgccaccgcgcggcgcctcggtgcacaggtggaaggtttcgatgtgcgcccggaaacccgcgagcagatccagtcactgggtgcgcgcttcctcgatcttggcgtgagcgcgaccggtgaaggcggctacgcgcgtgcgttgaccgacgaggagcgcgccgagcagcagcgtcggctggccgaccacctgcgcagcgtggacgtggtgatctgcacggctgccgtacccggtcggccggcgccgaccatcgtgaccgccgcgatggtggagggcatggccaccggcagcgtcattgtcgatctggcggccgagagcggcggcaactgtgcactgacccagccggggcactgcatcgaacaccagggcgtgaccatcgatggtccgctgggcctggccagtcgcggcgcgacccaggccagtgagatgtatgcgcgcaacctgctcaacttcgttgcgctgttcgtgcgcgaggggcggctcggtttcgactgggacgacgagctgctggcaaagacgcgctggcaggcatga

SEQ ID NO: 496672 - DNA, 453 bp, Stenotrophomonas maltophilia
atgtcccgactgcttgacctgccactgctgttgaccctggcgctgctgccggccgttccggcgctggcgcagaacgccacgcccgcccctgccgcaccggtcgcgccattgcctgcgtgggagcaattgagcgaatcccagcgagagtcccttctggcgccgctgcgcgaccgttggaacagcgctgatgccggccagcgccagcgcatgctctcgcacggccagcgctggcaatcgatgagcccggaggagcgcgacaaggcccgccgcggcctgcgccgcttcgagcacatgagcccggaacagcgcgagcaggcgcgcgccctgttcgggcagatgcgcaacatgccgccggcacagcgcgacgcgctgcgcgagcgctggtcgcagatgacgccggagcagcgccgggactgggtgcgcgacaacccgccgccggcgaagccgcggtaa

SEQ ID NO: 496673 - DNA, 330 bp, Stenotrophomonas maltophilia
gtgaaccgctccctgccttccgatgacaccctgcgccgcctgcacgcgcagtcgctgcaggcgctgtcgccggcaacgctggcccggctgcgccaagctcgccacggcgccacggccaccccccatcgtgggcgctggcgctggtggctggccagcgcctgctcactggtggttgcactgggcatcggcctgcagttcaccggccatggcacgcttgcgggtccgccgccggaccccgtgcttgcttcagtggaagacaacggcgcgctctacgacgagaatcccgatctgtacctgtggctgggcgataccgacctggcgatggagtaa

SEQ ID NO: 496674 - DNA, 585 bp, Stenotrophomonas maltophilia
atggtgaccccgagcgaggaaccgtaccctgtgctggtgagcagccccgcccccccgagcgccgagaccgatgccctgccggcatcgctggaggcattcctggccagcgtcggcccgcgtgcgttccgcttcgccgaggccggcctgcgccagcgcgaagacgccatggatgcggtgcaggacgcgctgctgcgcatgctggattacaccgacaagccggccgccgaatgggcgccgctgttctggagcatcctgcgccgccgggtgatcgacctgcagcgccggcgccgcttccgcctgccgttctggcgcgacaaccaggacgcggaaggcggcgagatcgactgggccgatcccggcccggacccggcaaaggcacatgagcagcgccagcagtaccagcagctggtggacgcgttgcgcaccctgcccgcccgccagcgcgaggccttcaccctgcgcgtgctgcaggacctggacggggccaccaccgcccgcgccatgggctgcagcgaaggcgcggtaaaaacccatctggcacgcgcccggcaggcgctgcaggactacctggagacccacccgtga

SEQ ID NO: 496675 - DNA, 321 bp, Stenotrophomonas maltophilia
gtgagtgacgggttcgtagcgctgtacatcttcatgctggcagccatcgccggccacgtgatcatttcgcgggtgccggtgatcctgcataccccgctgatgtcgggctccaacttcatccacggcatcgtgctgatcggcgcgatggtggtactggggcatgcgcagacgccgctggagaaggcactgggcttcctggccgtggtgctcggtgccggcaatgccgccggtggctacgtggtcaccgcgcgcatgctggaaatgttcaagccgagcgcgcccaggggcggcaaggacgaaccgaaggagccgcaggcttga

SEQ ID NO: 496676 - DNA, 1461 bp, Stenotrophomonas maltophilia
ttgaacatcagcaccgtcgaactgctcgactggctggtcaaggccagctacctggtcgccgccacgctgttcctgctcggcctgcagcgcatggcctcgccgctgaccgcacgcagcggcatccgctgggccgggctgggcatgctgctggccaccgcggccaccttcttcctgcccgaactgcacaacgtgccgttgatcctggtggcactgctgctgggtgcgggcctggcctggtggtcggccggcaaggttgccatcaccgacatgccgcagatggtggcgctgtacaacggcatgggtggtggctcggcggcggcgatcggtgcggtggaactgctgcgctatgccttcctggcccaccgcgataccagccactggagcgcgcaggcgctggccgacctggccgcgcgccagccgtccggcacgatgctgctgctggcggtggtcggcgcggcgatcggcgcggtgtcgctgtccggctcggtgatcgcgtgggccaagctggatggacgcctggacaagcgcgtgacctggcccggccagcaggtgatgaacctgctggtggcgctggcggtggtggtgctggcgatcatcgcggccagtacgctcagtgcctgggcgatcgttgccttcttcgtgctggcactggcgctgggcgtgctgatgacgctgccgatcggcggtgccgacatgccggtggtgatctcgctgtacaacgcgttcaccggcctggcagtgtcgttcgaaggttatgtgctgggcaacgaggcgctgatcatcgccggcatgatggtcggcgcggccggcatcctgctgacccggctgatggccaaggcgatgaaccggccgatccgaaacgtgctgttctccaacttcggcggcggtgctggtggcgaagcgcaggcgatcagcggcgcgcagaagccgatcgaagccccggatgtcgcggcgatgatggcctacgccgaacgcgtggtgatcgtgcctggatacggcatggccgtggcccaggcgcagcacaagatctgggaactggcgcagcggctgggccagcgcggggtgaaggtgaagttcgccatccacccggtcgccgggcgcatgcccgggcacatgaacgtactgctggccgaagcgggcgtgccctacgacctgatcgccgacatggatgacatcaatccggagttcaccaacaccgacgtggtactggtgatcggtgccaacgacgtggtcaatccggtcgcgcgtactgatccggccagcccgatctacggcatgccggtgctggacgtggtcaacgcgcgcaacgtggtggtgatcaagcgcggcaagggcaccggcttcgccggtatcgagaatgcgctgttctacgctgacaatacccgcatgctctatggcgacggcgccgaagcggccgcctcgctggtgagcgagctgaaggcgctcgacggcgggcattga

SEQ ID NO: 496677 - DNA, 420 bp, Stenotrophomonas maltophilia
atgtcctccattgccacgcgtgccaggaccgtcacctggctctggtccctcatgctgttgctgggtctgcttgttgctcccctcgcctggatggtcctggcgctgatgaccggccggcaggtcggctggatggcggtagtgtccgccctggaactggtgttcatgctgcgcctgggcacactgggcccgggccggttgcgcatcgccctggtcgtgctcggcaccctgctggtggccgccgtggccaactgggccatcgccagcgcctggatgggcggctcgatcggtctggacctgtgggacgccaccacgcggatgggcccgcacctggcctggaccctgatcaacctggccaatggcgcgatggaatggctgtggctggccgtggccgtggtcgtcggcgcctggctggcgcgctga

SEQ ID NO: 496678 - DNA, 498 bp, Stenotrophomonas maltophilia
atggtcccgcagggcgataccgtgaccctgcctgccggcagctatgggtacatcacccaggcgctgggcggcagctattcggtgttcgtcgagggcaacctgttccgcatcgccggcaaggacggcgacgccatcggcaaggaggcgccggcaccgctcgagctgccggccgacgccaccgatgagcaggtggaacaactggtgtggcagcagctgcgcacctgcttcgacccggagattccggtcaacatcgttgaactgggcctggtctatgaagtcgagatcaagcatctggacgaaggcaagcgcgagatcgacgtgaagatgaccctgaccgcaccgggctgtggcatgggcgagatcctggtcgacgacgtgcgcagcaagcttgaaatgatcccgacggtggccgaggccgacgtcgacctggtgttcgacccgccgtggaaccagcacatgatgtccgaggcggcgcggctcgagaccggcatgctttga

SEQ ID NO: 496679 - DNA, 1095 bp, Stenotrophomonas maltophilia
gtgtcccagtccattcccagcttcgccgtcacccgttcggaccacccgcgcagcgctgaagagcgcgccaagatcctggagaagccgggcttcggcctgcacttcaccgatcacatggtggaagtgcgctgggacaaggatgccggctggcacaacgccagcgtgcgtgcctacggcccgctgcagctggacccggccgcggccgtgctgcactacggccaggagatcttcgaaggcatcaaggcctaccgccatgctgacggctcgatctggaccttccgcccggatgccaacggccgtcgcctgcagcgttcggcgcagcgcctggcgctgccggaactgccggtggagatcttcgtcgaatcgctgaagcagctgatcgccgtcgacagcgagtgggtgccgtcggccgacgagtcgagcctgtacttccgcccgttcatgatcggcgacgaagccttcctcggcgtgcgcggcgcgcacaaggccggctactacgtcatcgccagcccggccggcccgtacttcgccaagggcgtggccccggtgtcgatctggctgtccaccgaatacgcgcgcgcggccaagggcggcaccggcgccgccaagtgcggtggcaactacgccgcctcgctgctgccgcagcagaaggcgcaggcgcagggctgctcgcaggtgctgttcctcgacccggtcgaaggcaggtacctggaagaactgggcggcatgaacgtgttcctggtctacaaggacggcacgctggtcaccccggaactgtccggcagcatcctcgagggcatcacccgcgagagcatcctgcagctggcgcgcgaccgtggcatgaaggtcgaagagcgcaaggtcagcatcgacgagtggaaggacggcgtggcctccggtgagatcagcgaagtgtttgcctgtggcactgcggcggtggtcaccccgatcggccagctgaagggcgagggtttctcggtgggcgacatcaacgcgccggccggcgaagtgaccatgtcgctgcgcaaggaactgaccgacatccagtacggccgcctgccggaccggcacaactggctggtcaagctgggctga

SEQ ID NO: 496680 - DNA, 1740 bp, Stenotrophomonas maltophilia
atgtcccaggtaacgcaaccgcgtgtgcgtcgagtgtgggtggtccttggtgcgtccgttctgtcatcgctgctgctggccacgcctgcgctggccggtgacgtccagctcagcggcctgcagtccgcgccgactcaccagcgcttcatcgtgaagtaccgcgacggcagtgcgccggtggccaacaccaccgcactggcctcttcgctgaagagtgccgccgccggcctggccagcagccagggccgtgcgctgggcctgcagcaggtccgcaagctggccgtcggcccgaccctggtcaggaccgaccgcccgcttgaccaagctgaatccgagctgctgatgcgcaagctggccgccgacccgaacgtggaatacgtcgaagtcgaccagatcatgcgtgcgacgctgaccccgaatgacacccgcttcagcgaacagtggggctttggtacctccaacgcgtcgatcaacgtgcggccggcctgggacaaggccaccggcaccggcgtggtggtggccgtgatcgataccggcatcaccaaccatcccgatctcaacgccaacatcctgcccggctatgacttcatcagcgatgccgcgatggcgcgcgatggcggtggccgcgacagcaacccgaacgacgagggcgactggtatggcgccaacgagtgcggctcgggcatcccggcgtccaactccagctggcacggcacccacgtcgccggcaccgtggcggcggtgaccaacaacagcaccggcgtggccggcacggcgttcaacgccaaggtcgtcccggtgcgcgtgctcggcaagtgcggcggctatacctccgacatcgccgatgcgatcgtgtgggcctccggcggcaccgtcagtggcgtgccggccaatgccaatccggcggaagtcatcaacatgtcgctgggcggcggcggcacctgctcggccacctaccagaacgcgatcaacggcgcggtcagccgcggcaccaccgtggtggtcgccgccggcaacagcaacaccaacgtgtcctcgtcggtgccggccaactgcgcgaacgtgatcgcggtggcggccacgacctcggccggtgcgcgtgccagcttctccaactatggtgccggcatcgacatttccggcccgggccagagcatcctgtccaccctcaacaccggcaccaccacgccgggcagcgccacctatgcgtcctacaacggcacctcgatggcggcgccgcatgtggccggtgtggtggccctgatgcagtcggtggcgccgagcccgctgagcccggcacaggtcgagagcatcatcaagagcaccgcacgcccgctgccgggcgcctgctcggggggctgcggcgccggcatcgtcgacgccaacgcggccgtggatgcggcgatcaatggcggtggcccgaacccgggcggcaacgtgctgcagaacaacgtgccggtgaccggcctgggcgccgcgaccggtgccgagctgaactacaccgtcgccgttccggccggcagcacccagctgcgcgtggcaatcagtggcggcagcggtgatgccgacctgtacgtgcgccagggcagtgccccgaccgataccacctacacctgccgtccgtacctgagcggcaacagcgagacctgcaccatcaacagccctgccgccggcacctggtatgtgcgggtgaaggcgtacagcaccttctcgggcctgaccctcagcgcccagtactga

SEQ ID NO: 496681 - DNA, 495 bp, Stenotrophomonas maltophilia
atgcacatgatggaagagctcctggtcgtcaccaccggtggcacgatcgacaagatctacttcgacgacaagtcggactaccagatcggcgatccgcagatcggcatgatcctgcgcgagctgggcgtgacgttccgtttcaacgtgattccgatcctgcgcaaggattcgctgcacatcaacgacgaagaccgcgagctgatccgcgccaccatcgccgcgcagccgacccggcacgtgctggtgacccacggcaccgattcgatggtgcagaccggcaaggtgctggcgacgatcccggacaagaccatcgtgatgaccggtgcgctgagcccggcacgcttccgcggctcggatgcggagttcaacatcggttgtgcgatcggtgcggtgcagtcgctgccgagcggcgtgtacatcgcgatgaacgggcggatcttcgacccgcagcacgtgcgcaagaacgtggcggcgaaccgtttcgagtcggtctga

SEQ ID NO: 496682 - DNA, 336 bp, Stenotrophomonas maltophilia
atgaaccgcgcgccgcgcacggtcctgctgttggccctgatggggctggccgcgctgttcgcaggctggttcatcaatgacaggcactggctggccacccagctggtgttcaccgcgccaccgctggcgctggccatcgccgtgcgcctgggctggcgcaaggccggcttctgggcctcggtgctggcgctgggctggttcagccacggcgtgatgagcgcctggagccacccggagacgcgctggctggcgctgatcgagatcgcgctggcgctgctggtgatcttcagcgccagcctgcccggcctgcgcgcccgcttcggcaagcggcgctga

SEQ ID NO: 496683 - DNA, 594 bp, Stenotrophomonas maltophilia
atgggcgagattctggtgctgtactacagccggggcggttcggtggcacggctggcgcgccagatcgcgcggggcatcggcgaagtgccgggcatgaccgcgcgcctgcgcacggtgccgccggtggccgccgtgacccagaccgcgcagccaccggtacccgacgatggcgccccctacgtgagcgtgcaggacctggtcgactgccagggcctgctgctcggcagccccacccgcttcggcaacatggccgcgccggtcaagcacttcctggatgggctgggcgccgaatgggtcaatggcaccctgtccggcaagccggccggcgtgttcacgtccaccgcctcgatgcacggcggccaggaatcgaccctgctgtcgatgcaggtgccactgctgcaccacggctgcgtgatcgtcggcatcccgttcaccgaaccggcgctgagccacaccaccagtggcggcacgccctatggcgccagccacgtggccggtgccgccgacgatccgcagccgaccgacgacgaagcggttctggcgcgcgcgctggggcgccgggtggccgacatcgcgcagcggttggcccgatga

SEQ ID NO: 496684 - DNA, 1275 bp, Stenotrophomonas maltophilia
atggaacctttggatacgctcaacctgtggatggagcgcgcgcgggatcgcgcacgggccatcagtttcggccgcttcctgtggcatcgcttcctcgacgaccgcctgttccaggcagcggcggcgctggcctacaccacggtgttcgcgctggtaccgctggcgatcgtggtattcggtgtgctgtcggccttccccgtcttcgaccgctggagcgatcagctcagcgactacgtattctccaacttcgtgccctccgcggcgcgtgcggccgagggctacctgcggcagttctcggccagtgccggccagctgacggcggccggcttcatcgcactggtggcctcactgctgatcacgctcaacagtgtggaagagaccttcaaccagatctggcgggttggctcgacccggcccaagctgacccgcttcctggtctactggaccgtgctgaccttgggcgcgatgctcgccgccgcatcgcttgcggtatcggcgcgggtgttcgcgatgccgttgttcggtacccaggagggccgttggttggccgagctggcgctgcggctggcgccgatcctgatcgagttcgtctgcatcacgctgatgttccgggtggtgccgcaccacacggtgaaatggcggcatgccgtgcccggcgcgatcctggcggcggtcatcctggaactggtgaagtggggcatcggtgcctatctgggcagcttccagtcctaccagaaactgtatggcacggtggcgttcgtgccgatcctgctgctgtggatctacctgtgctgggtggcggtgctgctgggggcgtcgctggcttcttcgatggccgccttccgctaccagccggtggaactgcgcctgccgcaggggtatgagttctatggactgctgcgcctgcttggccgcttccagcatgcacgggccaagggcaagggcctggccgatgacgagatcctgcggctggagccgatgctgaccgattcactgctgcaggacctgatctgcaacctgcaggagatcgacctgctgcgccgcgacgagcggggcgagtggctgctgtcgcgtgacctggaccaggtcagcctggccgatctgtacgaatgcacccagctgcgcatcccggtggccgagcagcacctgccctaccgtgacgacagcctgggccgtgccgcactggcggcgctggacgatctgcggctgcccctgcgcgaacgcctgaagcgcaaggtcagtgatatctataccgactctggagacatgccatga

SEQ ID NO: 496685 - DNA, 576 bp, Stenotrophomonas maltophilia
atgacccgcaagacgccgttgccgctgctgctcccgttgaccctgctgctggccctggcggcctgcaagccggcccaggagccgacaccggccagcagccagccgccggcacaggcgccgacgccgaccactccggcaccggtcgatgaaaccccggccgagcgcaccactgccgaattcccgaccttgaagatgaaggcggtggatggcagcgactacgatctggccgcgcatcgtggcaagtgggtggtggtgaacttctgggcgacctggtgcgccccgtgccgcaaggagatgcccgagctgtcggcgctgcatgcgatgcgcagcaacatcgaggtggtcggcctggcctacgaggacatcgaagtgccggaaatgcagtcgttcctgaccaagcatccggtgacctatccgatcgtgatcgtggacccgttcgatccgccggccgacttcgccacgccgcgaggcctgccgttgacgcatctgctggatccgcagggcaagctggcccacaccttccttggcccggtgaccgccgccgacatcgaaaagcagatcgctgctggcaaatag

SEQ ID NO: 496686 - DNA, 1143 bp, Stenotrophomonas maltophilia
gtgcactggcaaagcgcacaggcatacgcatggccgttgggattggccgtagtggtgggcggcatcggcgcgtggctgatcctgtggatctaccatcggctgaaggggcgcgatcgtcggcgcgcgcgtatcgggcgtgtgctcgggctgccgatggccaccgcatggccgctgctgctgttgatccctgcattgcaggccacgccgctgcaggatcccgttctgggcaacctgcaacgggtgctgcatatcgcgctgaccgcgtgcttcatctggctgctggtgcgggcggtggcggcgggcgaacgtgccatcctgcgcagccatcccatcgatgtctccgacaacctggaagcgcgccgcatccagacccagacgcgggtgctcagccgtgtgctgatgggcggcatcatcgtgctgggcgcatcgctggtgctgctgaccttcccgatggtgcagaagatcggcaccgcgctgctggcctcggcgggcctgatcggcctggtggcgggcatcgccgccaagccggtgttcggcaacctcatcgccggcctgcagatcgcagtgacgcagccgatccggctggatgatgtggtgatcgtcgaaggcgagtgggggcgcatcgaggagatcggcagcagctatgtggtggtgcgcatctgggatgagcggcgaatggtggtgccgctgacctggttcatcgagaaccccttccagaactggacgcggcgcagcgccgacctgctcggcaccgcgttcctgtggctggactatcgtgccccggtggcagcgatccgtgccgagctggaacgcatctgccgcggtgaagcgctgtgggatggccgggtctgcgtgacccaggtgaccgagaccagcgagcgcgcgatccaggtgcgcctgctggtcagtgcgcgcagctccggtgatgccttcgatctgcgctgcctggtgcgcgaacgcatgctcgatttcctcgcgcgcgagcatccgcagtcgctgccgcaggtgcgtgcgcggctgcagcatgcagacgaactggacatgccgcgcggtccacgtgcgcgcactgcggatgtgcgttcgccgggggctgaagacggtgaagcggcgatcgtgccggtagagctggagcccgagcggtag

SEQ ID NO: 496687 - DNA, 1623 bp, Stenotrophomonas maltophilia
atgcgcccgtccttgccgcctctgctgacctgcctgcttgccgcgctgcctgcgctgctttcggctggctgcagcccggccgcgtccagcgcgcatgcggccgaacccgcgagccgcaacgtgccgttcccgtacgccgaaaccgatgtcaccgacctgcaggcgcggatgagcgccggtgagctggacagcaccaccctgacccaggcctacctgcagcgcatcgccaccctggaccgcaccgggccgcgcctgcgcgcggtgatcgagctcaacccggatgcactgaaggaagccgctgcgcgcgaccgcgagcgccgtgatggacgcctgcgcggcccgctgcacggcattccggtactgctgaaggacaacatcaacgccgccccgatggtcaccagcgccggctcgctggccctgcaggggttccgcccggacgacgcctacctggtgcgccggctgcgcgacgccggcgcggtggtgctgggcaagaccaatctcagcgagtgggccaatttccgcggcaacgattcggtgtccggctggagcgcgcgcggcggccagacccgcaatccctatcgcctcagccactcgccctgcggctccagcagcggcagcgcggtggcggtcgccgccaacctggccagcgtggcgatcggcaccgaaaccgacggcagcatcgtctgccctgcggcggtcaatggcatcgtcggcctcaagccgaccgtcggcctggtcagccgcgagggcatcatcccgatttccttcagccaggacaccgcagggccgatgacccgcagcgtcgccgacgctgcagccgtgctgaccgctatcgccggccgcgacgatgccgacccggccacggcgaccatgcctggccgcgcggtgtacgactacaccgcgcgcctggacccgcagggcctgcgtggcaagcgcatcggcctgctgcagacaccgctgctgaaataccgcggcatgccgccgctgatcgaacaggcggccaccgagctgcgtcgggcgggtgccttcgtggtgccggtggagctgcccaaccagggcgcctgggccgaggcggaacgcacggtgctgctgtacgaattcaaggccgggctggagcgctacttcagcacccatcgcgcgccactacgcagcctggccgacctgatcgccttcaaccaggcgcacagcaagcaggagctgggcctgttcggccaggaactgctggtggcggccgacgctaccgccggcctggccgaccccgcctatatccgtgcacgcagcgatgcgcgccggctggccggcgcggaaggcatcgacgccgccctcgccgcccaccagctcgatgccctggtggcgccgaccaccggtgtggcgtggccgatccgcagcgaaggcgacgacttccccggcgagagctacagcgccgccgccgtcgccggctatcccagcctcagcgtgccgatgggccagatcaatagcctgccggtcggcctgctgttcatgggcaccgcctggagcgaaccgaagctgatcgaaatggcctacgcctacgaacagcgcacccgcgcgcgacgcccgccgcacttcgacaccgacaccctgatcgacgccggcgagccgtga

SEQ ID NO: 496688 - DNA, 468 bp, Stenotrophomonas maltophilia
gtggaccagagcggctacaacccggatccgcaccggcatccgggcctccacgtcatcgccctgctcgaagcgagcaaggcgatgctggcgctgttggccgccaccgggctggaagtgctcggaccgcagccgctgcggcacggcatcatggtcctgatccggcgtttcagcctggatccggaccatggcaccctgccctcgctgctgcacatgatcagccccgacgcggtgcacctggccgcggcggggatgatcggctacggcctgctgcacctggtcgaagcctggggcctgtggcgggccaaggcctgggcctcctggctgggctgcctgaccgcctccctgtacctgcctttcgacatcttcgcgatcatccgccatcccggctggccatcgtggacgatcctggcgatcaacctgatcgtggtctacgtcctcgcccgcgacctgcgcaagcgccaccgctga

SEQ ID NO: 496689 - DNA, 1896 bp, Stenotrophomonas maltophilia
atgttggacttctttttccaaatccggcgccgactggccccctttcgtatgtccatcgaaaatcttcgcaacatcgccatcgtcgcccacgtcgaccatggcaagaccaccctggtcgaccagctgctgaagcagtccggcaccctgtccgagcgtaccgtcctcgccgagcgcgtgatggacagcaacgaccaggaaaaggaacgcggcatcaccatcctggccaagaacaccgccatcacctgggaagacaagaagaccggcatcaagaaccggatcaacatcgtcgacacccccggccacgccgacttcggtggtgaggtcgagcgcgtgctgtcgatggtcgacaccgtgctgatcctggtcgatgcgatggacggcccgatgccgcagacccgcttcgtcacccagaaggccttcgcgatgggcttcaagccgatcgtcgtggtcaacaagatcgaccgtccgggcgcgcgtccggaatgggtgatcgaccaggtcttcgacctgttcgacaagctcggcgccaccaatgagcagctggacttcccgatcgtctacgcctcggccctgaacggctacgccggcctggaagacaccgtgcgcgacggcgacatgaccccgctgtacgaagcgatcatgcagcacgccccgcgtccggaggtggacccggaaggcccgttccagatgcgcatcagccagctggactacaacaacttcgtgggcgtgatcggcatcggccgcatccagcgcggcaccctgaagaagaacatgcaggtcgccgtcatcgaccgtgaaggcaagaagcgcaacggcaaggtcgcccaggtgctgggcttcctgggcctggagcgcatcgagcaggagacggccgaggccggtgacatcgtggccatctccggcattccggagctgaccatctccgacaccctgtgccacccggatacccccgaagccctgccggcgctgaccgtcgacgagccgaccatctcgatgaccttccaggtcaacaactcgccgttcgccggcaacaaggacctgtccggtggcaagttcctgaccagccgccagatcaaggaccgcctggaccgcgagcaggtccacaacgtggcactgaaggtcgaacagctggaagacgccgacaagttcctggtctccggccgcggcgaactgcacctgtcggtgctgatcgagaacatgcgccgtgaaggctacgagctggcggtgtcgcgcccggaagtgatcatcaaggaaatcgacggccagatgatggagccgatcgagcagctggtggtggacatcgaagaaatccaccagggcggcgtgatggaaaagctgggtacccgcaagggccagctgaagaacatggaaccggacggcaagggccgtgtgcgcctggaataccagatcccggcccgtggcctgatcggtttccagaacgagttcaagaccctgacccagggttcgggcctgctgttccacgtgttcgaccattacggtccgaaggaacagggtgcgatcgccaagcgcatcaacggcgtgatgatcgccaatgcgccgggcgtcactcccgcctactcgctgggtccgctgcaggagcgcggcaagctcttcgctgccgaaggcgacaacgtgtatgaaggccagctggtcggcatccactccaaggacaacgacctgaccgtcaacgcgatcaagaccaagccgctgaccaacatgcgcgcttcgggcaaggacgacgcgatccagctgaccccggcgatcaagtactcgctggaacaggccctggacttcatcgaagacgacgagctggtcgagatcacccccaaggagatccgtctgcgcaagaagttcctgaccgaaagcgaccgcaagaaggcttcgcgcggcggctga

SEQ ID NO: 496690 - DNA, 492 bp, Stenotrophomonas maltophilia
atgtccctcatcgccactttcgacaccacccagggcccgatcaaggtcgagctgttcgccgacaaggcaccgctgaccgtggccaacttcgtgaacctggtcaagcacggcttctatgacggcctgatcttccaccgcgttatcgccgacttcatgatccagggcggctgcccgcagggtcgtggcaccggcggcccgggctacaagttcgaagacgagaagaatggcgtgaagcacgaggtcggctcgctgtcgatggccaacgccggcccgaacaccaacggcagccagttcttcatcacccacatcaagaccgattggctggacggccgccacaccgtcttcggcaaggtcctggaaggccaggcgatcgtcgattcggtcaagcagggcgacgtgatccattcgatcaccctggaaggcgacgtcgacgccgtgctggccgcccaggccgaccgcgtcgcggagtggaacaagcacctcgccgcctga

SEQ ID NO: 496691 - DNA, 987 bp, Stenotrophomonas maltophilia
atgaaagcacccgttcgtgttgccgtgaccggcgccgccggccagatcggttatgccctgctgttccgcatcgcctccggcgaaatgctgggcaaggaccagccggtcatcctgcagctgctggaactgccggtcgacaaggcccaggccgccctgaagggcgtgatgatggagctggaagactgcgccttcccgctgctggccggcatggtcggcaccgatgatgccgaagtcgcgttcaaggatgccgacatcgccctgctggtcggcgcacgtccgcgtggcccgggcatggagcgcaaggacctgctgctggaaaacgccaagatcttcaccgcccagggcgcggcgctgaacaaggtcgccagccgtgacgtgaaggtgctggtggtcggcaacccggccaacaccaatgcctacatcgccatgaagtcggccccggacctgaagccggaaaacttcaccgccatgctgcgcctggaccacaaccgcgcgctgagccagctgtcgaccaagctcggcaagccggtcggtggcatggagaagctggtcgtgtggggcaaccacagcccgaccatgtacccggactaccgtttcgccaccgccgatggcgcgtcgatcgccgatgcgatcaacgaccaggaatggaacgccaacaccttcatcccgaccgtgggcaagcgcggcgcggcgatcatcgaagcccgtggctcgtcctcggccgcttcggccgccaacgctgccatcgaccacgtgcgtgactgggtgctgggcagcaacggcaagtgggtcaccatgggcgtgccgtccgacggttcctacggcattccggaaggcgtgatcttcggcttcgcagtgaccaccgagaacggcaagtacaccctggtgaaggatctgccgatcgacgacttcagccagaagtacatcgacaagaccctggccgagctggaagaagagcgcgccggcgtcgcccacctgctgggctga

SEQ ID NO: 496692 - DNA, 615 bp, Stenotrophomonas maltophilia
atgatccacctgcattacatcgacgacgcgctgctggtggccgagaagccggccggcctgctgtccgtgcccggccgcggcgccgagaaccaggattgcgtggtcgcgcgcctgcaggcgctgtacccggatgcgttgaccgtgcaccgcctggaccaggtgacctccggcctgctgctgcatgcgcgcggcaaggacatgcaggtggcgttgtcgatgcagttcgagcagcgccaggtcggcaagcgttatgaagcgatcgtggaggggctgcttgaaggcgatgccggcgacgtggacctgccactgatcgtggactggccaaaccggccgaagcagatgatcgatcacgaacgcggcaagccggcgctgacgcgctggcgcgtaatggcgcgtgatgccgaagcgcagcgcacgcgcgtggcgctggaaccggttactggccgcagccatcaactgcgcctgcacatggccagtctcggccatcccatcgttggcgatgtgctgtatgacgccgcgcctgcgcagcgcgtgcatctgcatgcgcgcagcctgcggttcacccacccggtgacgggcgaggcactcgcgttcgagtccgccactccgttctag

SEQ ID NO: 496693 - DNA, 1881 bp, Stenotrophomonas maltophilia
atgaactacgaggaaacctaccgtcgctcgatcgacgagccggaggccttctggggcgaggaagccaagcgcatccattggcacaaaccgccgcagcaggtactcgactacagcaacccgccgttccggcgctggtttgtcggcggtgaaaccaatctctgctacaacgccgtcgaccgccatctggccgagcgcgccgaccagctcgcgctggttgccatttccaccgagaccagcagcacccgcgagatcacctatcgccagctgtatcgggaagtgaacgacttcgctgccgtgctcaagcacctcggcgtcggtcacggtgaccgtgtggtgatctacatgccgaacatggccgaagccgtgttcgcgatgctggcctgcgcgcgcatcggtgcggtgcattcggtggtgttcggtggcttcgccgcgcacaacctggcgctgcgcatcgacgatgccaagccgaagctgctgatcgccgccgatgccggcatgcgcggtggcaagctgattccgtacaagccgatggtcgatgcagcctgcgccgaagccacgtcgccaccgccgcacgtgctgatcgtgtcgcgcggactggatgccgccgaaccacgcgtgccgggccgcgatgtggagtacgccgcgctgcgtgcgcagatcggtgaggtcgacgtgccggtgcagtggctggaatcgagcgagccgagctacctgttgtatacctcgggcaccaccggcaagccgaagggcgtgcagcgcgatgtcggcggctacgcggtggcgatggcacagtcgatggaaaccgtgttcgactgcaggccggggcaggtgatgttctccacttccgatgtcggctgggcggtaggccattcctacaatgtgtacggcccgctgatcggcggctgcacctcgctgctgtacgaagggctgccgaccaacccggacccgggcatctggtgggcgctgtgcgagcagtacaacgtgcgcacgatgttctcgtcccccactgccatccgcgtgctgaagaagcacgatgcggacttcatccatcgccacgacctgcgcgcgctgaaatacctgttcctggccggcgagccgctggacgaaccgaccgcgcactggatcagcgaagcgctcggcaagccgatcatcgacaactactggcagaccgagaccggctggccggcgctgaccctgctgccgggcctggagatgaagccggtgcgcttcggttcgccgggcttgcccaacctcggctaccggatgaaggtgatcgacgagaacaccggcgaggaagtcgcaccggggcagaagggggtgctggtggtgtcgccaccgttgccgccgggctgcatgagcacggtgtggaacgacgacaaccgtttcctgcagagctacttcagccacttcaaggaactgctgtacagctcgctggactgggcaatccgcgacgacgatggctacaccttcatcctcggccgtaccgatgatgtgatcaacgtggccgggcaccggctgggcacgcgcgagatcgaagaggccatttcgagccacccgcgcgtggccgaggctgccgtgatcggggtcaaggacgaattgaaggggcaggtgccgctggtgttcgtcaccctcaagcagggcctggatggcgaggatccggcgcaagtggtggccgagatgatggccacggtgaccacctcgctcggcgcagtggcccgcccggcgcacgtgcacgtggtcaacgcgctgcccaagacccgttcgggcaagctgctgcggcgctcgttgcaggcgctggccgagcagcgcgacccgggtgacctgtcgacgctggacgaccccggcgcgctggaggagatccgccgggcgctgggccgttga

SEQ ID NO: 496694 - DNA, 504 bp, Stenotrophomonas maltophilia
atggcattgctgcacgccaagacggctgctggccgtcaggaaatcgaagaccgtagccggcgcctgccggcggcactgcgttcgatcctgctgatggtcgatggccatcgcaacgacaccgaactgcgtggcctgttcgaaggcctgcgggcaccaccggacgcgctggagcaattgtcagcacagggcctgatcgaagtgatcggcggaagcgcagaggtggcgccggcgcgcggcatcagcaccgggcgcgaacaggacccggcgctgtaccagcagttgtacgacgcgatgagcgaggcggtgcgccgccacctgggcctgaagggctacttcatgcagttgaagatcgaacgctgcaccgatgcgctggcgctggagcgcttgtgcccggagttgctggcggcggtgggcaaggcgcgcagcccggcattggcgcagcgctggtggcaggaaacccaggcggcggtgctgaacgctggcagtgaggtcgtgcaggcctga

SEQ ID NO: 496695 - DNA, 1056 bp, Stenotrophomonas maltophilia
gtgcaggacgaccacgacgacaccgacaccccaggctgggacgcgatcaatgcggcgctggcgccgctgtatgccggccaggagccgcgtcacttcggcaccgcgcttccgtacacgctcggtggccaggatccactggatggcatcagcgtgtactgggcggatgcgccggtaccgcactggcattacatcacctacggcttctccgagctgtacgccaaggagagcagtgatgcagatgccagcggttatggcttcgagctgaccttccgtctggctgccgaggccggtgagaacgccggcagcaccccgccggtgtggccgatgaacctgctgcagaacctggcgcgctacgtgttcggcagtggcaacgtgttcgaggatggccatcacctcaacgccaacggtccgatcgcgctggagaccggcacgcggctgtgccatctggccttcattgcggacccgcagttgccggcgcgggacacggccaacggccatctgcagttcctgcagctggtcggattgaccgatgaggagatggaggcggtcaagcgctggtcgacgcgtggcgtgctgcaggcgctgctgccggcgatgccgctgtggatcagcgatctgcatcgcgacaacctgctggaggacccggcgctggcacagcgggtgcaggccggcagcgaacgcgagggttccagcaccggcatgctgttcatcgagaccctggactggcggcaggaggcgggcgtcaccacgctggtgctcggcgccggtcaggtcgccagcgtgtgcgaactgttgccgctgcgcctgcgccacggcaaatcgctggaactggccagccgcgagcggcagtgggagttcatcgcgcacgggggcggtgaagcggcggacgtatccgccgacagcgcgcgctggtcactggacgaggcgggcctgcaggccctggcaggggtgcgcgccgagcgcggggtttacccggtggcgggggcgctgcgcatcgaagtggtgccgacctacctgcgcgatgccaagggggaagtgatccgccagatcggctga

SEQ ID NO: 496696 - DNA, 612 bp, Stenotrophomonas maltophilia
atgaagctgtacagcaagcccggtgcctgttccaccgccgaccacatcgccctgcagtggaccggccagccgttcgaggttgaactgctgaacaaggacaccctgaagggtccggaattcctcaagatcaatccggccggtgcggtgcccgcgctggtcgacggcgacttcgtgctgctgcagaacgccgcgatcatgggctatatcgccgacagcttcccgcaggccggcctcggcggtgacggcagcccgcgccagcgcgccgaagccacccgctggctggcgttcgtcaattccgacgtgcacccggccttctcgccgctgttcgcgccgggcaagttcattgccgacgaaggccagtacgacgcgatccgcgccgccgcgcacaagcgcctgcgtggcctgttcgagaccgccgacaggcagctggccgacaagccctggctggccggcttccgcagcttcgccgacccgtacttctacatcaccctgcgctgggccgccggcaccaaggtcgacctgtcgggcctggacaatctggccgcctacaaggcacgcatggatgccgatgccggcgtgcaggccgcgctgaaggccgaaggcctggcctga

SEQ ID NO: 496697 - DNA, 459 bp, Stenotrophomonas maltophilia
atgaaactggcctggattctctggctgtcgcagttgttgccgcagccggccgctgattcactgtgtttgagcaccaccgtttacctggaagcccgcgaccagaccctgcgcggccagcaggccgtcgccgaggtcgcactgcgccgtctcgacagtggcctgtggggcgactcgatgtgccaggtggtcaccgcgcgcaagcagttcgcaccgaccatcgtctcccccggcacccagttgggcaacgacgcggcctggagcgaggcaatgaacgtggccttcgacgccgagcgcaactgggcgctgccggccggcgagcgccgcgagatcgtgcccggtgccagccacttcgccgcgctgtccatcgccagcccgaactggcgcaatgcctaccaggtggccaccatcggcgatcacaccttctataaggtgcagaacctcaagccgcggcagtcgtaa

SEQ ID NO: 496698 - DNA, 2118 bp, Stenotrophomonas maltophilia
atgtgccgagcgtacccggccagcggcccttgccccggccgccgtttcgcggcacgcttcgcgcttccgtacgcaagcgtatcgaccatgtcgccagccaacgaaagcgcctatccccatctgttcgccccgctggacctgggcttcacccaactgcgcaaccgcgtattgatgggctcgatgcacaccggcctggaggatcgcgcccgcgacttcccgcggctggcggcctacttcgccgagcgcgccgagggcggcgtcggcctgatcgtcaccggcggcttcgcaccgaatgtggtcggctggctgaagccgttcggcggcaagctgtcctggccctgggaagtgcggccgcaccgccagctcaccgccgccgcgcaccagcacggcgcgaagatctgcctgcagctgctgcatgcaggccgttacgcctatcacccgttgtcggtggcaccgtcgaagctgaaggcaccgatcaacccgttcaccccgcgcgcgttgtcggccagcggcgtcgaccggcatatcgccgattacgcacgcagcgccaagctggcccgcgaggccggctacgacggcgtggaagtgatgggttcggagggctacctcatcaacgaattcatcgccccgcgcaccaacaagcgcaccgatgcctggggcggcgacgcgcgccaacgcatgcgcttcgcggtcgagatcgtacgccgcatccgcgaggcctgcggcccggacttcatcatcatctatcgcctgtcgctggtggatctggtcgacgacggcagcagctgggaagaaatcgtgcagcaggcgcaggccatcgaggcggccggcgcaacgatcatcaattccggcatcggctggcacgaagcgcgcattccgaccatcgccacctcggtgccgcgtgctgccttcgtcggggtcaccgccaagctcaagccgcatgtgaaggtgccgctggtggcgaccaaccgcatcaacatgcccgacgtcgccgagcgcatcctcgccaatggcggcgccgacatggtgtcgctggcgcgcccgctgctggccgacccgcagtggccgaacaaggcccgtgccggccgcgcggaggcgatcaacacctgcatcgcctgcaaccaggcctgcctggaccacgtgttcgagaacaagctggccagctgcctggtcaatccgcgcgccgcgcacgagaccgagctggtctatcgccccaccgctgcgccgaagaaggttgcggtggtcggtgccggccccgccggcctggcctgtgccaccgtcgctgcccagcgtggccaccaggtcaccctgttcgacgccaatgatgagatcggcggccagttcaacgtggccaagcgcatccccggcaaggaagagttccacgagaccctgcgctacttccgccacaaactggccgaaaccggtgtgcagctgcgcctcggcacccgcgccgatgccgcccagctgaccggcttcgacgaggtggtgctggccaccggcatcaccccgcgcaaggtcgatttccccggtgccgatcacgccaaggtggtcagctacctggacgtgctgctgggccgggtcgaagtgggcgccagtgcggcgatcatcggcgccggcggcatcggcttcgatgtcggcgaattcctcagccacgccggcgagtccccctccctcgacccgcagcgctggatggccgaatggggcgtggacagcaccttcgaggcccgcggctcactggccaggccggaggttgaaacctcgccgcgccggctgtggctgctgcagcgcagcccgggcaagcccggcgcgcgcctgggcaagaccaccggctggatccatcgcgccacgctgaaggccaagggcgtgcgcatgctcggtggcgtcgagtacctcggcgtggacgacgcgggcctgcgcatccgcgtggacggcagcgaacagctgctgccggtcgaccatgtggtgatctgcgccgggcaggaaccgaaccgcgcgctgcaggccgaactgcaggcggccggcatcaacgcgcagctgatcggcggtgccgacgtggccgcagaactcgacgccaagcgcgccatcgaccagggcagccgggttgccgccgggctctga

SEQ ID NO: 496699 - DNA, 630 bp, Stenotrophomonas maltophilia
atgcctaccgccctgcccctgcgcctgctgcaactgatcaccggcctgttcctgtatggcttcggtgcctcgctgatgatccgtgccgccatcggcgtggcgccctgggacgtgctgtcgcagggcatcgccgcacagacgccgctgtccttcgggctggcgaccaatgtcatcggcgcactggtgctgttgctgtggtggccactgcgccagaagccgggcgtcggcacggtgctcaacgtgatgctgatcggtccctccgcacagttcgggttgtggctgctgccaccggccatcggcgtgggctggcagctggcgatgttctgtgcaggcatgctgctggtcgcgctggccaccggcctgtacatcggcgcccgcctcggcccgggaccgcgcgatggcttgatgactggcctgcatgcccgcaccggttggccgatctggaaggtgcgcagcctgatcgaaggcagcgtattgctgctgggctggtggctgggcggcaatgtcggcctcggcaccctcgccttcgccctgctgatcggcccgctgtgcggcgtcacgctgggctggttcgggatcggccgccccccggtcgtacccgccgctgcccggcagccgcaatcgccctga

SEQ ID NO: 496700 - DNA, 1020 bp, Stenotrophomonas maltophilia
atgaaagccgtcgccctgagtcgtgaatacgcacctgccctgcgtgatgtcctgctgccgccgccgctgcctcctcgcggccgcgatctgctggtgcggatcgaagcggtatcggtcaaccccgtcgatggcaagcagcgggccgctaccgatccggccacccttgaggttccccgggtgctcggctgggacgccgccggcgtggtcgaagccatcggtgacgaggccagcctgttcgcctctggtgacgaggtctacttcgccggtgacgttacccggccgggctgcaacgcccagtaccagtgggtggacgagcgcctggtcgcccgcaagccgaccacgctcgatttcgccgaagccgccgcactacccctgaccacgctgaccgcctgggagctgttgttccagcgcatgccgctgcacctggatgatcgccgccatggcggccagcacctgctggtgatcggcggtgcgggaggcgtgggctcgatggcgatccagctggcccgccatgccggcttcgaggtgatcgccaccgcctcgcgcgaggcctcgatcgactggtgccggcagatgggggccacgcatgtgatcgaccatcggcagccgctgcagccccagctgcaggcactgggcatcgacgcagtgcaggtggcgctcaacctggccgacaccgatcactactgggacgaactgggccagctgctggcaccacagggccatgtcggcctgatcgtggagccgcgtggcgcactgcgcatcggcgatccgtacaaggccaaatgcatcggtatccactgggagttcatgttcgcgcgctcgcgcttcgccaccgccgactgcatcgaacagcatcgcatcctcagccgcgccgccagcatgatcgatgccggccagctgcgtggcacgctcagtgaaacgctgggcacgatcaatgcggccaacctggacatcgcgcatcagcgcctggccagcgggcacacggtgggcaagctggcgctggtgggctgggacgactga

SEQ ID NO: 496701 - DNA, 1092 bp, Stenotrophomonas maltophilia
atgaacaagaagatccttactgccgcgctgctgggcggcctggctttcgcccaggcagcttcggcgcaggagttcgatgaccgctggtacctgaccggttcggccggcttcaacttccaggacagcgaccgtctgaccaatgacgctccgttcgtgaccctgggcctgggtaagttcatcagcccgaactggtcgctggacggtgaactgaactaccagaacccgaacttcgacagcaaccaggacctgaactggtcgcagtacggcgtctcgctggacctgcgtcgccacttcatcaaggaaggccgcggctggaacccgtacatcgtcggtggcctgggctaccagaagtcggaagaagagtacgctgcaatcgacaacaacggtccgcgccagcgtaaggacggcaacgttgccgccaagctgggcgtcggcctgcagaccaccttcgagaagcgtgttgctgtccgcgccgaagtggcctaccgcgctgacttcgacgaccagagcatcgccgccaaggacgagagctggttcggcgacgtgctggcttcggtcggcgtcgtgatcccgctgggcccggctccggtcgcggctgctccggctccggctccggttgccccgagctgcgccgacctggatgacgacggtgacggcgtcaacaactgcgacgacaagtgcccgaactcgcagccgggtcagaccatcggtccggacggttgcccggttccggtctccatcgacctgaagggcgtcaacttcgacttcgacaagtcgaacctgcgtccggacgccgtggcgatcctgagcgaagccaccgagatcctgaagcgttacccggatctgcgcgttgaagttgccggtcacaccgactcgaagggtaccgacgcttacaaccagaagctgtcggagcgtcgcgccaccgccgtgtacaactacctgaccaagaacggcgtcgacgccggtcgcctggtcggcccgatcggctacggcgagagccgtccgattgctccgaacaccaacccggatggttcggacaacccggaaggtcgcgccaagaaccgtcgtaccgagctgaacgtccagaactaa

SEQ ID NO: 496702 - DNA, 507 bp, Stenotrophomonas maltophilia
atgctgcgctctgcatcggccgccttcctggcgctggccctggttcccgccgcccacgctgcggtcgattgctcggtcaacaccagcgcctcgccgctgccgttgccggccacgaccatcgcgccggtggccgacgagctctacatccgtggcaaccagctgggcatgccggccggcgtgctgagcagcaactacgatccgtcgcagtcgctggaccaggtgctgcagcgcctgcgcatcgatgggtgccagaacatcgccaaggccattccgagcgcaccggcggtgaagccgaacgatccggcggcctacaagccgcagaccgaattcgacaacacgccctggcgcttcgacatgagccagaacggcaagcgcatgaccgccgaagagttcgacgcctggatgaaggcgcgtggcgtgcgtgtggtcaaggcgcgtccggctccggccgccactccggctgcggccgaagcaccggctgagaccaagccggtcgacaagaagtaa

SEQ ID NO: 496703 - DNA, 807 bp, Stenotrophomonas maltophilia
ttgcgcacgcgccgcccacctgctgcccccgctgcccgctcccacgcaccgcgtgggcgtgcggttccggatgtctccaatggcgtgcgccatggcctggcgcgcgtgctgtccaaggccggcgtgtgctcacgcagcgaggccgcgcgctggattgccgagggccgcgtgcgcgtgtccggccgcatcatccgtgatcccgagttcccgattgccagtccgcacccgccgatcgaagtcgatggccggccgatggatgcgccgcagcgcctgtacctgatgctcaacaagccgcgcggcgtggtgaccacggcgcaggacgagcgtggtcgcgacacggtgtatcgctgcttcgatagtgccggcctgccgtggatcgcgccggtcgggcgcctggacaaggccagcgaagggctgttgttgttcagcaatgatccgcagtgggcggcgcgcctgaccgatccggagaccggcccacagaagacctatcacgtgcaggtggatcgtcttcccgatgaggacaccctggccgcgctgcgcgccggtgtcgaggacgagggcgagttcctcgtcgcccaggccgtgcgcgtactgcgcagtggcgacaagaccgcatggctggaggtggtcctcgacgagggacgcaaccgccatatccgccgcctgttggcggccttcgacctgcaggtgctgcgcctggtccgggtcgcgatcggtgggctgctgctcggcgatctcggcaaggggcaatggcgggtgctggaggtcagcgaccagcagcggctgggggccgctgcaccgggctga

SEQ ID NO: 496704 - DNA, 336 bp, Stenotrophomonas maltophilia
atgtaccacccgaccctcaaccaaaccctgcgctgcgcaggcctgctgctgccgatggtgctgctggccgcctgtggcggccacaagaaggtggccaaggcggaaacgcctgccgagaccccggtggtggaagtgaagaccccggagctggatggtcgcggcagttaccgcttcctgatgagcaacggcgacaagaagatgaccgccgatgagttcgatgcctggatgaaggccaacggcatccgcgttgccaagggcaacggccaggacgccgccgccaagccggtagtggtggccagcaaggaagagccgaagggcaagaagaaaaagaagtga

SEQ ID NO: 496705 - DNA, 1209 bp, Stenotrophomonas maltophilia
atgaccgacgtctcctccgccctgacccgccactacgccgaggaactggacgccatccgcgcccagggcctgttcaagtccgagcggatcatcaccagcccgcaatcggccgaaatcaccctcgacgacggccgcaaggtgctgaacttctgtgccaacaactacctgggtctggccgaccatccggacctgatccaggccgccaaggacgcactggatacccacggcttcggcatggcctcggtgcgcttcatctgcggcacccaggacctgcacaagcagctggagaagcagatcgccgatttcttcggcaagcaggacaccatcctgtacgcggcctgcttcgatgccaacggtggcctgttcgagccgctgctcggcgagaacgacgcgatcatttccgacgcgctgaaccatgcttcgatcatcgacggcgtgcgcctgtgcaaggccaagcgcttccgctacgccaactgcgacatggccgatctggaagcccagctgcaggccgccgatgccgcagggtgcaagaccaagctgatcaccaccgatggcgtgttctcgatggacggcttcatcgcgccgctggacgagatcaccgcgctggcgaagaagtacaacgcgctggtgcacatcgacgaatgccacgccaccggcttccttggcgctaccggccgtggttcggccgaggtcaagggcgtgctggagaagatcgacatcatcaccggcactctgggcaaggccatgggcggcgcactgggcggcttcacctgcgccagcgccgaggtgatcgaactgctgcgccagcgctcgcgcccgtacctgttctccaactcgctgccgccgcatgtggtggccgccggcatcaaggcgttcgaaatgctggctgccgctgacgaccttcgcagcacgctggccgagaacaccgcctacttccgcgagaagatgaccgccgccggtttcgacgtgaagccgggcgtgcatccgatcagcccggtaatgctgtatgacgcaccgttggcgcagaaattcgccgagcgcctgctggaagaaggcatctacgcgatcggcttcttcttcccggtggtgcccaagggccaggcccgcatccggacccagatcagcaccgcgcacagccgcgagcacctggatcgcgcgatcgatgcgttcacccgcattggtgtcgaactgggcgtggtcaagggctga

SEQ ID NO: 496706 - DNA, 696 bp, Stenotrophomonas maltophilia
atgaagcacgcccgtgcctgcctcgccattgccgctgccctgaccctggccgccccgttcgccgccagcgcccaggaaaacgaatcgccgtacagctggaacgtcaccgctgtttccgattacctgttccgtggtgtgtcgcagaccgacgaggatccgaccctgcaggccggtttcacctacaccagcccggttggcctgtacgcaggcgtgtggggctcgggcgtggattttggtgcgggtgacccgaagaccgaggtcgactacctgatcggctacggcgttgacgtcaccgagcgcgtcaacttcgacgtgctgctgaaccgctacacctacctgaagtccagccaccagaactacaacgagctgatcaccaccaccacgctggatgacacctacaagctgacggtggcctacaccaacgatgtctggaacagcagcaccgatggctggtacttcggcctgggcggcagctggggcctgccgaaggacttcaccctgaatgccaacgtcggtcgcagcaccttcgaggacggcatcgccaaggactacaccgactggaacgtcggcgtcgcgcgccagttcggcctgttcaacgtcggcctgggctactacggcaccgacggcaacggccgtgacaattccggcaagctggcccacagccgggtgatgctgagcgtcgccgtcggcaagtaa

SEQ ID NO: 496707 - DNA, 1038 bp, Stenotrophomonas maltophilia
atggcgcagcaaacgatgaaggccctggtcaagcgcgaagcggccaagggcatctggctggaagaagttccggttccgaccccgggcccgaacgaggtcctgatcaagctggaaaagaccgcgatctgcggcaccgacctgcacatctacctgtgggacgagtggagccagcgcaccatcaagccgggcctgaccatcggccatgagttcgtcggccgcattgccgcgctcggctcggcggtgaccggctatgagatcggccagcgcgtctcggccgaaggtcacatcgtctgtggccattgccgcaactgccgtggcggccgcccgcacctgtgcccgaacaccgtcggcatcggcgtcaacgtcaacggcgccttcgccgaatacatggtgatgccggccagcaacctgtggccgatcccggaccagatcccgtcggaactggccgcgttcttcgacccgtacggcaatgccgcacactgcgcgctggaattcgacgtgatcggcgaagacgtgctgatcaccggcgccggtccgatcggcatcatcgccgccggcatctgcaagcacatcggtgcgcgcaacgtggtggtgaccgacgtcaacgacttccgcctgaagctggccgccgacatgggcgccacccgcgtggtcaacgtcgccaaccagtcgctgaaggacgtgatgaaggaactgcacatggagggcttcgacgtgggcctggaaatgagcggcaatccgcgcgcgttcaacgacatgctcgactgcatgtaccacggcggcaagatcgccatgctcggcatcatgcccaagggcgccggctgcgactgggacaagatcatcttcaagggcctgaccgtgcagggcatctacggccgcaagatgtacgagacctggtacaagatgacccagctggtgctgtccggcttcccgctcggcaaggtgatgacccaccagctgccgatcgacgagttccagaagggcttcgacctgatggaagaaggcaaggccggcaaggttgttttgagctggaattga

SEQ ID NO: 496708 - DNA, 2166 bp, Stenotrophomonas maltophilia
atgcgctcgaacctgcttgcattctccatcgtcgccagcctcgggctggcccaggtcgcccatgccgctgaaggcatgtgggtgccgcagcagctgccggaaatcgccggtccgttgcagaaggccggcctgaagctgtccccggagcagctgtccaacctcaccggcgacccgatgggcgcggtcgtcgccctcggcggctgcaccgccagcttcgtgtcgccgcagggcctggtggtcaccaaccaccactgcgcctacggtgcgatccagctgaattcgaccgccgagaagaacctgatcaaggacggcttcaacgcgccgaagcacagcgatgaactgagcgccggcccgaacgcccgcgtctacgtgctcgaccagatcaccgacgtcaccgcccaggccaaggccgccattgccgccgccggcaacgacccgctggcccgcagccgtgcgctggatgccttcgacaaggcccaggtcgccgcgtgtgaagccgaggacggcttccgctgccgcctgtacaccttctccggcggcaacacctaccgactgttccgcaacatggaaatcaaggacgtgcgcctggtctacgcgcccccgggcagcgtcggcaagtacggcggcgacgtcgacaactggatgtggccgcgccacaccggcgacttctcgttctaccgcgcctacgtcggcaaggacggcaagccggccgcattctcggccgacaacgtgccgtaccagcccaagcacttcctgaagttcaccgaccagccgctgggcgccggtgacttcgtgatggtggcgggctatccgggccgcaccaaccgctacgcgctggccggtgagttcaacgaaaccgccagctggacctacccgaccatcgccaggcactacaacgcagtgttgaagatgatcgatgaggcgggcaaggccgacgccgacgtcaaggtgaagtacgccgccaccgcggccagcatgaacaacgtggccaagaactacgccggccagctggaaggcttcaagcgcatcgacgctgctggccagaagcaggctgaagaagccgccgtgctggcctggctgaagaagcagggcgccgccggcaagccggccctggcagcgcacgcgcagctggtcaagcacctggataccagcaaggcgacccgcgagcgcgatctgttcgtcggccagttcaacaacacctcggcggtcaacgccgccatcggcctgtaccgcctgtcgatcgagcgcaccaagccggacgccgagcgcgaggtcggctaccagcagcgcgacctgccgaccctggaaggcggcctgaagcagatggatcgccgctatgtggcgaagatggaccagcagctgcagacctactggctggaccagtacgtcgccctgccggccgcgcagcgcaacaacgacgtgctgaacacctggctgggcggcagcgatgccagcgcggtcaaggcactggtgagcaagctgtcgggcactgagctgggcagcctggatgcacgcctgaagtggttcaaggccgaccgcgccgcgttcgaagccagcaccgatccggccatccagtacgcggtggcgatcatgccgtcgctgctgaagcaggaagagcagaagaagatccgcgaaggcgagtcgctgaccgcacgtccgctgtacctgcaggcactggctgactacaagaagagccagggcgagttcgtgtatccggatgccaacctgtcgctgcgcatcaccttcggcaacgtgatgggctatgagcccagggacggcgtggcctacaccccgttcaccacgctggagggcatcgtcgccaaggacaccggcgtcgatccgttcgatgcgcccaaggccctgctcgacgcggtcaaggccaagcgctacggcggcctggaagacaagcgcgtgggctcggtgccggtgaacttcctgtccaacctggacatcaccggtggcaactcgggttcaccggtgctggacgccaacggcaagctggtcgggctggccttcgacggcaactgggaatcggtcagctccaactgggtgttcgacccggtgatgacccgcatgatcgcggtcgacagccgctacatgcagtggatcatgcaggaagtggcgccggcgccggcgctgctgaaggaactgaacctggcgaaataa

SEQ ID NO: 496709 - DNA, 483 bp, Stenotrophomonas maltophilia
atgaagctgttgtccgctgtgttgttgtctgcgctttcactccccgccgttccggcgctggcagtggagacttcgccttcccccctgctggggcgctggtcgctggatatcgccacgtctgcgctacccgaagcgcagcgcccgaagcacgtggtgctcgagttcaaggacgccggtggtggccgctggagctcgcacgtggacatcgtcctgcacgacggcaagaccatgaaatccgacggcacgctggccctggatggcacgcccggcgccctgtccggcacctatggcgcggacaaggccaacctgaaactgcctgcaccgaacacgctggtgatgcagctggtggaccatggcacgccggcctccacccgcatctacaccgtggcggatgaccaggcgacgatgaccgagaccaaggcgttctacggtcatgacggtacgccgatcctgcagaccaacttgttcaagcgcatgccgtag

SEQ ID NO: 496710 - DNA, 2676 bp, Stenotrophomonas maltophilia
atgaaccaagccctgacccccttcgataccgacccgctggaaacgcgggagtggcgggaatcactggaggcggtgatgcaggccggtggccggccacgcgcgcattacctgatcgaccagctcagcgagctggatgcgcagcggcacggcgacctgcatgcgcgcgcgtggaccgcctacgtcaacaccatcccgccggagcgccagccggcctacccgggcgacctggccatcgagcgccgcctgaacgcgatgatccgctggaatgcgatggtgatggtgctgcgcgccggcaagcactccaacgtcggcggccacatcgccacctaccagtcggcggctgtcctgtacgacgtgggcttcgatcatttcttccgtggccgtaccggcaccttcgacggcgacatgatctacatccagggccactccgcgccggggatctacggccgcgcgtacgtggaaggccgcatcgatccagcgcgcatggacaacttccgccgcgaagccggtcgcgaaggcctgtcctcgtatccgcacccgcgattgatgccggagttctggcagttccccaccgtgtcgatggggctgggcccgctgaccgccgcctaccaggcgcgctacatgcgctacctcgagtaccgcggcctgaagcagcaccaggaccgcaaggtctgggccttcctcggcgacggcgagatggaccagcccgaatcgctggcggcgatttccctggccggccgcgagcggctggacaacatcgtgttcgtggtcaactgcaacctgcagcgcctggacggtccggtacgcggcaacgccaaggtcatccaggaactggaaggcacgttccgcgcggccggctggaacgtgatcaagctgatctggggcagtggctgggacgacctgctggcccgcgaccacagcggcctgctgcgccagcgcatgatggaatgcgtggatggcgactaccagaccttcaagtcgcagagcggcgcctacgtgcgcgagcatttcttcggccgttaccccgagctgctggagctggtcgcgcacatgagcgacgacgacatctgggcgctggcacgtggtggccacgatccgcagaaggtgtacgccgcctaccagcaggcggtgaacacccgcagccggccgacggtgatcctggccaagacggtcaagggtttcggcatgggcgaagccggcgaaggccagaacatcaaccaccagctgaagaagatgagcgccgatgcagtacgcgccttccgtgaccgcttcaacctgccggtcagcgacgaccagctggaggaaatgccctatctgcgcccggaacccggcagcgccgaggccgcctacttcgccgaacgccgccgcatccagggtgggcagctgccggcgcgcctggccaaggtggatccgctgccgctgccgccgctgtcgatcttcaacacccagctgcagggcagtggcgatcgcggccagtccaccaccatgggcttcgtgcgcatcctcaccagcctgctgaaggacccggatctgggcaagctggtgattccgatcgtgcccgatgaatcgcgcaccttcggcatggaaggcctgttccgccagatcggcatccactcctacctgggccagctgtacaccccgcaggatgccggccagctgagctattacaaggaagccaaggacggtcagatcctgcaggaaggcatcaacgaatccggtgcgatctgttcatggatcgccgccggcactgcctacagcaaccacggcctggccacgattccgttctacatcttctattcgatgttcggcctgcagcgcgtcggtgacctggcctgggccgctgccgacgcgcgtacccgcggcttcctgctcggtgccacgtcgggccgcaccacgctgatgggcgaaggcctgcagcacgatgacggccacagccacgtgctgtcgtcggtgattccgagctgcgtgtcctacgacccgacctacaactacgaactggcggtgatcatccacgacggcctgcgccgcatgtatgtcgaccaggaagacatctactactacatcaccgtactcaacgagaactacccgcagccggcactgcccgaaggcaccgaagccggcatcctgaagggcctgtacctgctgcatccggcagccgccgacaacgccttgcagccacgcgtgcagctgatgggcagcggctcgatcctgcgcgaagtggaagccgcggcagacctgctgcagcaggacttcggcatcgccagcgatgtgtggagcgcgaccagcctgaccgaactgcgccgcgacgggctgtccgccgagcgctggaacctgctgcatccggccgaagaaccgcgcgtgccctacgtgcagcaatgcctgcagggtcatgaaggcccggtggtggtggccaccgactacatgaagatcgtcggcgaccagatccgtcccttcatcaacgaccgccgcttcaccgcattgggcaccgatggcttcggccgctccgacacgcgtgaatcgctgcgcacattcttcgaagtggatcgccacttcatcgtactggcggccctgaagtcgctggccgacgaaggccgcatcgaacgctcgcggatgcaggacgcgatcgacaagtacggcatcgacaccggcaagcgcgatcctgccgccgccgtgtag

SEQ ID NO: 496711 - DNA, 399 bp, Stenotrophomonas maltophilia
gtgaccgccatcgatgacagtggcgtttcaacgaccggcaggcagccgctagaatgcggcccctgcaatgtcccggcagcccgcacaaggagtgctcccatcaacgcacgcaccgccatcaacaccctcagcagcctgctgttcctgctgctggtcgcccacaccaccgcctaccagcagcagatgtggccgcccagccgggtcatccatgtgcatccggtgatcgtcgtcctcgcctatgcgctgggtgcgctcacgctgctgttgtggatcggcggtcgtcgtgcaccggaacccgcccaacgcctggcgcgctggttgcccatcgtcgcctggtgcctgctgggcgtcggcgtggcgatcatcccggtgttcctgccggggctgtccccggcctga

SEQ ID NO: 496712 - DNA, 516 bp, Stenotrophomonas maltophilia
gtgaacagcgtgaggatctgggagaagagctacgcgctgcggcgccggctgctgcgtggcttcttcctgcgtcgcggttcggccagcgaggatgccgaagacctggcgcaggaggtctacctgcgcctgctgcgcagcaccggcgaggatgccgatgcggtcgagaacccggaagcctacctgttcaccgtggcggccaacctggcgcgcgagcatgcgcgcgcgcggtcgtcgctgccgccgctggaagacgtcgacctgctggccgaagtgctgaaaagcgaagaagacatcgaaggcgaattcgagcgtgcgcagcgctggaacgacatccgcagcaccatcgcacgactgccggcgaccacgcggcgggtgatggagctgcattaccgcgacgggctggactgcccgcgaatcagccagcagctgcaggtgtcggtgcacatggtgcgcaagcacatcggcaaggggctggaggcatgcaggaaggcgctgggcgccagggagctcacatga

SEQ ID NO: 496713 - DNA, 1023 bp, Stenotrophomonas maltophilia
atgaaccggacctcatcgcccgtggccgacgacacgatcgcctgcgaggccatgacctggttcctgcgcaatcgcgaggggccattggatgaggccgggcgcctcgcgttcctggactggatgaagcgctcgccggagcacgtgcgcgcctacatgcacgcccttgcgttgcaccggcaggtgggcgaggcgctgcaatcgccgttgcctgacgacgcggcggttccaccgcggcaggtcgccgccaaggtggtaccgctgttcggtagcgtgcacgcgccgccgcgcgctgtgccgcgtcgcggtcgtgcgcgctggtgggtggcggctgccgcagcctgcatcgccctgctcggcgtgggcctggttccgcagctgatgcccaccgaacagctgtacagcgccgaccacggtgaactgcgtgacctggtgctgcctgaccggacacaggtgcggctcaacgcggacagccgcctgcgggtacgcatgggctggttcagtcgcaaggcggaactgctgcagggcgaggcgacgttcgacatcgcacgcgaccgccgccccttcgaggtgcaggtgaacggcctggagatcagggacatcggcacagtcttcgacgtgtcgcgacggctgcagagcacgcgcatcggtgtggtttccggcgaggtcgaggtctggagccaaggcgcgggtgcccgccgcctggcccagttggggcagggccgggtagtgcaggtcgacgcgcgcagccatgcggtggagtccttggacatgccactgtcgatgctgctggactggcagcagcgcaaagtgtccttccttgacgagcgcttggacgaagtggctgctgccttcaaccggcacaaccaggtgcaggtgcgcgtgctggacgagggcgcggcatcggcacggttgtccggcagcctcgatgcgcatcgcatcggtgcgctgcaggccttcctcgaacgtgacccgcgcttcgtggtgagccgcgagggcgacacagtgcgggttggcagccgctga

SEQ ID NO: 496714 - DNA, 2934 bp, Stenotrophomonas maltophilia
atgcgcaacacgctctacctgtcgatcatcctcgccctgtctcccggcagcatgccattggccttcgccgccgccgccgatggcctggaggcgcgtgtgtccacgccgatcgcggcacagccgttggcgcgtgcactggagcagttgtcacgcagttccggggtgcagttcctgtactcggccgatggcgatgcccgcatggccggtgcggtgccgcgcggtgccaccgtcaggcaggcgctggatgcactgctggccggtaccggcctgggctacaccgtggtggatggcaatgtcatcgccatcgatccggcaccggtacgcaacgcgccaaagcccggcgcaccgaagccgcgcgaggccgaggcggtggtggcgccgaccctggacacggtgaaggtgattgccgcgcacgaggtgatcgaccagaagaagacctcaccggtgatcaaggattcggtggtctacgacgaaatggacagctacggcgacgagaccctggccgagagcctgatggccgctccagggctgagtgcggtggaggatgccggcgagccacgttatgtgaccgtgcgcggcgtgcaggccaacctcaactacaccaccatcgatggcatcgcgattgccagcgtgggtggcagtggctccggcgaacgcatgaacaacctgcagctgattcccagcgacatcggcacccgtaccgacatctacaagagcttcagtgcggagcaggcaccggatgcgatcggcggcgtgatcgacatcatcagccgcagtgccttcgaccggtccggcaagtacgtgtttgccgacgtggcatgtatctattccacggccgagaccaacgtcgagcgcagcgctggcggcaaccacgaaaccctgggccacttcggcaagagcgccaagatggtgttctccaaccagttcggcgccgggcaggagttcggcatcgttgcggtggcacgctatgagcagcgttcgcgcaacagcgtcaagcgctgggtggagtcgaactactactacaacgacgccggcaagtacctcaccgacggcaccaccgggccggatgaggccaagggttggaacgggctgcgtgcgcccggcaatttcagcaccggcacctacaccaacttcatcaccaacttcggcggctcggccaagctggaatggaagccgtcggacgatccgttctacgcatcgctgctgctgtactcgtaccggttctacgagaactcgacgatgaacaagaccgacctgtacggcaacgccaagtttccgatccgcaatcagaccgaggacagcggcaccacccagatcaacagcatctacatcaagaaccgacacgaccgatgggaccgcagcaaccgcggcgccatcgccagcttcaactgggacatcggcgaccgttcgcggctgaccctgcgcggcggccataccgaagagactttccacaacaaccaggtctactggggtgtgcgcgcctacccaagcagcctgttcgtcgactacgagaacgacagccacggtttccccaacgcggtggcggtgtccgattccagcctgttgaccagctcggcgttcaagctcaatccggcgcaggcttatgtctccccgcgcgatgccaaggagagcatcgacaacctgcgcgccgacttcagctacaacatcgatgccgacgcgcgcggcttcggcctggctgccggcgccgagtaccgccacctgaagatctggcaggacatcgacttcgactatttcaagagcagtgccacgctcaacgactacctgtatccgggttcgacgctgctgggcagcgtgccgggcttcccgctgatcgacaaccgcaagtggaacgagcaactgctaccgaaactgggcaacaacaatgcggcgtatccgaatgccaacttcaccagtgactataagtacgtagaggacatcaccaatgcgtatgtgtccacgcactacgcctgggaccggctgctgctgatcggcggcctgcgctatgaccacacccgcttcgatgcgtacagcccgttcagcgatgatggcggcaccacctatacctctgccttccgcaacacgagcggtggctacaacaacctgctgccctcgttgaatgcgacgttcaagctgagcgaggaccagcgcctgcgcttctccgccagccgcacgctgggccggccgacgccgagcaacattgcccaggccaccagcaccagctgtggcgatgacgaggagggcaggggcttctgcaccatcaagcagggcaatgcgaacctgcagccgcgccgttccaccaacatcgaccttgcatgggacctgtacttcaacggcaacaacggcctggtctcggtggcgttgttcgacaaggtaatcaaggacgacatctacaccctgaccaccttcgagaacgtgggcgatacccgttaccgggtgacccagccgatgaacaccgatgagtccaggctgcgcggcgtcgagttcgcggtggccaaccgcaacctgcgatggggccgccagcgcttcgacatgtacttcaacgccacgcggctggaaggcaggaccaactaccgcatcaccgatggcaccgagcgacgcctggaccgcctgctgtaccagccggactggtcgctcaatggttcggtgatctggcgcatgccgtggaagaactcgcaactgcgcctgtccggaacctaccgcagccggatgctggtcgacttcggcgatacccagtggctggactcgtactacgacccttacatgaccttcaacatggccttcagccacaaggtcagcaggcacgtgacgctgaagtacgaagccaagaacctgttcaacacccagccgacctacagcaccggcccgaacgggcgcttccgtaccgagatcgacgactacggccgcttcttctacttccacatcatctacaactga

SEQ ID NO: 496715 - DNA, 1596 bp, Stenotrophomonas maltophilia
gtggagacgatcaatcgcaggcgattcctggccctggccggcctgtccgctgccggcgcctggatgggcacggcacgcgcgctggccgcgcaggccgatgccaccacgctgaacccgcgcaacctgctggccaagccgcgctttgccagcacgcccttcaccctgggcgtggcctcgggtgatcccacggccgatggcatggtgctgtggacgcgtctggcgaccgagccgctggtgttcggcggtggcatgccagcccggccgatggtggtcgaatggcagctggcagcggacgaaggcatgcgcaaggtggtacgccagggttcggcgctcgcgcatcccgaactcggccacgcggtgcacgtggaactggaaggattggcgcccggacggccctactggtaccgctttaccgtgggtggccacgccagtgcagtcggttgtacccgcacgctgccggcagccgcggcagcggtggatcgcgtgcgctttgtggtggccggctgccagcactacgaagaaggccactacaccgcgtggcggcgcatcgccgaggaaccgctggatttcgtcttccactacggtgattacatctacgaaggtgaaagccagcctggcctgcggaagatgaacggccagccgttcaccaacctgcgcaaccacgtcggcccgcagacctacacgctggatgattaccgccgccgctacgcccagtacaagagcgatgccgacctgcaggccgcgcatgcgtcggcaccgtggttcgtcactttcgatgaccatgaagtggacaacaactgggccggcgccgaagaccaggacgatacgcccagcgaagtgttcctgctgcggcgcgcacaggcgttccaggcctactacgagaacatgccgctgcgccgttcggcattcccgcgcgatggccacatgcagctgtaccggcgcgcacgctacggaacgctgatggacctgcacctgctcgacacacgccagtaccgcagcaagcaggtgaacatggcgctgcgtgaggacgtggaatcggcggagcgcagcatcgtcggtgcgaagcaggagcgctggctgttcgatggcctggccgatgccgcaccgcgttggcacaccatcgcccaccaggtagcgctgggcaactacatgcgcgagaaggacggcgtggtgcagtcgtccgatgatcaatggtcgggttacctggacagccgtcggcgcctgctcgaccacatccagaaggtcggcttcggcaacgtggtgaccgcctgtggcgacgcgcaccggcattacgccagcgacctggtgcaggaccaccgtgactcgggcgtggtctccagcgagttcctcgccacctcgatcacttccggtgctgacggccagggcgtggacgcgtatgccaggaaccagcttgcgcacagccccaatctgaaggcgaccaccgacaagcgtggctatgtgctgtgcgatgtcacccctgatgcgtggatcggcgacatgaagacgctggataccgtgatgcggccgaacggtaccgtgcagagctggaagcgctacgcggtggagcacggccggccggggctgcaggaggcctga

SEQ ID NO: 496716 - DNA, 2109 bp, Stenotrophomonas maltophilia
gtgaccgatatcggccgacgccggttgttgcaggccggcgttgccgccggccttgcctcgctgctgcccagcatcgcacgggccgcagcgatcgcccccgccgcgcagacgcgcagcctcgaagacctgcagcacatcgtggtgttcatgcaggagaaccgttcgttcgaccactacttcggcacgctgccgggcgtacgtggtttcggtgaccgcttcgtggccccggccgccgcgctgcaggccggtggccgcgcgcgcagcctgtggctgcagcccgatgccattggcacgcgggcgatcgcaccgttcccgctggataccgccgcgcacttcggctacatgcgggtggaaggcacgccgcacacctggccggatgcgcagcgcgcctgggatcacggccgcatggggcactggccgaaggccaagcagaaccactccatgggctacttccagcgcagcgacctgcccttccagttcgccctggccgatgccttcaccatctgcgacgcctaccactgcgcgatgcaggccggaaccaacccgaaccgggtgttcctgtggaccggccacaacgatgctgccgcccgcgccggcggcccggtgatcgccaactcgcacgacaacttccccgagcacggcgggcatcctgcgtcgtaccgctgggccagctatgtcgaacgcctgcagagggcgggggtatcctggcagatctaccaggacatggccgacaacttcaccgacaacccgctggccggcttcgaggcgttccgccaggcctaccgcgctgcgccggggcatgacccgcagctgcgcgcacgcggggtcagcacgcgtggcctggcgcagctgcgccaggacgtcatcgacggacgcctgccgcaggtcagcttcatcatcgccgacgcggccggcagcgagcatcccggcccctccagcccggcccagggcgcggcctataccgcacgcgtgctggatgcactgaccgccgatccgcaggtgtggagccgcaccgccctgctgctgatgttcgacgagaacgacggtttcttcgaccacatgccgccaccggcaccgccttcgccggtggacggtggctgggcgggtgcgtcctcggtcagcactgaaggcgagtaccaccgccatccggcaccgggagatgagaagtacgacttcgccgaactgcgcggccgcccgtatggactgggcccgcgcgtgccgctgtacgtgatctcgccctggagccgcggtggctgggtcgattcgcaggtgtacgaccacacctcggtcattcgactgatcgaacgccgctttggtgtgtccgcgccggacatctcgccgtggcgccgcgcggtctgcggcgacctcagcactgcgttcgactttgcccagcgcgatacccgcccgttcgtccgcggcctgcccgacgtgagcgcggtggccgcacgcgccgctgctttgccggggcgcaccgtgcccgcgctgccagaggggctgaagccagcgaaacaggaaagcggtgtacgcccggcgcgtgcccttccctatcgaccgcaggcgtcgattgctgcggtcgacgtcgcgggcgttgacctggcgttgtcttgcgagggcgcagcggcagtgctgcatgtctacgatcggctgcggctggaggcggtgccgcgccgttacacgctgctgccgggcatgccgctgcgcgagcgttggccgctggacgcccagggccgctatgacctgtggctgctcggtccgaacggcttccaccgccacttccagggtgcggccaagactcctgccgtgcaggcttcaattgatcgcgcggatggccagctgcggctgcacctgcgcaatctgggtgacagtgcacagcaggtgcgcgtgcatggcggcgcctatgcaggacacatgcccgaacagacattggcgctgcccgcacatgcgcagacttcattggcgtgggatgcaacgcctaccgccggctggtatgacctgcgcatcagcgcgggtgggagtgtgctgcgtttggccggccgcgccgaggatggtcgccccggcaccagtgacccggcgatgggcaccgaaccgctgcggttcgagcacgattga

SEQ ID NO: 496717 - DNA, 2379 bp, Stenotrophomonas maltophilia
atgcgaacgtctgcgcgctttccccgtgtctcgctgcttgccctgctgatcgctcccgcactggacgccctggccgaagcaccgcagggcgatgccgctgaagcgcgcagcagtgaggcccgcaccctcgaccaggtgcaggtgatcggccaggccaccagctatgccaagacttccgtgcgtgcggaaacgctgaaccggcagaccgtgatgagcagcgtcaacgacgcgctcaacgaagtgcccggcgtggtggtcagcgaggccgatgccaccggctcgtcggtgtggggcacgcagatcagcatgcgtggcttcgtcaccaaccgtgatacccagcagatcggcaccaccatcgacggcctgcccaatggtggctcgggttacggcggcggctcgctggccaaccgctacatcgacaccctcgacctggaaacggtggaagtcagccagggcactgccgatatctcctcgcgctcgaacgaggccctgggcggcacgctcaacttcctcaccagcgatccgctgcaggacagccgcctgcgcttcgtggtcggcgccggtgacaacgaggcgcgcaagtactacgtgcgctacgacaccggcctgctcggcggccacacccgcgcctgggtcagtgcctcgtcggcgcgcgtgcatgactggatcgatggcagcggcaggaccagcaatgaccacatcgccggcaagttcatcaccgaactggatcgctggaccctgaccggctacctgtcctacaacgatgcggacgagccggagtacaccagcgtctcaccgaagggcttcgcgaccaatccggatcgcgacaacctggtcggtaccctcaccggcattccctacctggaccagaactaccgttccggctcgcgtgcgctgcgcgagaacaccttcggctacctgcgcgcggccttcgacggtggcaacggcttcaagacctcggtggccgcctacgggcaccgcatgcaaggccgtggtgactggctgccaccgtacctggcgcaggtcagcgatgagggtgcgggccgccccgaatcggaatacctcggtggcaagaccgtgtacggcggcagcaaccgtggccagattttcttcgtcaatcccgatggcagtgccgcgcagcgcctggccagctgcagcccgcgcctgggcttcaccgccgagtacgatccgaactgctacgccggcaacgtgctgggcgcgcagtcgtatcgccacacccactacgacaacgaccgcatgggcgtgaccgccgacgttgaatggcgccagactttcggcgcagtcgacaacacgatccgcggcggcctgtgggtggagaagctggaccgttcggcacgccgcgactggcatcgcctgctcaacgtcggccaggacatcgccttcgaccaccagccgtactgggtacagttcgaggacaagtacaaggtcgacgaacagatgtactacgtcgaggacgtggcgcggttcgggccgttcagcgcacgtctgggcgtgaagcagttcttcgtcgaccagtcgcgccgccgcgtgatcggtgccagcgagcacgtcacatccgattccaggtccgacccgcttctgtccaccggcttgacctgggcgccgggcgtggaaggcatggagctgttcgccggcttctcgcagaacttcgccgcgattccttccggcgtgctcggcgagaccgacccgcagcgcttccgcaacgtcgagccggagaccgctgacaacattgaagtgggcatgcgcatcagccgctggcccctgaccgcctcggtcacgctgtacaacatcaaattcgacaaccgcatcgtctacctgccggccggcttcgtcagcggcatcgactacctgggcgagaccgacggcgtctacgagaacttcggcggcgtggaaagcaacggcctggaagcggcgttcggttacggttgggacaacggctggcgtctcaacgccgcctacacctacaaccgctccaagtacctgggcagcggtgatgccgcgcgcgatacccagctgggcatcgtcgacggcgccaaggtgatcggccagcccgaacagaccctcgtactctcggcggactggcagggcgagaactggaacttcggcctgtccggccgttacctaggcacccgctacctcgacgccgccaacgtcaacaagctgccctcggccaccgtgttcaatgccaacatcggcttcgacctgcagggcctgtcgccgcgcctgaagggcatgggtgccaacctggtggtgagcaacctcaccgataagcggtatcttgcgggggtggacggccgcgacaacgccttcatcggcgccccgcgcaccgtcggcatctccttccgcgtggacctgtga

SEQ ID NO: 496718 - DNA, 927 bp, Stenotrophomonas maltophilia
atgaagcgttcgcgcaaacgttcccgcctgctgctcggtagtgcgatcaccgtggtgctgctggccggtgcgggcaccctcgcctatcgtcacctgcacccgggcctggatgcagccgtagccagtacgatcgatatcctcgatgcacagggcaaggtggtcgcccactaccacgcgcccagtgccgaggagatcgccggcctgggcaatgccgaatcggtaatgctcggccggcgcatcctcaacgagaccgcgcgcctgcttccggacaacgtcggcaacgatctgaactgcaattcgtgccacatggccgagggcaagcgaccgttcggcaaccactacttcaataccggcggcggtgcctatccgcgttacatgccgcgcccgggcaaggtgatcgggctgaccgagcgcatcaatggctgcctgcagcgctcgatgaacggcaagccgctgccgaaggacgcaccgcagatgcgcgcgatgctcgactacatggcgtggctgagcagcccggtgccagagggtgcaaaagtggccgcgcccagtgagggccccatcgacagcacgctgactccggacccggtccgcggccaggcgctgtatgccgtgcagtgcgccgcctgccatggcgacaacggcgaaggccgacgcgatgccagcggtgacatcgcgttcccgccgctgtggggcgaccacagcttcaacatcggtgccggcatggcgcgcctgtacaaggcggccggtttcatcaagcacaacatgccaccggcagtgacccgcgcaccgccgctggggcagcaggtgatgccggaccaggatgcggtggacatcgccggctatttcatcaaccagccgcggccggacttcgccaacaagggcaaggactggccgcgtgacccgaagcccaaggacgcacggtactga

SEQ ID NO: 496719 - DNA, 1347 bp, Stenotrophomonas maltophilia
atgcgcatctcgttcaagctcgccattgccctggccgccacggtggccgccgcctacggcatcgcccgcagcacgccctactggttcgcaccgcgacagaccgcgcaggtcgacatccacgatccggcgctgatcgcgcaggggcgctacctgtcacgtgccgccgactgcgcggcctgccacaccgcgccgggcggcaagccgttcgccggtggcctgggcatgcagacgccgatgggcacgatctattcgaccaacatcacccccgatccggactccggcattggtgcctacgactacgccgatttcgaacgcgcggtccgccgcggcatccgccacgacggccagccgctgtatccggcgatgccgtatgcctcgtacgtgatcgccagcgatgccgagatcaaggcgctgtatgcctatttcatgggctcggtgaagccggtgaagcaaagcaacgccgacagcacgattccatggccggccaacatgcgctggcctttggcatggtggcagctgctgttcgcgcgcccgcgcagcttcaacccggatccgtcgctggatgtgggccagcagcgtggcgctgagctggttgagggcctggcccactgcggcgcctgtcatacaccacgtgggctggcgttccaggagaaggcgatggccgacgatggcagccgccagttcctgtccggctcggtgctggaaggctggtatgcgaagaacctgcgcaatgaatcgaccggcctggccagctggagcgagggcgagatcgtcgacttcctgcgcaccgggcgcaccgatcgatcggcagccttcggtggcatggccgacgtggtcgagcacagcacgcagtacctgtccgacgctgacctgctggccatggcgcgctacctgaagcagctgccggcgcgtgagggacgcagtgcgcagtggtcgcctggtaccgacaccaccaccgccgcgctgcgtagtggcgactatcgcgtggccggttcgctggcctatgccgagcactgccaggcctgccaccgtgccgacgggcgcggcatgccacgcgtctatccggccttggccggcaactcgatcgtgttcgccgacgaccccagttcgctggtgcaggtgaccctgatcgggggtcgcacgccgcataccccgcacgaccgcatggccttcaccatgcccggcttcgagcagctgccgaacgcgcagctggcacagatcctgaccttcatccgcagcagctggggcaaccaggccagcgcggtgagcgaggtcgaggtggcacgcatgcgccgggtggtgcgtgacaagccggtgcactacgttccgcaggagtccgcacgatga

SEQ ID NO: 496720 - DNA, 1119 bp, Stenotrophomonas maltophilia
atgaagcgcctgctgctgttgttgctggcgtgcgccggcctgtggctggctgcatgctcatcctcgatcaacgcctcgtccacctcactcgccgatcagctgatcgcgccgggtggcgtgtcgaccctgctcgatcgtccgcgcatcgccgcggccatcgccgaactgcccaaccgccatggcttcgcggcgggccgcgatggcgtgccgatcttctggcgcgtattcgatccgggcgactacggcgcgcgttaccgctacctgccgcagcgccacgagaacggcctgccgctggataccggcctgagcctggccgtgccgcagccgttccgcgcgcaggcgccgcgcggcaccgtggtgctgctgcatgggtggatgatgaacggtgattcgatgctgccatggtcgctgcagctggccgaatccggctaccgcgtggtcacgctcgacctgcgcaaccatggccagtccggcaccggcccgtccggctatggcacctatgagtcggatgacgtggtcgatgtgatcggcgagctgcgcgtgcgcggcgaagtgaccgggcccctgtacctgttcggtgtgtcctatggtgcggccacggcggtgttcaccgccgacaagctgggtgaccaggtcgaaggcgtggtggcgatggaatcgttcgccaatgccggcgtggcgatccgcaccatgatcccgcacctgatggggctccagccggaaggcctgaaggcgcaggcggtggcgtcgtacgcgcgctggcgctacggcggccaggacatcaaccaggtgatcgccgccgccagccgccgcatcgacgtcgatctggaccgcgtggacgtcgcgcgtgcgttggccgatacccgcgcctgcgtgctgttgctgcacgggcagggcgaccagcacattccggtcagccagggccgcgaactggcccaggccaacccgcgtgcgcactacatcgaaatgcgcggcgaggaccacatcaccctgccgctgcggctggacctgctggcgggcgtggtcgatgactggatggcgcgcgacgagcaccatccgcagagcgcgtgcccggcaccgcagctgccggcccaggctgagtggctggcgcgcagctga

SEQ ID NO: 496721 - DNA, 1140 bp, Stenotrophomonas maltophilia
atgacgccttcatccccacgtgcccagcagcacgccacccgcgccgccttcttcattcccggattcgccaccgccgcgtgggcaccgatggtcccctacgccaaggccaaggccgggctgtccgacgccagcctcggcgccgtgctgctgtgcctcgggctcggctcgctgctggcgatgccactggcaggtgcgctgaccggacggctgggatgccgtcgggtgatggtgatcacctgcgcgatgatgctgggcgccctgcccttgctggtgctggcaccctcgcccgtggcgctgggcgcagcgctgttcgtgttcggcgccggcgtcggtgcattggattgcgcgatgaacatgcaggccgtggcggtcgagcgcgacgccggacgcgcgatgatgtccggcttccacgccttctacagcatcggtggattcgtcggcgccggctgcatgaccgggctgctgatcctcggcacgccgctgtggctggccgcgctgctttcggtggccgcgctgctgctggttgccgtgctgtcggcaccgcactggcgtccgcaacggatcctgcacgaaggcccgctattggcgctgccgcacggcgtggtcctgttcatcggcgtgctggccttcgtggtgttccttgccgagggctcaatgctggactggagtgcggtgttcctggcggaagtgcggcaggtaccgcgcgaccaggccggggccggctttgcgttgttcaccctggcgatgaccgcgatgcgcctgtttggcgacggcatcgtcgagcgcctcggccggacccgcacgctggtcatcggcggcatcaccgctgcggcgggcttcaccctggccacgctggtgccctcgttcccggtggcgttggccggctacgtactggtcgggctgggctgcgccaacatcgtgccggcgctgttctcgatggcgggccagcagcgggtgatgccggagagcatcgccatcaccgcggtgaccacactgggttacgccggcatcctcgccggtccggcagcgatcggcgcactggcgcatgccaccagcctcggtttcgccttcctgtgcgtggccgcgctgctgctcggtgtcgcggcgtctgcccgcgcactggcacgacgcgtggcctga

SEQ ID NO: 496722 - DNA, 696 bp, Stenotrophomonas maltophilia
atgagcacgacaccgaccatcctccttgtccatggattctggggcggggccgcacattgggccaaggtgatcctggaactgcatcgcaacggccacgaccgtgtgcaggcggtggaactgccgcttacctcgctggccgacgacgcagaacgcacccggaaaatgatccggcagatcgacgggccggtgctgctggtcggccactcctacggcggcgcggtgatcagccaggccggtagcgagcccaacgtgaagggcctggtctacatcgctgccttcgcgcctgatgccggcgagagccccggtgggatcacccagcagcacctgccggaggcagcgccgaacctggcaccggacagcgatggctacctgtggctgcgtgcggacaggttccatgagagcttctgccaggacctgagcgccgaccagggccgggtgatggcggtgacccagaaggcgccgttggcgagcaccttcggtgatgcggtcagcgatccggcctggaagcacaagccgagctggtaccagctgtcccgccaggaccgcatgatcgcgccggacaaccagaaggccatggccacgcgcatccagcccaagcgattgctggagctggatgccagccatgcctcgctggcctcgcagccgaaggaagtgaccgcgctgatcctggaggcctgtgccgccatcggcggctga

SEQ ID NO: 496723 - DNA, 153 bp, Stenotrophomonas maltophilia
atggcgcgttatgaattcagtgatcgcctgtcggccacgctcaacgtcaacaacctgctggacaagcgctactacacgatcttcagctggtacagcacctacacctggggtgagccacgcaatgtgcggctggcgatgacgtacaggttctga

SEQ ID NO: 496724 - DNA, 702 bp, Stenotrophomonas maltophilia
atgctgcagatccgcaagagcgctacccgtggcctggccgagcatggctggctgtcctcgcgccataccttctccttcgccaactactacgacccccgctacgtcagcttcggcccgctgcgggtgatcaacgaagacaaggtgatcggcggccagggcttcggcacccatagccacagcaacatggagatcgtttcctatgtgctgggcggcgcgctggagcacaaggactcgatgggcaccggctcggtgctgcgctacggcgacgtgcagcgcatgagtgccggcagtggtgtcagtcacagcgaattcaaccactcggccgacgagaccgtgcacttcctgcagatctggatcttcccggaccgcgagaacatcacgccgtcctacgaggagacccacttcgccccggagaccaagcgcggccagctgcgcctgatcgcttcgccggacggcgccgacggttcgctgcgcatccaccaggatgcccgcatcttcgccaccatcctcgatggcggccagaagctgcaccacgcgctcggcaatggccgtggtgcctatgtgcaggttgcccgaggccagctgcaggtcaatggcatcaccctggaagccggtgatgcactgcaggtcagcgacgaagcgcagctgaccctggaaaacggcaacgacgccgaagtgctggtgttcgacctgccgctgtaa

SEQ ID NO: 496725 - DNA, 921 bp, Stenotrophomonas maltophilia
atgctcaagctcagcctcgatgccctgcagatcctggatgccatcgaccgccgcggctcctttgccggcgccggcaaggccctgcacaaggtgccctcgaccatttcctacaccgtggccaagctggaggaggacctcggcgttcagctgttcgaccgggtcggcccgcgtgccgaaccgaccgaggccggacgcgccctgctggacgagggtcggcatctcctgcgtgcggcccgcgagctggagctgcgggtgcgccgggtggcgtcgggctgggagaccgaactgaccctggcggtggactcggtgttcccgacctggctgctgggcccggacatcgccgcgtttcgtgaggccgaggcgccgacccggctgcgattgatcggcgaggccctgtccggcacctgggaggccctgctggaccgccgtgccgacctgctggttggcgcgccgggtgagggccccagtggcggtggttacgtggtcgagccgctgggcacggtggagttcgtgttcgcggtcgcgccggatcatccgttggccaaggtgccgggcgtgctcggtcgcgagcagctggtcgagcactgcgcgatcgccgtttctgattcggcgcggcggttgctgccgcgcacggtgggcctgttgatggggcaggagatgctgaccgtgcctgacatggccagcaaactgaagctgcaatgcgaaggtgtgggcttcggcttcctgcccgagccgtgcgcgcgcgctgcagtggcgcgtggccagctggtgatccgcgaggtggaggaacacaagccggaggaaacgttctggctggcctggcgcaccggcgaggacggcgcggcactgcggtggtggcgcgagcgcctgcgcaggccggagctgctgtcgcagtggtggcaggcaatggccaaggggtag

SEQ ID NO: 496726 - DNA, 477 bp, Stenotrophomonas maltophilia; identical to SEQ ID NO: 117514

SEQ ID NO: 496727 - DNA, 1998 bp, Stenotrophomonas maltophilia; identical to SEQ ID NO: 430732

SEQ ID NO: 496728 - DNA, 570 bp, Stenotrophomonas maltophilia
atgaaagatatcaagagcatggatctcaacttactcaaggcgctggacgtattgttggacgaacgcaacgtgacacgggcggcagcacgtcttggactaacccaaccggccttgagcggcatgcttgcgcggctgcgtgaaagcttcggcgacccgctgttcgcgcgtgcgcagcggggcatcgttccgacgcagcgggcgctagacatagggatatctgtcaaacaggtgctagcggaaatcgacgcgctgctccagccaccttctttcgacccggccaccgcacaactgaccttctccatcgccgcgacggactatgcgctgcgtgccattgctgtcccatttctatcggcactcaaacagcacgcaccgcgcgttcgagtctcattagtgccagtcgagagcggactgctacagaaccagcttgagcgcggtcaaatcgatctagccctcctgacgccagagatcactccgccaaatctgcatgcccgagagctattcaaggagcactacgtgtgtgtcctgcgggaagaccatccagcggctatggggcgcaagctgacagtttag

SEQ ID NO: 496729 - DNA, 531 bp, Stenotrophomonas maltophilia; identical to SEQ ID NO: 117511

SEQ ID NO: 496730 - DNA, 507 bp, Stenotrophomonas maltophilia; identical to SEQ ID NO: 117510

SEQ ID NO: 496731 - DNA, 318 bp, Stenotrophomonas maltophilia; identical to SEQ ID NO: 117509

SEQ ID NO: 496732 - DNA, 264 bp, Stenotrophomonas maltophilia; identical to SEQ ID NO: 117508

SEQ ID NO: 496733 - DNA, 906 bp, Stenotrophomonas maltophilia; identical to SEQ ID NO: 117507

SEQ ID NO: 496734 - DNA, 1404 bp, Stenotrophomonas maltophilia; identical to SEQ ID NO: 117506

SEQ ID NO: 496735 - DNA, 642 bp, Stenotrophomonas maltophilia; identical to SEQ ID NO: 156741

SEQ ID NO: 496736 - DNA, 1167 bp, Stenotrophomonas maltophilia; identical to SEQ ID NO: 199823

SEQ ID NO: 496737 - DNA, 3105 bp, Stenotrophomonas maltophilia; identical to SEQ ID NO: 199822

SEQ ID NO: 496738 - DNA, 621 bp, Stenotrophomonas maltophilia; identical to SEQ ID NO: 117502

SEQ ID NO: 496739 - DNA, 1119 bp, Stenotrophomonas maltophilia
atggtcggcggtgatcacaaatggctggcgggtggcgactggacgatagagcactacgccagtctggcaaaatccgtgtccgccgcccgcatcagccatgccgaggggtacgccactcccttgctcgactggacgcaagtccagagactggacaccgccggcgcggctctgctggtggaaattctcgggccagactcgatactcgaccggccggaggcagctccaaatctgtccccggatcgcctcgccctaatgaaagcgcttgccgccgctgctaccgctcagcagaagacggacaaagcagcggtgagcgggaatcctctgctccgcggtctgggacgcataggcctgaccgtggaacagggctgtcgtgcgtgtcttggtctggccgggttcgtgggtcagatcatcgaaacatggagccgtaccgttcgtcacccgcgtcgctggcgcacgacctcggtgatcgctcaaatccagcggtcagcggtggacgccattcccatcgtggcgctactgagcttcatggtaggaatggtggtggcgttcctgggcgcaacggtgctggccaacttcggtgcgagcatcttctcggtgcatctggtcgccttctcgttcatgcgcgagttcggagtgctgctcccggccatattgattgcaggccgtaccgcaagcgcgtataccgcccaaatcggttcgatgaaggcaaatgaagagatcgatgcgcttcgctccaacgcgctcgaccccatcgagttgctggtgctgccacgcgtgctggcgcttcttgtgtccttgccactgctcacattagtaggcatcttggctggcattgtgggcggcgccactgtatgcgcactgagcttggagattcctcctgcacagttccttgccatcgtgcaggaaaaaatcgaggtgcgccattttcttgtcggaatgagcaagtccccgctcttcgcggtgatgatcgccgctatcggctgccatgaagggttcaaggtcgccggtagcgctgagtcggtaggcgaccacacgacttctagtgttgtgcaatcaatcttcatggtgatcctgatcgatgccatcgctgcactgttcttcatggagatgggctggtga

SEQ ID NO: 496740 - DNA, 822 bp, Stenotrophomonas maltophilia; identical to SEQ ID NO: 117500

SEQ ID NO: 496741 - DNA, 930 bp, Stenotrophomonas maltophilia; identical to SEQ ID NO: 117499

SEQ ID NO: 496742 - DNA, 702 bp, Stenotrophomonas maltophilia; identical to SEQ ID NO: 117498

SEQ ID NO: 496743 - DNA, 2121 bp, Stenotrophomonas maltophilia
atgggggtggcgcggcacggagcggctttgccgccgtgccgcgtggggcgcgaggcccgcgccaatgcaggcatgtccgcgtgcttcgcacgcccggagacgccggagcttgccaggggcgctgccatgaccgaccgccgcgacgacgatttccgggtgcgccctggcgcgccgaagaaccgaggcaaaggccagggccagagcttcgtttccaaggtgctcaagcgggctggcaaagccagcggcggcaagtcggcggtgcgccgtcctgtcgctggcgggagcggccagcacgcgggccagcggcccggctcacggcttgggcgcggccatacggcagcgcgcttcgcaggtgcaaagctgacacccatgtcacggcgcgtgaccgtcaagacgctgctggtcaaccagcgcaacgccagcccgcagtcgctcgccaagcacctgcgctacatcgagcgcgacggtgccggccgggacggcgagccgggccgtgcctacgggccgcagaccgaccatgccgacctcgatgccttcaaggaacgctgccaggacgaccgacaccatttccgtttcattgtttccccggaagacggagccgagctggacgacctgcgcacctacacccggcacctgatgaaccgcatggaggccgacctgggaacgcggctggattgggtggcggtcgatcactggaacaccgacaacccgcacacgcacctgatcgtgcgcggacgcgacgataccggcagagacctcgtcatcgcgggcgactacatcgcccacggcttccgccatcgcgccgccgagctggcgacggaatggctggggccgcgcaccgaactggagatccagcagacctggcagcgcgaggtgaagcaagagcggtggacgagcctcgaccgcacgttgcagcgcgaggtcggcgaggatgaccgggtgcggatcgaacgcttcaacgaaccgacgttgcaacgccagcgcctgctactgatcggccggctgcaacgcttgcagcggctcggcctggccgacgaggtgcagcccagcacctgggccatccatgccgacgctgagaagaccctgcgtgccctgggcgagcgtggcgacatcatccgcaccatgcagcgcgccatgagcggccagccgcgcgagctggcggtattcgagccggccgacgacggccgtaccctcgtcggccgcgtggccgccaaggggctggccgacgagctgcacgaccgcggctatctggtcatcgacggcgtggacggcaaggcccactacgtcgctttgaacgcccgcgacgaactggcgagctaccccaccggcgcggtggtggaggtgcgtggttccgccgaggtacgggcggcggacaagaacatcgccgcactggcgagcgatggcctgtaccgtaccgatcatcacctggcgatcgagcaaggccgagccaagcccggccgcgacccgcaggaagtcgtcgcggcccacgtccgacggctggaagccctgcgccgggccggcatcgtggagcgcgtggcggaagggctatggaaagtgccggacgacctatccgagcgtgggcgccagtacgatgcgcagcgactgggcggcgtggccgtggacctgaaatctcacctgccgatcgagcggcaggcccgcgtgatcggcgccacctggctcgaccagcaactgatcggcggcggccggggattgggcgacctgggctttggtggcgatgccaagcaagccttgcagcagcgcgccgacttcctcgaagaacaggggctggcccagcggcgtgggcagcgggtgattctctcccggaatctgctggaaacgctgcgcaatcgggagctggcgcaggccgcccagcacattgccgccgatagtgggttggagcatcggcacgtcacagacgggcagcgcgtagccggcatctaccggcgctcggtcattctcgccagcggtcgctatgcgctgctcgatgacggcatggggttcagtctggtgccttggcggccgataatcgagccacgactggggcagcagatcgccgcgactgtacgcggcggcggtgtgtcatgggaggttggacggcaacgaggtcctgggattggatag

SEQ ID NO: 496744 - DNA, 588 bp, Stenotrophomonas maltophilia; identical to SEQ ID NO: 117496

SEQ ID NO: 496745 - DNA, 558 bp, Stenotrophomonas maltophilia; identical to SEQ ID NO: 117495

SEQ ID NO: 496746 - DNA, 264 bp, Stenotrophomonas maltophilia; identical to SEQ ID NO: 117494

SEQ ID NO: 496747 - DNA, 639 bp, Stenotrophomonas maltophilia; identical to SEQ ID NO: 117493

SEQ ID NO: 496748 - DNA, 411 bp, Stenotrophomonas maltophilia
ttgcatcgcttctcgtggatcaacgagtggaaggaactcgccgacgccagcggcaccccgctgggcatcgagctgatcttgccggactggttctatgccggcgtgctcgacgccgccctggtgctgaccatcgacccggcctatttccgcttgaaaggcggtatcgaacgctggctgtaccgcctggtgcgcaagcatggcgggcggcaggagcacggctggcaattcgacttccgacacctgtaccgcaaatccggcagcgcggcccgcttctcggacttcgcctacgacgtgcgcgccctggtggcgcggcagtcgttgcccggctacgtcctcggcatcgagcggatgccggacgacaacaccgagctgctgaccttccggcccgtgccgcacgcggcacggggataa

SEQ ID NO: 496749 - DNA, 1422 bp, Stenotrophomonas maltophilia
atgtcttttgaatcgctgggcctggcgcccttcctgctgcgcgcgctcgccgagcagggctacgaaaacccgaccccgatccagcagcaggcgatcccgctggcgctggccggtcgcgacctgctggccggcgcacagaccggcaccggcaagaccgccgcgttcggcctgccgctgctccagcacctgggcaccgcctcgcaggaggtacgtgccggcccgcgcaagccgcgcgcgctgatccttgccccgacccgcgagctggccacccaggtgcatgacagcctgcgtggctacagcaagtacctgcgcatccccagcgcctgcatctacggcggcgtcggcatgggcaaccagctggacatcctgcgccgtggcgtggacctgctggtggcctgcccgggccgcctgatcgaccaccttgagcgtcgcagcgtcgacctgtccggcattgaagtgctgatcctggacgaagccgaccgcatgctcgacatgggcttcctgccgtcgatcaagcgcatcctggccaagctgccgaagcagaaccgccagaccctgctgttctcggccaccttcgaggacaacatccgccagctggcgctggagttcatgcgcaacccggaacagatccaggtaacgccgaagaacaccgtggccgaaaccatcacccaccgcgtgcatccggtcgacgccggccgcaagcgcgacctgctgctgcacctgctggcgcaggacagccgcgagcagaccctggtgttcgcccgcaccaagcatggcagcgacaagctggccacgttcctggaaaagtcgggcatcaagaccgcggcgatccacggcaacaagagccagggccagcgcctgcgtgcgctgggtgacttcaaggccggccgcgtgaccgtgctggtggccaccgacatcgccgcgcgcggcatcgacatcaacgagctgccgaaggtgatcaacttcgacctgccgatggtggccgaggactacgtgcaccgcatcggccgcaccggccgcaacggcgcgaccggtcaggcgatttcgctggtggcgcaggatgaagtgaagctgctgcgcgcgatcgtgcgcctgctgggccgcgacatggacatccgcgatgtgccgggcttcgagctgcagacgccgatccgctggggcaacagtgcgccgggcaaggccgagcacgataccggtgagcgcgcaccgcgcaagagccacgcgcgccgtccgcacggcgatgcgccgcgccatgcgcatgctggcccgaagaaggccggtggtggccgccgcgagggcggtggcaatggccagcagcgtgccggtgcgggcgcgggtcagggccagcgtcgtggcggtggcggcaatggtggcggccgtggccgcggccagggtggcaacggcggcggtcgcgccggctga

SEQ ID NO: 496750 - DNA, 2595 bp, Stenotrophomonas maltophilia
gtgtccttgcatcgtcgtgccgttcttccgttgctgcttgccgccgccaccgcactgttccagccgcagccggtacaggcacagagcacctacttctttccgcaggctgccgatgcagcggcgttcgataccgccgtgcccacgccggagcagttcctcggctatccgatcggcagccgttacacccggcacgaccagctggtggcgtacttccaggaactggcccggcgctcggacaggatcagcgtgcgcgagatcggccgcagctatgagggccgcccgctgttgatcgccactgtcactgccgcaggcaaccacgcgcggttggaacagatccgccagcagcacgcgaccctggccgatccggcgcagccgcgcagtgcggcgggcgacagcccggtggtggtgtggctgggatacagcgtgcatggcaacgagacctccagtgccgaggcggcgatgctgacggcttactacctggtggccaaccgcagcgccgaaacccagcagtggctgcagcaggcggtggtgctgttcgacccggcgcagaatccggacggtcgcgatcgtgccgccaactggcacaacgcgtgggcctccgatccggcctcggccgacccggtcgacaaggagcacgtcgaaccgttcccgcaagggcgcaccaaccactacttcaccgatctcaaccgcgactggctggccctgacccagcaggactcgcggccgaaggtggaggtgttccaccagtggtacccgaacgtgcagatcgacttccacgaaatgggcaaggacagcacctactacttcgagccctcgccgaagagcatgcacagtccgctgattcccgcggcgtcgtacgaattcaacaagaccctggccaggtaccacgcgcaggcgctggatgcgctgggctcgctgtactacaccggcgagaacttcgacaacttctcgccggtatacggctcgacctacccggacttccatggtgccgtcggcgtgaccgtcgaacaggccagctcgcgcggccgcgtgcaggaatcggtgaatggcctgctgacgttcccgttcaccatccgcaaccaggtcgccaccgggctgggcacggtgcgtggcgcagtgaccgagcgcagcggcctgttcgacctgcagaagcagttcttccagagcgcgctgaagcaggccgcacagcagccggtgaagagcttcgtgttcggtgatgcgcatgacccggccctgacccgtcgcctgctggaactgttgctgctgcatcgcgtcgaggtgcgcgcgctggatcgtgccgtcactgtcgatggccagcgcttcgatgccggcagcgcctacgttgtgccggtccaacaggcgcagttccgcctggtgcattcgatctttgccgagacgccgccgatcaagggtgatgtgttctacggcagcaccagctatgcaatcgcaccggcctacggcgtggccttcgccggtagccgcagccgtatcgaaggcggtgcacgcgtgaccgcgctgccggctgcgcagggcgcggtgctgggcagccaggccggattcgcctacgcgatcgactggcgcgactacaacgccgggcgcgcgctggccgcactgcagggcaagggcgtgagcgcacgtgcggcattccagccgttcaccaccgcgaccgcgcagggcgaggtcagcttcgccgccggcagcctggtgattccggtggccgggcaatcgctgcagggcgcagcgctgcttgaggcagtgacgtcggccgcgcgcgaggcgggtgtgcaggtgcacgcattgcccagcggccgcagccgcgaaggcatcgacctcggcagtgacggcgtcaaggcgctgcgcaagcccacggtcgcgctggtgatgggcgagggcgtggccgccaccgagatcggttcggcgtggttcctgctcgaccagcagctgcacctgcctgccagcaagctggacccgcagcagctgggcaaggtgccgctggaccgctacaccacgatcgtgctgtccggcggcacctacaccggcatcgatgccacggcggtggccgcactgaagcgctgggtgcaggccggaggttcactggtgacctacggcagcgcctcgaagtgggcgatcgaacagaagctggccgacggtgagaagctcggaaaggaagaagagactgccgacgagagccgccgtgcgttcggcgaccagcgcgacatcgccgcgatcgagcgggtcagcggcaacatcctcagtgccgacgtggataccagccatccgttggcgttcggcgtgccgcgccggcaactggcgatcaacaaggaaaacacggtgacgctgcagccgagtgcgaacccgttctcgacggtggtacgcatcgacgcgccgccgcgggtgaacggttacttgtccgagcgcaaccgcacgcgggtggcgggcagcgcgtggctgctggtgtcggcgcaggggcagggtaacgtggtgctgttcgccgatgatccggcgcatcgcaagtactggcatggcacggaccggctgctgatcaacgcgatcttcttcgggaatctggtgaatccggcgaaagcgcggggttga

SEQ ID NO: 496751 - DNA, 2640 bp, Stenotrophomonas maltophilia
atgcccaagcactccctgctcgtggcggccctggccgtcgctctggccgcgcctttgtctgccgccgccgaaacctccgccgacgccagtggcgaagccagcaccctggccgccgtgcgtgtcaccggttccaacatcaagcgcaccgataccgaggcctccaacccggtgcaggtgatcggccgccagcagctggaacagaccggcaaggctaccgtggcagatgtgctgcgttcgatctcggccaacaccggcaacgccagcaacgaaaccaccaacaacggctgggcctccggctcggccggcatcggcctgcgcggcctgtcgcagaagaacacgctggtgctgctcaacggccgccgcctggccaactatggtttcccggccggtggcctgtctgacaccttcgtcgatctcaacgcgctgccgctggtcgcggtcgagcgcatcgaagtgctcaaggacggcgcctcggcggtgtacggttccgacgccgtggccggcgtggtcaacatcatcacccggcaaaacttcgaaggcgccgagatcggcggcagcttcggcggtgccgaccagggcggcctgcacgagcagaacctgaagttcgtcggtggcctcggtgatctggacaccgacggctacaacatcctcttcagcctgcagggctacaaccgcgagcgcctggaccaggacgaacgcaacctgaccaagagcggcatctacaccgacaagcccggtggccgctggaacggctggtcggccaagggcgcgcgctacctggtcaacggcgtgtcggtgccgatgctcgacgccaacggcaactgcccggtcggtaccacccgcgtcgccagcgcgccgatcgacggcctggccggcgacacctgcggcttcaaccaggccccgttcaccacgctgatcccctcgaccaagcgctaccaggcctatgccaacggtaccttccgcctgaacgacaacgtcgaagccttcggcgaagtgctgtacagccagatcaagagtgccgcatggttcggcagcagcccgttcttcaccctggagagcggccgcttcgcattgaacgcaaacagtggcctggccgaaccggtgtcgtcgctgctgccggccaacaatccgtacaacccgtacggccgtgcgatcccgatcgaatacaccttcttcgacctcggcggcacgatcaagaccaaccgttccaccgcctatcgcggcgtgttcggcctgcgtggcaccactgcgaactgggactgggaagtggctgcattcggcgcacgcagcagcgagcgtgagagcgtgtccggcggcttcgccaatcgctgggcgctggccgatgcgctggccaccggcagctacaacctgctgaatccggcggccacgccgcagtcggtacgtgattcgatcaacatcgccacgctgcgtccggccgagtccaagctgcagggcgtcgacgccaagatttccggcagcctgggccacacctgggctggcgagatcggcttcgccgccggtgccgagtggcgccgcgagaagctcgattccaacaacccgtggcagatcgatgccggcctgcaggtgcgcccggccatcgccgaagtacatggccagcgccaggtcagtgccgcctacgccgaagtgaacgtgccgctggcctcgaccctggaactgtccgccgccgcgcgtgccgatcactacgatgatttcggcgatgcgttctcgccgaagatcggcctgcgctggcagccgctcgatttcctgctggtgcgtgcctcggcgtcgaagggcttccgtgcaccgtcgctgtcggagaactccaacagcaccagcatcgcctacggcagcgtggccgacccgcgtgatccggacgtgccgggctcgcgccagaatccgaccttcttcaccgttggcaacaacgcactgaagcccgagcgcaccaagagcgtgaacttcggcgtggtgctgtcgccatgggccaacaccaacctcagcgtggactactaccgcatccagctggacaacctggtcggcaccaacaacacccagaccctggtcaacgacaacgtggccggcgccgtgcagcgcgacgagcgcggcaagctgcaggccgtctacaaccgctaccagaacctgagcgagctgaagacctcgggcatcgacgtcgagctgcgccagcgcatcccgaccgctgcgctcggcgacttcaccgtgtcctccgcctacacccacgtgcgcgactaccgtcgcccgaccgtggtcggtggcccgctggtcgactacgccggcagcaacctcggcgcgaccctgcccaaggacaaggccaccaccaccctggactggaaatacggcgacttcaacgccgcggtgacctggtactacaccagcagctaccgccaggaggccagcaccgccgccaaggccgtgcagcagcgcgtcggcagctacagccagtacgacctgtacctggcctacaccggcatcgacaagctgacggtgtacgccaaggtgcagaacctggccgacaagacgccgccgtacgatgcctcgttcccgggcatccgcgcgccgtacgacttcagccagtacgacctgcgcggccgctacttcacgctgggcttcgactaccgcttctga

SEQ ID NO: 496752 - DNA, 363 bp, Stenotrophomonas maltophilia
atggaaatcttcaaagtcttcatgctcgaggcggcgcaccgcctccccaacgtaccgccggggcacaagtgcgcgcgcctgcacggccactcgttccgggtggaactgaaggtcgagggcgagccgggtgcgcagaccggctggatcatggatttcggtgacgtgaaggcggccttccagccgatctacgatcgcctggaccatcactacctcaacgacatccccggtctggagaacccgaccagcgagaacctggcggtgtggatctggaacgagctcaagcccggcctgccggcgctgagcgagatcaccgtgcacgaaacctgcacgtcggggtgccgttaccgcggccccactgcctga

SEQ ID NO: 496753 - DNA, 348 bp, Stenotrophomonas maltophilia
atggccgccgccttcagcgatcgcttcagtgatgccacccgccagctcgccgccgcggcaacgcgtgcgaaccggttggcgttggagaacgcggaaagcatgttcggcgtgcagctgaaggtgatggagcgcaacctgactgcgaccggcggctggctgggtgaactggcccgcggcgaggatgcggccgggacgctctccaagggcgcgcagctgtggcaggacaacctgcagcggctgggccaggcccagcaggacgtggtcggtctcggcctgcaggccagcaaggcttggtccgagctggtgcagggctacaacgaatcaacggcggacgcgaacaaccactga

SEQ ID NO: 496754 - DNA, 1200 bp, Stenotrophomonas maltophilia
atggcaagaatcaaactcaccaagtccgccgtcgatgccgccaagccccaggcgcaggccttcgaactccgggacaccgtggtgcccggcttcctgtgcaagatcaccccggcaggccgcaaggtgttcatgctccagtaccgcacgaacgccggcgagcgccgcaagcccgccctgggccagtacggggaactaaccgtcgagcaggcccgcgtcatggcgcaggagtggctggccgaggttcgccggggcggcgaccctagcgcggccaagaatgccgcccgcaaggcaccgaccatgaaggagtattgcaccaccttcatggaggactactccaagcagcgcaacaagcccagcacgcagcgcggctatcagggggtcatcgaccgctgcatcatcccgatcttgggccggatgaaggtgcaggacgtcaagcgcccggacgtggccgcgctgatgaagaaactggcttacaagccggccgaggcgaaccgcgcctttggcgtgctgcgcaagatgtttaacctggccgaagtgtgggggctgcgcccggacggcaccaatccgtgccgtcacgtcccgatgtttccgcccggcaaggaaacccggctcatcgtggacgatgagctggtgcggatcttccgccacctggaacacttggaggcggaagggttggagaactacgtcatcccgctggcgatccgcctgcaattcgagttcgccgcccgccgctccgaaatctgcccgctcgaatggggctgggttgacctggagaagcgccgcgtcgtctggcgcgacagcaagaccggcggtatctccaagcccatgagcgaggaagcctatcggctgctttcgacggcgccgcgccgggagggctgcccctacgtcctgccgtcgcccaacgacccggcccggcatttgacgcatggagaacactacggcggttggaagcgcgtgctcaaggctgccggcgtgccgcacgtcggcacgcacggcatccgccatcgagcgacgaccgacattgccaactcaggcgtgccaaccaaagtgggcatgaagctcacaggtcacaagaccgtggcgatgtttatgcactacgtacataccgaggacaagccggtgcgagatgccgccgaactggtggcgaatcggcggctggcgattaccggggcgtcccgttctatggaggtgacagcatga

SEQ ID NO: 496755 - DNA, 426 bp, Stenotrophomonas maltophilia
gtggaactgctggatgccgcgcgccaagcagcggcgggcagtgtcaatgcgctgatgacgaccagctattgggagattggccgccggatcgtggaagccgagcagaaaggcaggcggcgggccggttacggcgagcagttgatggcgcggttgtccgccggtctgacggcgcgctttgggcgcgggttcagcccggtcaacctggaaaatatgcggcgcttctttgccgcttacccccttgaggcaatttccgagacgctgtctcggaaatttgacctctccgaactggccctggtcttcacgttgctgtggtcggcctatgtccggctgctggcggtcaaggatgaccatacccgtcggttttacgaggccgaggcgctgcgcggtgcgccagctcgaatggcagatcggcagccacttctatga

SEQ ID NO: 496756 - DNA, 1407 bp, Stenotrophomonas maltophilia
atgtcgccggccgctctggacatcgtcctgctggagccgcacgaggcggccctgcgcttgctgctgcaaagggaaaacggtgccgaggcgtccgcctacgtgctgttcggcaaggctgacatctcggcagacccctggtcgggagtgcctcgcaccagattgatctcgcacgaagtcatccccgtcgcggccgatgaaatggtctccgcatcgcctgtccatgtcacatggtccacccgaggcttcatgcgcattctcggcatcgcgaaagaacggggcttggttgcgggcctggtacacacgcatccgaacgcggcagcgttcttctccgaccaggatgaccgaaacgagtcggagctggcccggacgacgttcaacaagggcgtttccggcctagccagcatggtgttcggccgcgatgacgccatcgcgggcaggctctggactgcccccggcaagacggtcatggcatcctcgatctcgctggtaggaagccagatcaagatcgcgcgcaaggtggctgcggctgacgaagatcaattcctggcgcggcaggccgcgctcttcggccaagggttcaatccagtcgtgcgcgggctgcgggtgggtgtcgtagggggcggcggcacgggcagtgctgtcgcgatgctattggcgcggctgggcgtcggctttctggggctgatggacaaagacaccattgatgtcaccaatctcaaccgcgtgcatggctcgcgcaccgcagatgtggacgccggcttggccaaggtggacatcctcgcgcgcgagattcgcgccgcgggtctcggcacccaggtcgtcaccaaagaggagtgggtcggccatcctgatctgcgcgatctgctgcgctcctgcgacgtgcttttcggctgtaccgacgaccatcaggggcggctgacgctcaaccgcctggcgcactactacggcatcccgctgatcgatgtgggcctgcgcatgcgcgcggcacgcagcggcgcggacttcgacatgacggggcgcgtgtcgacgattgggcccggcaaaccttgtctcatgtgtctgggagtagccgatccgcgccgcgctgcggccgaaggactccggcgcagcgacccggccgagttcgagcggcgtaaggcggaagcctatgtggacggcggcggcgacccggcgcctgcggtggtcacgttcaccacggccatcgcctgcgcggccgtcgatgaactcattcagggactgaccggttttcgcggtcctgcgggcatgtcgcacaacaggattcgccgctttgaccgcgtagaggatcgcaccatgacctgccgacccttggcgtcttgcccggtttgtgccagccaggcgagctggggacgcggcgatgtcaacccatttcttggcgttatcggatga

SEQ ID NO: 496757 - DNA, 930 bp, Stenotrophomonas maltophilia
atgcaaacccaaaccaccagcggtgatgaccgcttcgatgtcgaagatgttgctgcggcgatccgcgaaggccgcagcctgcggccagcggcgctctaccggatagtcgtcctggacgaccagctccacgaacgtcacgtcgatctctccgatccggtgccgaccgggcgccagatccttcaggccgccggatcgcgcccggccgatgagtacagcgtttatgcgattttgacctctggcgagttcgaggacctgcgtctggacgaaacctacgatctgcgcggccgcggtgcggaacgtttcgtcatcttccagactgatcgcgcgttcaagttcacgatcgatgaccggcaactggagtggggcaagcccagcatcagcggccgcgtgctcaaggcgctggccggtgtcccgccagagacctacgacgtctatctcgaagtgcgtggcgggggccaggacattctgatccgcgacggcgacctgatcgatctgggtaagccgggcatcgagcgcttcatcacgctaatccgtgacaccactgaggggctgctcacgctgcccgaagcggaccagcgctatctgagcagccatggcgtggctttcgagatggtgagcgacggtgcgcacacgggcgtcatcttcaagcagttgccgctgccctccggaaagctcaaccacgccacggccgatgtgctcgttctcctgccgccgggctatcccgatgttgcgccggacatgttctattgcgacccgtggctgacgctgcaaagcgttgggcgctacccgacctgcgctgaccaggcccacgcgttccagggccgcagctggcagcgctggtcgcgccacaacacagcgtggcgcccgggcatcgacggcctgcacactatgctcaagcgcatcgagcacgccttggcggaggcgaagtga

SEQ ID NO: 496758 - DNA, 3429 bp, Stenotrophomonas maltophilia
atggacgccaccgaggccgcgcgactggaagcagaacgcctgcaccgtgcgaacgtcgcggccggcggagatccgacccggcctttagtgtttgcgcttcaggaagcctcaaatcgcggcttggatgtgtacgcgctgcgagaaggagacccacagcttaagggaggcaaagccacgttcgactgtcaggctggaggcatcctctacgaggatcgtggatcggacttcgagcgtgcgtttttgattgcacacgaactcggccatgtcgtgctggaaggtggcacactcgacctggtgacggtgtatgtcgagcccgaccgatcgctggaggacgcgccggtgggcgtcgatcgtgtccttgactacggggcgcgcgagcgacgtgaagtgaagatggacctcttcgcgcgcgagttcctgctgccgcgctccgtgttgcgcgacttgcatatctacgacgggctgggatccgacgcgatcgcgacgcgcttcggcgcaccgctcgctgtggtgcagcagcagctcctggatgcactgctgctgccacccgtcggggagccgcaccccgcgggcgtccgcgcggcggcaggtccgctcaccccagaccacacgcaggctcaggcggccgcacataggggcttggcattccagctgcaggcagggccgggcaccggcaagacgcggacgcttgttcgccgcatcgaagtgttgcttgcggatggcgtcgatcccaccacgatcctggtactcactttctccaacaaggcggccaatgaactgtgcgagaggattgctgcgagaaaccctgttgcggcggcagcgatgtggattggcacattccacgcattcggcctggacatcgttcgccgtttccatgaccgactcggactgcccgcagccccgcgtctgatcgaccggacggaggccattgaactcctggaggacgagtttccgcggctcgacctgaagcactatcgcaatctctgggacccagctctggatttgagcgacatgctgagcgcgatctcacgcgccaaggatgaggtcatcgatgctgcgggttatcgcgccctcgcgcagtctatggcgatccaggcgggggccgaccaggacgccgcggtccgcgcgcagaagtgccaggaggtcgccatgctcttcgaggcgtacgaacggctgctgaccgcgcgccatctactggacttcggtgacctgatagcgctgccggtgcgtcttgtcgagggtagcgccgaggtcagggacgcactacgtgctcgccatgagcatgtgctggtagatgaataccaagatgtcaaccgcgcctcggtccggctcctgaaggccatcgtcgacggcggccgcaacctgtgggttgtcggcgatgcacgccagtccatctaccgcttccgcggcgcctccgcgacaaacatcgcacgctttgcgattgatttccccggcgcgcaggccgcgcagcttggcattaactatcgctccgacgagcggatcgtcaatgtgttcaccgagttcgcgcgcggcatgcaagcatccgccggtgcgttgccgctgaacctgcaggccgaacgtggctctacaggagcaggggttgagcttcgcgttgccggatcgcctggcgatgaagtctccgcgattgcagcgtctatcacggccctgcacgagcagggtattgcctatggtgaccaagcggtgctgtgcgcatccaacgcgcgcctgaacgccattgccgaaggccttgaggccaggggcattcccgcgctgcacttgggtagcctgtttgagaggccggaaatcaaggatctgctggcgttgctctcgctggtgaccgacccgcgggcggccgcgatggtgcgcgtggcaaccatggctcggcaccaaatgcccttgaaggatgtcatgcgggtcattgagcggctgcggacgacgaatccagcttcgctggattggttggcaatacacgccggagtggatggcctggcagacggcagtcgagaagcgctctctcgcctgtccgcgctctttgcaggtgtgaacgcatcgaccgacccctggctcttacttgctggatggacgatcgatggtctcggactcgcgaagacgctttatttggctggtgatccgcagagtcgcatgcaatgtctggctgtctggcagttcttgaacttctgtcgccggcagccaagaggccaaggcatgccagtggttcgcctgcttgatcgcgtcaggcggttagttctgctctctgaggatcgtggattgagccagttgccccgcagtgccgagaacatcgaagcagtgcgcctgatgaccatccacggaagcaaggggctggagttcgatgtcgttcatttacctggcatggtaacgtccggcctaccgcgcaacaacgtgccgccgcgttgtcttccgccggacggtctgatccatggttcggagggactgaccggcatcgaggcggtgaaggccggccacgacgaggaagaagagtgcttgttcttcgtagcgctttcgcgagcgcgcgataggctgcagctgtatgcctacgccaggcaggcagatggtcgtacgcgtagcgcctccaagtttatcgccccgatcgaccgactccttgttcgtccggtaccggtgccgttgcaagccggctcgacatcgacgggcacgccgctcgccatcacatggcaagggcgtccccaatggaccgacatccaggtcaacctcttcgagcggtgcccgcgccgcttcttgtacacgcacgtgctgaggcttggaggtcggcgaactgaaaccgcattcatgaagatgcacaacgtcgtgagcgacgtgttcgattggttgaaacgggagcacgagacgacaagtcccacggtcgacgagctggcggcacgcttcgaggaggcctggtgctccaagggtgcgacagagcatggatatgcggaggactaccgccgcatcggcaagcggctcgtcgatttcctcatcgagagccggaatcgtgccgtggccgcgccggcgccaccgatctcgctgggttgggccgagggcgagatcctcgtaaccccggatggtgtagctcacggagccggtggccgggtcacgctgcggcgcgtcatgacgggcaagcagcgctcgaacgccttcgatgatattgagtacacaattctccaactcgccgccgcccaggcttatggaccacatgcgcaggtcgaggtgacctacctcaccagcgaaaccatccagccgatggaaatcacgtcgcgcaagctggaatccaggcgcgagaagctgcagaccttccttcaggcaatgcaggccgggcagttcccctccaagcccgaggctcgtagctgtccgcgctgcccgcacttcttcctctgcggcgagttgcccggaggggggtgggtacaagaaaaactttga

SEQ ID NO: 496759 - DNA, 594 bp, Stenotrophomonas maltophilia
atgagtacgtcaaagcctttcgctgcagacgaggaatctgtgctgatggcgttctccatggagcccaaccatggccgggaaacgcttgaacgctacattagggagtacccgcagcatgcgaccgcgctgatcgactgttcgatcgatctgatttatgaggcgccagaaagcgatgttccggcgaccgaagtgccggacagcgcgattgataaggcctggcagcgattcgagcgggctgtccagcagcccgatgcggaggttgcgaatccgttcaccaagctcaatacgagcagcttcaagtcgctcgcacgcagcctggacgtcagtaatctcttcctcatgcgggtgcgcgatcgggccattcgtactgccaccattcctgcccgattcgtcgagaagcttgcgtcagaactgggtgtcaccgttcaagctgtgaacacatacctgcaggggccaccgggcatggtttccggacacgcttttcggtcaaatgtgaagccgagtgtgggcgagcagatcacgttcgaccaagctgtcgcgacttcacaactcacgccggaacagcaggcgacgctaaaggcattgtcggactga

SEQ ID NO: 496760 - DNA, 780 bp, Stenotrophomonas maltophilia
atgccgaaacccttgagaagcaaggacaaaaacggggagccgttcgcgcgaccaccggagatcgacgcctgtttgcagaggctggagtcgatcgatgccgcgacacgcctgcaggccttcaccgtcgcgtcgaggaagagcgacggctatgtgccgtcggaagcactgacatatttcctgcggcgcgcccatgcgacgggcgcaaaggacgagttcaagcagcttttcggactgctcatgaagcgcgtcgggcagtctctgtttgcatcgatcccggactctcgtatggccggggcacaagacatccgagaagaggtcatgagccgattcgctgagcgaatcgccaaggactgcagcggccgcttcgctatgctggatttctttgaagtgcggttcgacctagcattcgcccggttccgcaagaccgtgctgaggcagattggtccggcctcggtccttacagtgccgctgtccacggatgacgatgagggtcaggacatttcaccggaggtcgaggcagcagcggccgacttcctcggaggcgaccctcaaaaaattgacgacccggctttccggttggagttggacgctgcgattgacgcattaccagacgatcagagacgggtcgttggcttgctacggcaaggcttccagatcgactcgaaggacccgaacatcatgactatcgcgaagatgctccagtgcgatgagagaaccgtgcgcaatcgccgcgaccgtgcctacaagaccctcaggtctgttctgcaggaggacgcatga

SEQ ID NO: 496761 - DNA, 2226 bp, Stenotrophomonas maltophilia
atgagccaaaccaatttcctgatcggtcgtggcgagctactgacccatgacatcgtcggcccgaagcgcatgccaggcaaggccgaggtctacacgttcgcgcaggcgcgggagcgaatggttcctcagttccgcagtgcaagcaaggcgctggacgagctatctgctgacgcttgcccgggcgacttcgcggtagcccggctgatgatgaatcccagcttcatcgcgcgctcgtattttccgacaggactgctgcgtagtacgggactggagtccatcgggagccgtaccgtcaaggtcaagccgcaggcctggacccgcaaggggcagccgcatgaaaccacaacgaccgaactgtttgtcgccggcaagcgccaggctttccgcaacctctcccgatggacggaaaccattgaggcggaatccgacgagggcgaagatcttgcccacatcgagcagtttgccgcctttgcgccagcagagcgaatcgtgggcctcggcggcccgaaggatcgctttttcgaagtaggcctacatctgctaccggatgaagacccgggcctaatccagaaggctttcgtgaagttcgcgcagcgggaaggcgtgaaggtccatagtgaagtcgatttcatcgccggcaatctgtggttcgtgccggtcgagggcaagccgcgcgacattgagcggttggccagcttcgccttcgtgcgggtgatccgtcccgtgccaaagctgcgtggtatccgtcccttgcaacgcagcggtgggccctcagtgggatgcagcctccccaccgaacaggccctttcatccgaacctcgcgtcgccatcctggacggtggcctgcccaagcaccatccgatcggcccctggctgcgctcgtaccgcaagctcgacgaagacgccgacgatgatccggacggtccggagcatggcttgggcgtgacctcggccgtgctgttcggtccgatccagcccaacggtacggccggcaggccgttcgccccggtggaccatctgcgcgtgctggaccaggaagcgggcggcgaagatccattggagttgtatcgcacactcggtctcatcgagcaggttctgctgtcgaggtcctacgagttcatcaacctgagcctgggccccgatctcgaagtggaggaccgggaagtccacgcttggacgtccgttatcgacgagttgctcagcgacggcgacacgctcatgacggtggccgttggcaataacggagaccgggaccgcgagctcggctacaaccgcgtgcaggttccatccgattgcgtgaatgcgctcgcggtcggcgcggccgacgacaccgatgctggttgggcacgcgcgccctacagcgcgatcgggccgggccgcagccctggcgttatcaagccagacctgatggcgttcggtggcaacccagcagccaaatactttcatgtgttggcgccgaacgtgaagccggttctgacgccgcagttgggtaccagcttcgcggctccgtacctgctgcgtagcgcggtcggcgtacgcgcgatcctgggcggagatctgacgccactcgccatcaaggcccttcttgttcacgcggccgatcctggcgagcatgatccggtcgaagtgggttggggcaagattcctgaggacaccctcgacattatcacctgcccggatggtgtggcccgcgtggtctaccagggcgagctcaagcccagtaagtacttgcgtgccagcctgccgctgcccaaggaaggactgctcggcaatgtgcgtctgaaggcgacgttctgctatgcctcacccaccgatccgcaggatgccgcggcctacaccaaggccggcctcgaagtggtcttccggcccaacgacgagaagatcaaggacggcaagagcaacgcggataccaagggcttcttcgacttgaagaagttcgccaccgagcaggagcggcgttcggatcagggcaaatgggaaactgtgctgcacggggccaagaccttccgtggctccagcctcaagaaccccgttttcgacatccactacaacgcccgcgacggcggcggccgggccaccactggtgccgagaagatccgctatgcactgatcctctcggtcgaggccccgaagcatgctgatctctacaacgacatcttgcgtgcctatgccaaaaccctcgtgccgatccagccgcaggtgtccttgccgattcgtgttcggtga

SEQ ID NO: 496762 - DNA, 1155 bp, Stenotrophomonas maltophilia
atgagagaagagcagtcagatttagcccagatggtccgcctggctttggccgagcagagtgaggatgtgcgcctgttcacggcgcggctggtccgcaagtaccgagggacggcgcccgacttggccgagcagctcgaactgttcctgaagtcgaagccagtacgcagtgtctctcccatgcgcaagctgtcgcctcagccgccaacggcccacgccttgccggttgacgacgaatcccgtctttctctcctgaaggtgttcaaggacgaaccgacgagagatgcgccgctgctgtccagcgatgtcgaggattcactggggcaactcatcgccgagcgccggcagagcgatcgacttcaggccatggggctgacgccgacccgctcggccatttttgtggggccgcccggggtcggcaagacactcacggcccgctggctggccgcgcaattgaaggtgccgctgtacgtgctcgacctgacagccgtgatgagcagcctgctgggcaagagcggcaccaacctgcgggcggccatcgatttcgccaaacgcgagccttgcgtgctgctgctggacgaaatcgacgctatcgccaagcgacgcagcgatgacagcgacgtaggcgaactcaagcgcctggtcacggtgatcctgcaagaagtcgacgaatggcctgccagcagtgtattgctggcggccaccaaccacccggaactgatcgatccggcgctgtggcgacgcttcgacctggtggtccagttcaagacgcccgatgaacaggcggtcaaggaagccatcaagcgattccttgggccggactacgccctttttgcccgttggatcgacatcctggtgtttgcattcgccggccattcgttcagcgacatcgagcgcgacgtgcagcgcttccggcgtgccgtggcgctgggcacgaccaccgacgctgatctggtcgaagacttcatgaaggcgcgtgctttggcgctcgataggcagggccgcatcgacctggcagtgatgctggccaagcagacccgcctgtcccagcacactgtttccgacatcaccggggtgagccgggacacgatccgaaagtacaccaatgagacgtctgcggtacgaaaggccgcacaacggagaaaggctgacgcatga

SEQ ID NO: 496763 - DNA, 810 bp, Stenotrophomonas maltophilia
atgaagtcaggggagacggctggacaaggcaacggccatccctatgtgccgaccgcacggcaagcaaagcgcgcaggcccgaagctggaagccgggccggaggcgtcagccgagcggagcgagggaacgatggaagcccgacaggggcgagactcgcgcagcgaggctcgatgcgctacgcgcacgacagcgcgaccggccatcgctcagatggccggggacgcccgaacgcaaagtggcctttacgatgacgccatgcccgagacagaacacgccgattccaacgatcccctggaacacatgctccagcgctcggaggccttgcacgaacggttcaacgaactgcttgacgaccccgagttcgacggctctccacgcggcgcgacagctctgggcatgtgcctagtcgtcaacgaacacgcaacagccttgcatgctattgatggcgctaggcatgccgacatcagccgtcagcctgatgcggctgcagttcaaagcgctgacccgcgcgatgtggctcatctatgcagccccgagacagcgatcgagaaactgtcggccctgctcacacgggaagccgaacaggccgccaagaatttgcccagcgcaaagggcatgatcgatcagatcggcaagcgcgtcggacaggatgcgccggcagcagcccatcagacgcaggtccacttcaagggcatctcctggaacaccatgaactcgtttatgcacggcggcatccatcccctgagacgcaatgccgatgacttccccgtgcatctggcctggaggtgctgcgcaactcgaacggcctga

SEQ ID NO: 496764 - DNA, 1182 bp, Stenotrophomonas maltophilia
gtggtggcgttgacactgttggtgggcggcagcgtgatcgcactggtgggccagcacacggcggcacaggcaggccccgccatcgtgctgagcctgttgctggctgcactgggggccggcctggtgctgtgctgcctgcaggatctggtgctgcggttgccggcgggcgagggcctgcacgggctgctggctgccagctgggggccgcgggtggcgggcgtgttgggcatggccctgctgctggagctggtggcgaccacggcgggcgtggcgcagtccatggccctccatctgcacgcggtgctggccgccgaaggcctccagccctgcgactggctgccggaacaggtcacggcggcggtgggcctgctgatgctgggcgcgctggcattgctgccgccacggcgtgtggtgctggtggcctgcgccctgttgacggtgaagatcggtgcgggggtgttgctgctggcgctggcggcacgtcatgtgcattacgcgcactggatcccctggctgccaccggcgaccgcgccgtatcgcttcgggctgggcggggtgctggcggctgcggtgccgctgctgggggtatttgccagcgtcggcttggcactgggctttcctgcgttgcgccgccagggcgcgatgtggcaaccggcagtgctggcgctggtctcgttgctggcgatgctgctgctgatcgtgctggcagcactgcaggcagggctggtcgagttttccgcgctggccagtacccggccactgtcggtggcgctgcagatgcatccgcaattggagtggatgctgccgttgttgcccctggcgggggctacgggcctggccgcactgcagctggtgctgctgatgctggccttgcggctggcaacatcgctgtggccaggggcgggtgatgcagtgggacgctcccgcggtgtgatcgtggcggcggtcggactgccggcggtgatgctggtgctgtggctgccgttgggcaccctgccggcgctgccgggtccggcaaccctgctggtgatggcggcgctgtgcctggcggtgctgcggcggcggaatgacatgaggcagggcgcaaccggtcgcgaactggtgctgccgatgctggcgcccttggcggccgcgctgtgcgtccttgcggcgttggaacgcctgcgggcatggccgggctga

SEQ ID NO: 496765 - DNA, 1359 bp, Stenotrophomonas maltophilia
atgatccgccgatccctcgctgttgcgctggccactgccctgctgccgttgtccgcccatgccgccgacctgctgcaggtctacgaaatggcgcgcaatggcgatccgcagctgtccgccgccgaatcgacccggctgtatgacaaggaaggcgccgtgcaggcgcgcgccgccctgctgccgcagatcaacggccaggcccagctgaaccgcacgcgcagtgagccgaacgccgacgccaactccggctcgttcaccaacaagcgccgcacctacacgatcgacggcagccagacgctgttcaactggacccagatcaacaacctgcgttcgcagcgcgagctgagcaaggcggcggacttcaccctcgattcggccaacgacagcctgatcgtgcgcacctcggcggcctacttcaacgtgctggtggcgatcgaatcgctgaatgccgcacagaccaatgaagcggccgcgaagaagcagttcgacttcgccgacaagcgcctggaagtgggcctggcgccgatcaccgacgtgcacgaagcacgcgcccagtacgaccaggcgcgtgccaacaccatcgttgcgcagaacaccctggccgataactaccaggccctgaccgaactgaccggccagccggtgaccaacctgcgtgggctgccggccgacttccgcccggaagtgccggccaaccgtggcaacatcgatgagctggtgcagcaggccaccacccagaatccggcgctgaaggcgcaggaactgaaggtcagcgccgccgaggctggcgtgcaggccgcccgtggcggccattacccgaccctgtcgctgggcggcagctggggcaagagcgcgacctggggtgacagcactggttccggttcgctgtcgccggacgcccgcaccaacagcatcggcctgaccctgagcgtgccgatcttctccggtggtgccacccagtccggcgtgcgccaggcgctggcccagcgtgacatcgcccaggacggctacgagcagcagaagcgcgccctggaccgcaacacccgcaatgcctaccagaccctggtacagggcatcagcgaagtggaggcccgtcgcctggccgtggtctcggcacagagcgcgtacgacgcctcgcaggtcggcctggaagtcggtacccgtaccgtgctggacgtgatccagaaccagcgcatcctgttctcggcgcagctggactacgcccaggcccgctacaccttcctgcagaaccgcctgctgctgagccagtcgctgggtgcgctggacgtggcagagctgcaggacgtcaaccgcctgctgacccaggacgcgggcaatccggcaacgaccacgcactga

SEQ ID NO: 496766 - DNA, 648 bp, Stenotrophomonas maltophilia
atgacgattgattacgcccacgcccgcgaactgatggtggaacagcagatccgtccctgggacgtgctggacatcaaggtgctcgacgtcctggcccgcctgccgcgcgaggcttttgtcgccgatgcacaccgggcactggcctacgccgatgtcgaactgccgatcggccatggccagaagatgatgaagccggtcatcgagggccgtaccctgcaggcgctggacttgcagccgggtgacgaagtgctggaaatcggcaccggcagcggcttcctgtcggcctgcatcggcgcgctggcgcgcgacgtgctgagcctggaaatcgacccggagctggccgccgccgcgcgcgcccgtctggatgcttccggcctgggcaccaacgtccgcgtggaagtggccgacgccctgtcctggcagaccgaacgccgctttgacgtgatctgtgtcactggtgcggtcgacgtggtgccgtcacagttcgcttcgtggctgcgtccgggtggtcgcctgttcgtgatccacggccgctcgccggcgatggaggccctgctggtcaaggccgacggcagcagcgagtccctgttcgagaccgatatcgattacctgcgtggtgccgccccggccccccagttccacctctga

SEQ ID NO: 496767 - DNA, 681 bp, Stenotrophomonas maltophilia
atgagttctcacacttcccgcaagccgtcggccaagcccgctgccaaggccgccggacccgggcgccccaaggacctcggcaagcgcgcggcgatccttgaagcagccaagacactgttcatcgaacagggctataccggcgtgagcatggacaccatcgccgctcaggccggcgtctcgaaactgactgtgtacagccacttcggcgacaaggagaccctgttctccgaggccgtgcagtcgaagtgcattgaaatgctgcccgatgccctgttcgtggccgacgcggacggcccgctgcgcgaccagctgatcgggatcggtctggccttcttcgaactgatcacgtccgatgcggcgatctcgatccagcgcatgatgatggcgccggagaccgacgaacgcctgcgcgagctgttctggaaggcaggaccggaacgtacctgcgaggccctggctgacttcctgcgggcacgcgccgagcgcggcgagctggaaatcaccgactattcgctggctggcgagcagttcctgaccttggtcaagggcgaagtgcacatgcatatgatgtgcggcatgccactgtcaccggtggaatgcgaccctgttgcccacgtgactgccagcatcgacttcttcctgcgcgcctatgcgccgcgaggggtcgggacggctgaataa

SEQ ID NO: 496768 - DNA, 1131 bp, Stenotrophomonas maltophilia
atgaagatcgtgcgctggatgggcggtatggtgtggatggctgcgctggcagcctgttcgggacaggaacaggcgccccacgcggccgttccggtgctggtggttcaccctggcgagcaggccgggcaggcgccggcggcgttcccgggcacggtgcgtgcgcggcaggaaagtccactgtcgttccgcgttggcggcaacctggtcaagcgccacgtcgatgccgggcaacgggtgaagaagggcgacgtgctggccgagctggacgtggccgacttcgcgctgcaggcccgcgcctcgcaggcgcagcttgctgcggccgaagccgatctggtgcgtgcccgtgatgacctcaagcgctaccaggtgctggccgaccagcagctggtcagccgctcgcagctggaccagcagtccgccgccttcaaggccgcgcagggccaggccaacgccgcccgcgccaacctcgatgtgctgcgcaaccaggccgactacgcacagctgcgcgcgccgtccgatggcgtgatcgccagccgcgaggccgaagccgggcaggtggtgtcggccggccagaccatcttcaacctggccgccgatggcgggcgcgaagtgctgatcgacctgcccgaggccaccatccgcgactatgcggtgggccagccggtcgaggtggagctgtggaaccgtcctggccagcgcctgccaggcacgatccgcgagatcgccgctgccgccgatccacaggcacgcacctatgcaacccgggtcagcctgcccgccgatgcgctggccgatgtcgaactgggccagagcgcgcgcgtctacagcagcgccggccgccacggcaccctgcagctgccgctcggtgcgctgcagcgcggtgccaacggtgccgccagcgtgtgggtggtcgatccggccaacagcacgctgaaggccgcgtcggtcaccaccggtgcctatggcagcgaatcggtgccggtgctgtccggcgtgaatgcgggtgactgggtggtcgctgccggcggacacctgttgcgtgccggccagccggtgatcgccgtggaccgccagaaccgcccggtgctgaagccggccacgccgaccgctgccgccaaggccaaggagtaa

SEQ ID NO: 496769 - DNA, 3162 bp, Stenotrophomonas maltophilia
gtgcgccgcttcaatctttccgagtgggcgttgtccaaccgcccgctggtgctgttcgcgatgcttgccttcgcgctgatcggcgcatggtcgtacaagcatctgggccagtccgaggatccgccattcaccttcaaggcgatggtggtgcgcacgctttggccgggcgccaccgccgaacaggtctcgcggcaggtgaccgagccgatcgagaaggcgctgatgaacaccggcgagtacgagttcatccgctcctattcgcgccccggcgaatcgcaggtcatcttcatggcgcgcgacagcctgcgttccaggcagatcccggacctgtggtaccaggttcgcaagcgcgtgggcgacatccgtgcgacgctgccgcgcgagattgtcggcccgttcttcaacgatgagttcggcgacacctacgggaacatctatgcgttgaccggcaagggcttcgactacgcggttatgcgcgactacgccgaccgcatccagctggaactgcagcgcgtgcccgatgtcggcaagatcgacctggtcggcctgcaggacgagaaggtgtggatcgaactgtccaacacccggctggcaacgctgggtgtgtcgatgcagcaggtgcagcaggcgctggccgaccagaatgcgatcaccggcaccagcttcttcgagaccgccaccgatcgcgtgcagctgcgcgtgacgggccagttcaacgacatcgacgccatccgccagttcccgatccgtgctggcgaccgcaccgtgcacctgggcgacatcgccgaggtcaagcgtggcttcgccgatccggcgtcgccgaagatgcgcttcatgggcgaagaggcgatcggcctggcggtggcgatgaaggatggcggtgacatcctcaagctgggcgccaacctcgacgccgagttcgagcggctgcagaagaccctgccggctggcatgcagctgcgcaaggtgtccgaccagccgcagtcggtggaggagtcggttggcgagttcgtgcaggtgctgaccgaagcggtggtgatcgtgctgctggtcagtttcttctcgctgggcctgcgcaccggcctggtggtgggcgtgaccattccgctggtgctggcgatgaccttcttcgtcatgcattacttcgacatcggcctgcacaagatttcgctgggcgcactggtgctggcgctgggcctgctggtggacgatgcgatcatcgcggtggagatgatggccaccaagatggagcagggcttcgatcgcctgcgcgcggccagcttcgcctgggaatcgaccgcgttcccgatgctgaccggcacattgatcacggcagccggcttcctgccgatcgccacggcggcatcgagcaccggtgaatacacccgttcgctgttccaggtggtgaccatcgcactggtggtgtcatggatcgcagcggtgctgttcatcccgtacctgggcgacaagatgctgccggacctgttcaatccgcagccgccgaagcccggcagcctgtccgcgcgttggctggccaagcgccagcagtgggccgaccgctatccggcgctggccaacctgatcgcaccgccgcagcatgggcacgaccacgatccctaccagcgcccgttctaccgcagcttccggcgcttcctcgacgcctgcctgcgccgccgctggtgggtgatcgccgcgaccgttgccctgttcgtgttctcactgatgatgttccgcttcgtgccgcagcagttcttcccggactcgacccggccggaactgatggtggacatcgagctggccgagggggcgtcgctgcgctcgacccaggcccaggccgagaagctggagaagctgctgtccagccgcgagggcatcgccaactatgtgtcctacgtgggcaccggttcgccgcgcttctacctgccgctggaccagcagctgccggcgaccaacttcgcccagttcgtggtgctggccaaggacatcaaatcgcgcgaaagcacccgtgactggctgctgcacgaggtgattccgaagttcccggacgtgcagatgcgcgtgacccgcctggagaacggcccgccggtcggttatccggtgcagatgcgcatctccggcgagcacatcgagaaggtgcaggcgatcgcgcgccaggtcgaggccaaggtgcgtgagaacccgcacgtgatgaacgtcaacctggactggagcgagccgagcaaggtggtgcggctggtgatcgaccaggagcgtgcccgcgcgctgggcgtgagcagcgcccaggtcagccagttcctggccagttcgctggccggccagtcggtgagcgtgtatcgcgaaggcaaccgccagatcgagatgctgctgcgcggaccggccgatgagcgcaaccagctggagctgctgtccagcctgtcgatgccgaccgccaacggcggcagcatcacgctgtcgcaggtggcgacgatggagtacggcttcgaggacggcatcatctggcaccgcaaccggttgccgaccgtgaccgtgcgcgccgacatcagcgatggcatgcaggcgctggacgtggtgcaccagatcgtgcccacgctggatggcatccgtgccgagctgcccagcggctacctgctggagaccggcggcaccgtggaggactcggcgcgcggccagaactcgatcaaggccggcatgccgctgttcctggtggtggtggcgacgctgctgatgctgcagctgcgcagcttctcgcgtgcggcgatggtgctggtgaccgcgccgctgggcatcatcggtgcgaccctgttcctgctgctgttccgtgcgccgttcggcttcgtcgcgctgctgggcacgatcgcactggccggcatgatcatgcgcaactcggtgatcctgatcgaccagatccagcaggacatcgatgccgggcatgatcgctggcattcgatcatcgatgccacggtgcgccgcttccgcccgatcgtgctgaccgcgctggcggccgtgctggcgatgattccgctgtcgcgcagcgcgttctatggctcgatggcgatctcgatcatgggtggtctgatcgtgggtacggtgctgacgctggtgttcctgccggcgttgtacgcggcgtggttccgggtgaagccggacgaatccggggcgtaa

SEQ ID NO: 496770 - DNA, 906 bp, Stenotrophomonas maltophilia
atggaccggatcgatcgcttccgcattttcacccgggtcgtggagtgcgcgagcttcacccgcgccgccgaccagctcggcctgccccgctcgaccgtctcggcggcgattgccgagctggaacagcggcttggcacccgcctgctgcagcgctcgacccgacgggtatccaccacccatgacggcgacgtgttccatgcccgctgcctgcgcctgatcgcggaggttgaagacgccgagtcgctgttccggcaggacgacgcgcaaccggccggtttgctgaagatcgacgtacccagccgcatcggccgtcgcatcatcgccccggcgttgccggatttcttcgcgcgctatccacagctggaagtggacctgggcatgaccgaccgcgcggtgaacctgatcgaagacggctgcgatgcggtgctgcgggtcggccagctgggcgattccagcctcgtggcccgcacgctgggccagctcgacttcgtcaacgtggccgcgccggcctacctgcgcgagcacggtgttccgcagcatcctgccgacctgccgcagcaccgcgcggtgaactatgcgtcgccgaccacggcacgggtggaaccgtgggaatggcaggatggcggccagctgcgcacgctgccgatgcccggctgggtacgcgtgaacagcgccgaggcctcgatcgcgtgctgcgtggcgggattggggcttttgcagattccgcgctacgacgtgcaggccgagctgcagtcaggcgcattggtggaggtgatgccgcagtacgcggcgcagccgctgccggtgaccctgctgcaaccgcatcggcaacaccgtgcactgcgcgtgcaggtgttcgtcgagtggctgctgccagtgctgcggatcggcctgcagctgcagtag

SEQ ID NO: 496771 - DNA, 774 bp, Stenotrophomonas maltophilia
atgaccgagcattccctcaagggcaagaccgtgctgatcgccggtggcgccaagaacctgggcggcctgatcgcccgcgacttcgccgcacagggcgccaaagccatcgtcatccactacaacagtgccgctacccaggccgatgcagaggcaaccgttgccgccgtgcaggcggccggcagcaaggcggtggccctgcagggcgacctgacctcggcggcagcgatggagcgcttgttcgccgatgccgtggccgcagccggccgtcccgacatcgccatcaatacggtcggcaaggtattgaagaagccgctgctggagatcagcgaagccgagtacgacgagatgagcgcggtcaacgccaaggccgcattcttcttcctcaaggaggccggccgccaggtcaacgacggcggtcgcatctgcaccctggtcacctcactgctgggtgcgttcacgccgttctattccagctatgccggcaccaaggcgccggtcgagcatttcacccgcgcggcgtcaaaggagttcggtgagcgcggcatctcggtgactgcgatcgggccgggcccgatggacacgccgttcttctacccggccgagagtgccgatgcacaggcgtaccacaagaccgcggccgcgctctcggcgttcacccgtaccggcctgaccgacatcgccgacatcgtgccgtggatccgcttcctggtcaccgatggctggtggatgaccgggcagaccatcctggtcaatggtgggtacaccaccaaataa

SEQ ID NO: 496772 - DNA, 1062 bp, Stenotrophomonas maltophilia
atgcacgctgaaattgttgtcctgcccggtgatggcatcggcccggaggtggccgccgcggcagtcgccgtcctgaaggccgtcgccgaacgcttcaaccacagcttcaccttcagcgagcacgacatcggtggcatcgccatcgaccgccacggcgaaccgctgccggcgtcgaccctggccgcctgccaggccgccagcgcggtgctgctgggcgcagtcggtggcccgaagtggtccgacccgaacgccaaggtgcgtccggaacagggcctgctggcgatccgcaaggcgctgggcctgtacgccaacctgcgcccggtgcgcacccatgaggccgcgctgcacgcctcgccgatcaaggccgagctgctgcagggtgtggacttcgtggtggtgcgcgaactgaccggcggcatctacttcggcgacaagacccgcgatgccgacagtgccagcgacctgtgccgctacaccgtggccgagatcgagcgcgtgctgcgcagtgccttccgcctggcccggcagcggcgtggcagggtcacctcggtggacaaggccaacgtgttggaaacctcgcgcctgtggcgcgacgtggccgcgcgcatcggccgcgaggaattcccggaggtggcgctggagcaccagctggtcgattcgatggcgatgcacctgctggccaagccgcgcgagtacgacgtgatcgtcaccgagaacatgttcggcgacatcctcaccgacgaagcctcgatgctggccggctcgctcggcctgctgccctcggcctcgctgggtgaaccgggtgcggtcggcatctacgaaccgatccacggttcggccccggacatcgccggcaagggcatcgccaatccctacgcgacgatcttcagcgcggcgatgctgctgcgccattcgctggggctggaagacgaagccgcagcagtggaagcggcggtgcacgcggtgctggatgatggggtgttcactgccgacctggccgccaagggccaggccgtgagtaccgccgccgccacggatgcggtgctggccaaactcaactga

SEQ ID NO: 496773 - DNA, 579 bp, Stenotrophomonas maltophilia
atggccggtttccgtaccttgacctcggccagcgtggtgctgcgccagaccaacatcgacaccgaccagatcatcccggcgcggttcctgtccaccaccgaacgcgccggcctgggccgcaacgccttcaatgactggcgctggcaggccgacggttcaccggtggccgacttcgccttcaaccagccgcacaacgccggccgcagcatcctgctggcgggtcgcaacttcggctgcggctcgtcgcgcgaacatgcaccgtgggcgctgaccgacctgggcctgcgcgccatcgtcagcagcgagatcgccgacatcttccgcggcaactcgctgaagaacggcctgctgccgatcgtgctggacgaggccgacgtgcaggcgctgatgcagcgcccggatgatgagctgaccatcgacgtggccgcgcgcgaactgcgcacgccggacggccgcgtctattccttcccgctggacggcttctcgcagacctgcctgctggaaggtgtcgaccagttggggtatctgttgggccgtgtccctgaaatcgaacgttacgagagtgagcatgcacgctga

SEQ ID NO: 496774 - DNA, 1419 bp, Stenotrophomonas maltophilia
atgacttccgcaccccgcaccctgtacgacaaactgtgggacgcccacgtggtggttcccgaatccgacagcgcgcccgccgtgctgtacatcgacctgcacctgatccacgaggtgacctcgccgcaggccttcaccgaactgcgcgaacgcggcctgtcgccgcgccggccggaccgcaccaaggcgacgatggaccactccacgccgaccctgccggccgccgcggacggcacgctgccctatgccagcgccgcctccgaggcacaggtcgccacgctggcgcgcaactgcgccgagcacggcatcgagctgttcgacatggcctcggacaaccgcggcatcgtccacgtgatcgcgcccgagcagggcttcacccagccgggcatgaccatcgtctgcggcgacagccacacctccacccacggtgccttcggttcgctggcgttcggcatcggcaccagcgaggtcggccacgtgctggccacgcaatgcctgctgcagcgcaaggcgaagacgctggcgatcaccgtcgatgggccgctggcgccgggtgtcggcgccaaggacgtggttctgcacatcatcggcgtgatcggcgtcaatggcggcaccggccacgtgatcgagttccgcggcagcaccatcgaagcgatggacatggaacagcgcatgaccctgtgcaacatgtcgatcgaagcgggtgcgcgtgccggtatggtggcgccggaccaggtcaccttcgacttcgtcgccaacaccccgcgcggcccaaagggcgccgatttcgaggctgcggtggcgcgctggcagcagctgcgcagtgatgacggcgcgcacttcgacagcgaagtgcacatcgacgccgccgatatccgcccgaccctgacctggggcacccacccgggtaccgccatcgcggtggatgcgccgatcccggccgccaacgatgccgccgcacagaagggcctggactacatgcatttccaggccggaaaggcgctggccggaacgccggtggacgtggtgttcgtcggttcctgcaccaacggccgcctgagtgacatgcgtgaggtggcgcaggtgctgcgcggtcgtcgcgtcgccgaccgggtgcgcatgctggtggtgccgggctcggagatcgtcaagcgagaggccgaggccgaaggcatccatgagatcgtgcgcgcggccggtgccgagtggcgcgagccgggctgctcgatgtgcatcgccatgaatggtgatctggtcgcgcccgggcagctggccgtgagcaccagcaaccgtaatttcgaaggccgccagggtcccggttcgcgcaccctgctggcctcaccgatgagcgcggcgtgggccgcggtgaacgggcatgtcgccgacacccgcgagctgttcgcacaggaggtggcgtga

SEQ ID NO: 496775 - DNA, 780 bp, Stenotrophomonas maltophilia
atgagcgccttcgacacccccaccccggccagcgccgctggccagcagtggaacgcccaggactatgcgatcgatgccggcttcgtgccgctgctcggcggtgcggtatcgcgcctgctcgacccgcgcgccggtgagcgcatcctcgacctgggctgtggcgatggcgtactcagcaccgaactggccctgagcggtgcgcgcatccacggcgtggatgcctcgccggaactggtgatcgccgcccgtgcgcgcggcgtcgacgcccagctgatggacggccacgcactgtcgttcgacagcgagttcgatgcggtgttcagcaatgcggcactgcattggatgacgactccggaccgcgtgctggaaggcgtgcgccgcgccctgcgccccggtggccgcttcgtcgccgagttcggcggccacggcaacgtggccacgatcgtcgcggccgtgcaggccgcgcgcgtggcccacgggcatggcgccagcaccttccggtggtacttcccgacggccgacgcctacgccgatcgcctgcgccagcatggcttccaggtgcaactgatcgagtgcacgccgcgcccgaccgcactgccgaccggcgtggccggctggctgcgggtattcgccgcaccgctgctggacgacctgccggccgaggcccgcgccaccgtgcgcgaggcggccaccgcactgctggccgagctgccgcgtgacgcatctggccagccgctggccgactacgtccgcctgcgtgtgctcgcccgccgtcgctga

SEQ ID NO: 496776 - DNA, 1587 bp, Stenotrophomonas maltophilia
gtgaccaccatcgaacgaattaccaccccgcgcatccgcatcttcgacaccaccctgcgtgacggcgagcagtcccccggctgcagcatgagcccgccgcagaagctggtgatggcgcgtgcgctggacgaactgggcgtggacatcatcgagaccggcttcccggccagctcgcaatccgaccgcgaggcgatggcgctgatcggccgcgaactgcgccgcccgagcctgagcctggcggtgctgtcgcgctgcctgcaggccgatatcgagacctccgcacgtgcactggaagcggcagccaacccgcgcctgcacgtgttcctgtcgaccagcccgctgcaccgcgagcacaagctgcggatgacccgcgagcaggtgctggagtcggtacgcaagcacgtctcgttggcccgttcctacatcgacgacgtcgagttctcggccgaggatgccacccgcaccgagctggactacctgatcgaggtttcgcgcgtggcgattgccgccggcgccaccaccatcaacctgcccgacaccgtcggcttcaccacgccggaagaaatccgcgcgatgttccagcaggtcatcgccggcgtcgccgacgtgccgaacgcggccaacgtgatcttcagcgcgcactgccacaacgacctgggcctggcggtggccaactcgctggccgccatcgaaggcggtgcacgccaggtcgagtgcaccatcaacggcatcggcgagcgcgccggcaactgttcgctggaagagatcgcgatggtgctgaaggtccgccaggccttctacgaacaggacagttcgatcaacaccccacgcatcgtcggcacttcgcagctgctgcagcgtctggtcggcatgccggtacagcgcaacaaggccatcgtcggtgccaacgcgttcgcccatgaatcgggcatccaccagcacggcatgctgcgccatcgcggcacctacgaaatcatgcgtccggaagacgtgggctgggaagattcgcagatggtgctgggccgccacagtggccgcgccgccgtcgaagcgcgcctgcgtgcgttgggcttctggctggacgaagacgaactgaagctggtgttcgagcagttcaagggcctgtgcgaacagcagcgcgtggtcaccgatgccgacctgcagacgttgatgcagggcggctccagcgcgcagggttaccgcctggcctcgatgaccatcagcgacgtcggcagccgcgccaacgcgctggtcgaactgtccgacccggatggcaaccgcgtggccgagaccgcgcagggcgacggcccggtcgatgcgctgttcggcgcgctgtcggccgccaccggcgtgcagctgatgctggacagctatcacgtgcacagcgtcggcatcggcgccgatgcgcgcggtgaagccaacctcagtgtgcgccatgacggcgtggagtacgacggcaccggcaccagcaaagacatcatcgaagcctccgcgctggcctggctggatgtggccaaccgcctgctgcgccagcgtcaggccgccgtccacagcagcgccgacgttcccgcttccgccaccgcctga

SEQ ID NO: 496777 - DNA, 1092 bp, Stenotrophomonas maltophilia
atgccggccgctgatgccagccaggaaagcgatgtcggcgacgtaagcgtcgccgacgtactggcggcgcaggcccggctgcgccgcttcctgccgcctaccccgctgcaccatgccgagcgcttcggcacctggctgaagctggagaacctgcagcgcaccgggtcctacaaggtacgcggcgcgttgaacgcgctgctggccggccgcgagcgcggcgatacccggccggtgatctgcgcctcggccggcaaccatgcccagggcgtggcatgggcggcctaccgcctggacgtgccggccatcaccgtgatgccgcatggcgcaccggccaccaagatcgccggcgtcgcccactggggcgcgaccgttcgccagcacggcaccagctacgacgaggcctacgccttcgcggtcgaactggcacagcgacacggctaccgcttcctgtccgcgttcgacgacgccgatgtgatcgcgggccagggcacggtcggcatcgagctggccgcacacgcgccggacgtggtgatcgtgccgatcggcggcggtggactggcctccggcgttgcactggcgctgaaatcgcagggcgtgcgcgtgattggcgcgcaggtggaaggcgtcgattcgatggcacgtgcgatccgcggcgacgtgcgcgagatcgccccggttgcctctctggccgacggcgtgcgggtgaagattcccggcttcctgacccgccgcctgtgcacctcgctgctggacgatgtggtgatcgtgcgcgaggccgaactgcgcgaaacgctggtccggcttgcgctggaggaacacatcatcgccgagggcgcgggcgcgttggcgctggcggccggccgccgcgtcgccggccgccgcaagtgtgcggtggtgtccggcggcaacatcgatgccggtgtcctggccggcctgctcaccgacatccgtccgcgcccgccacgcaaaccgcggcgacggcgcagcgaaaccccgcgctcgccgaccaaggccagcgccctcgcctcccccgcctcttccccttcccccctgcaagccgtcgcacccgctgtcgaggagatttccctgtga

SEQ ID NO: 496778 - DNA, 252 bp, Stenotrophomonas maltophilia
atgcaataccggcttgacctggtgctgcacccggccgaaggcgcgctgctgcgcgtgatcggcatggccgaacgccggggcttcgcaccgcgcgcgatcagcggtgcgccggtggccgccgacgatggccgctggcacctgcagctggtggtggatggccagcgcccggcggaaacgctgtgccggcagatcgagaagatctacgactgcgtgtccgtgcaggtcactgccgtggaaggagcatccgtatga

SEQ ID NO: 496779 - DNA, 1737 bp, Stenotrophomonas maltophilia
atgaactcttccacacaccgcagcgcgccgcccaacggcgcgcgctggctgacccaggcgctggaagccgaaggcatccgcacgctgttcggctatcccggcggcaccatcatgccgttctacgacgcgctggtggattcgtcgctgaagcacatcctggtgcgccacgagcagggtgccgcactggcggcgaatggattcgcccgcgccagcggccaggtcggcgtctgcgtggccacctccggcccgggcgcctccaacctggtcaccggcattgccgatgcgatgctggattcggtgccgatggtctgcatcaccggccaggtcgccacgccgctgctgggtactgacgctttccaggaactggatgtgttcggcctgaccatgccgatcgtcaagcacagctggctggtgcgcagcgtcgacgacctgccgcgcgtggtcgccgatgccttccgcgtcgcccgcgagggccggcccggcccggtgctgatcgacctgcccaaggacgtgcagctggccgatgccagccacctgccggcgcacgtgccgagcagcgtcgagccgccacctgcgccggccgaagcggccatcgccgaagccattgccgcactggcagccgccgagaagccggtggtctacgccggtggcggcatcgcgctgggcgatgcggtgcaggacctgcgcgacttcgtcgaagccagcgccatccccaccgtgatgaccctgcgtggcctgggcgcgctgccggccagccatccgcagtcactgggcatgctgggcatgcacggtacccgcgcggccaacatggcggtgcaggaaagcgacctgctgctggtgctgggtgcacgcttcgacgaccgcgccaccggcaagctggccgagttcgcaccgttcgcccgcgtcgtccatatcgatgccgacgcctacgagatctccaagctgcgcagcgccgatgtcgccgtgcctggcaacgtcggccatgccatccgtgccctgcgtgcggccttcccctcccccaaggcccatcaggacgcgtggcgcaggcgttgcgcgcagcaccgcgaccgcttctcggcacgctacgacgcaccgggccagcacatctacgccccggcgctgctgaagcgcctgagcgagctggccccggccgatgcggtgatcgcctgcgatgtcggccagcaccagatgtgggtggcgcagcactgccgcttcaaccacccgcgcaaccacctgaccagtggcgcgctgggcaccatgggcttcggcctgccggcggcgatgggtgcgcagttcgcatgcccggagcgcaccgtggtgctggtgtccggcgacggcagcttcatgatgaacgtgcaggagctggcgaccatcgcgcgttgccgcctgccggtgaagatcgtgctgctggacaacagttcgctgggcatggtgcggcagtggcaggaactgttcttcgccgagcgctacagcgagatcgacctgtccgacaacccggacttcgtggcgctggcacaggtgttcggcatcgccgccacccgcatcgacaaccgcgatgacgtggaaggcggcctggccgcgctgctggccgaaccgggcccggccctgctgcacgtggccatcgatgcacgtgccaacgtgtggccactggtgccgccgaacaccgccaacagcacgatgctggaaagcaaccctgcccatgcccgccaggagacccccaatgcaataccggcttga

SEQ ID NO: 496780 - DNA, 975 bp, Stenotrophomonas maltophilia
atgagcaccaacgacctgccccagaccaagatcgccgtcatcggctacggcagccagggccgcgcccacgcactgaacctgcgcgaatccggcttcgacgtggtggtaggcctgcgtccgggcggcccgaccgaagtcaaggcacaggccgacggcttcaccgtgaaagcaccggccgacgcggtgaaggatgcggacctggtcgccgtgctgaccccggacatggtgcagaagaagctctacgacgacgtgctggcgccgaacatgaagcagggtgcggtgctgctgttcgcgcacggcctgaacgtgcacttcgacatgatcaggccgcgcgacgacctggacgtggtgctggttgcgcccaagggcccgggcgcgctggtgcgccgcgagtacgagatcggccgtggcgtgccctgcatctgggcggtctaccaggacaagagcggcaaggcggccgagtacgcactggcctatgcggccggcctcggcggtgcacgcgccaacctgatccagaccaccttcaaggaagagaccgagaccgacctgttcggcgagcaggcggtgctgtgcggcggtgcctcggcgctggtgcaggccggtttcgaaaccctggtcgaagctggctaccagccggagatcgcctattacgaagtgctgcacgagctgaagctgatcgtcgacctgttctatgaaggcggtatctcgcgcatgctggaattcatctccgagaccgcgcagtacggcgactacgtcagcggcccgcgggtgatcgacgccggcaccaaggcgcgcatgaaggaggtgctgaaggacatccaggacggcaccttcaccaagaactgggtggccgagtacgaagcgggcctgccgaactacaaccggttcaagcaggccgacctggagcacccgatcgagaaggtgggcaaggaactgcgcgccaagatggtctggttgcaaggacaggccgcgtaa

SEQ ID NO: 496781 - DNA, 1794 bp, Stenotrophomonas maltophilia
atgacctctgcccgataccccaggatggccgcagcggcgaagatcgggggaccacccttccatcggaacccgaccgtgtcccgacgccttgcccgttccctgctggccgccgctgtactggccgctgtgcccgcactgtcttcggccgccgaccgcatcaccggccacacctttgccacccgttcggaggtgatcgccccgcatgcgatggccgctacctcgcagccgctggccacccagattgcgctggacgtgatgaaggggggcggttcggcggtggacgcggcgattgccgccaacgccgcgcttggcctgatggagccgaccggcaatggcatcggcggcgacctgttcgccatcgtctgggacccgaagacgcagaagctctacggctacaacggttcggggcgctcgccgaagtcgctgaccctggccgagttccagcgacgtggcctgaaggacatcccggctaccggcccgctgccggtctccgtgcccggcgcggtcgacggctggttcgcgctgcacgaccgcttcggccgcaagccgatggccgacaacctggcgccggccatccgctacgcgcgcgagggccatcccgtcgccgaggtgatcgcctactactgggaccgctcggtgcccaagctgtcgcagtacccgggcttcaaggagcaattcacgatcaacggccacgccccgcgcaagggcgagatgtggaagaacccgaacctggccagcaccctgcagcagattgccgacggcggacgcgatgccttctacaagggcgccattgcccacaccatcggcgactacttcaaggccaatggtggctacctgagctaccaggacatggccgagcaccacggtgaatgggtcgagccggtcagcagcaactaccgtggctacgacgtgtgggagctgccgccgaacagccagggcatcgccgccctgcagatcctcaacgtgctggaaggctacgatttctcgaagatcccgttcggttcacccgagcacgtgcacctgttcgtcgaagcgaagaagctggccttcgccgaccgtgcgcgcttctatgccgacatggccttccagccggcgccggtgcagaagctgatctccaaggaatacgccgcgcagcgccgcgcgctgatctcgatggacaaggcgttgaaggaagtgcagccgggcacgccgaagcagctggaagaaggcgacacgatctacatgaccgtggccgacgccgacggcatgatggtgtcgttgatccagtccaactaccgcggcatgggcagcggcatggcgccgccggggctgggcttcatcctgcaggatcgtggcgagatgttcgtgctgcagaagaaccatcccaacggctatgcaccgggcaagcggccgttccagacgatcatcccggcgttcatcaccaagggcggcaagccgtacgccagcttcggcgtgatgggcggcgcgatgcagccgcagggccacgcgcagattgtgatgaacctggtggatttcggcatgaacctgcaggaagccggtgacgcaccgcgcatccagcacgagggctcgaccgaaccgaccggacaggccacggcgatgaccgacggtggtgaagtgaatctggaaaccggcttcccctatgaaaccgtgcgtgcgttgatgcgcaaggggcatcgcatcgtgttcgccgatgggccttatggcgggtaccaggcgatcatgcgcgaccccgagagcggggtttattacggagcttcggagagtcgcaaggatgggcaggcggcggggtattga

SEQ ID NO: 496782 - DNA, 612 bp, Stenotrophomonas maltophilia
atgagccgctatgtggttggcctgaccggcggcattgccgccggcaagagcgaggcgacccggcgcttcgaggcgctgggcatcgtggtggccgacgccgacctggccgcccgcgcggtggttgccgccggcagcccggccctggaccgtatcgccgagcgcttcggcgccggcatgctgcaggcggacggtagcttggaccgggcacgcctgcgggcccacgtgttcgccgacccgaccgaacgggcggcgctggaagcgatcacccacccggccatccgcctgctgatgcaacagcaatgcgcgcaggccgccagcccctatgcgattgccgccattccgctgctgaccgaggtcggtgggcggcaggcctacccgtggttggaccgggtattgctggtggatgcgcccgaagccgtgcagcacgcccggctgatgcagcgcgacggcatcgacgccgcgctggccgacaagatgatcgccgcccaggccagccgcgcgcagcggttggcactggccgatgatgtagtggtcaacgatggccacccggaagacctgcaggcgcaggtggaagcgctgcatgcgcggtatctggggttggctgggggctga

SEQ ID NO: 496783 - DNA, 864 bp, Stenotrophomonas maltophilia
atggcatttctcgaccagcatcccggcctcggctaccccgccgcggccgccctggggctgctgctgggcagtttcctcaacgtcgtcatcctgcgcctgcccaagcggctggagtggcagtggaagcgcgatgcgcgcgaggtcctggaagaaccggacttctacgagcccccaccaccggggatcgtggtcgagccctcgcactgcccgcactgcaagcacaagctgagctggtacgagaacatcccgctgttcagctggatcatccagggcggcaagtgccgccactgcaaggcgccgatctcgctgcagtacccgctggtcgaggccctgacctcggtgctggtgctggcctgcgtctggcagttcggcttcggctggcagggcttcggcgccatcgtgctgacctgcttcctgatcgccttgtccggcatcgacctgcgcacccagctgctgcctgaccagttgaccctgccactgatgtggctgggcctgataggcaacatcgacaacctgtacatgccggccaagcctgccttggtcggcgcggcggtgggctatctgtcgctatggatggtctggtggctgttcaagcagctgaccggcaaggaaggcatgggccacggcgatttcaagctgctggccgcgctcggcgcctggtgcgggttgaagggcatcctgcccatcatcctgctgtcgtcggtgctgggcgccatcatcggctcgatctggctgtacacccggggccgtgaccgcgccacgccgatcccgttcggcccctacctggccatcgcgggctggctgtacttcatgtggggcgcgcccgtggtggagcagtacctggtgttgagcggactgcgctga

SEQ ID NO: 496784 - DNA, 1257 bp, Stenotrophomonas maltophilia
atgtctgtcagtcgcagtgcgatcaagaaggagcccgtggcgcgcagcaccacggacctgcagccgtttgtctgggaggggacggacaagcggggtgtgaagatgaaaggggagcaggccgcgaaaaacgcgaatctgctgcgggccgagctgcgccgccaaggcatcaccccgggcacggtcaagccaaagcccaagccactgttcggcgcagccggcagcaagatttcgccgaaggacattgcattcttcagccgccagatggcgacgatgatgaagtccggtgtgccgatcgtctcagcgctggacatcatcgccagcgggcacaagaacccgcgcatgaagaagatggtggacggcatccgcaccgatatcgagggcggatcgtcccttcatgaggcaatcagcaagtatccggtgcagttcgacgagctctatcgcaacctggtgcgtgcaggtgaaggcgccggtgtattggagacggtgcttgataccgtggccaactacaaagagaacatcgaagccctgaagggcaagataaaaaaggctctgttttaccctgcaatggtcattgcggtagcgctcttggtcagctcgatcctgctgatctgggtggttccgcaatttgaggacgtcttcaggggatttggcgctgatctgccagcatttactcagatgatcgtagccgcatcccggttcatggtctcttggtggtggctgatcgcgatcatcgtcatcggcagcatcgtaggtttcaccatggcctacaaacgctcgccgaagatgcagcacgggatggatcgcttgatcctgaaagtgccagtcattggccagatcatgcataacagctcgattgcccgctttgcccgcacgaccgctgtgactttcaaggctggcgtaccgctggtagaagccttgggcattgttgcaggcgctaccggcaatacggtttacgagcatgccgtattgcgcatgcgcgatgacgtctcggtcggttacccggtcaacatggccatgaagcagaccgccctgttcccacacatggtcatccagatgacgggtatcggtgaagaggcgggcgccctggacgccatgctgttcaaggtggccgagtactatgagcaggaggtcaacaatgccgttgatgccttgagcagcctgctcgagccgatgatcatggtgttcattggtatcatcgtcggcggcctggtcattggcatgtacctccccatcttcaaattggcatcggtggtctga

SEQ ID NO: 496785 - DNA, 438 bp, Stenotrophomonas maltophilia
atgaagaaccagaagggcttcacccttatcgaactgatgatcgttgttgcgatcatcgccatcctggctgccatcgcgctgccggcttaccaggactatgtggcacgctcgcaggtttccgaagcgatgaccctgagctcgggtgccaagaccgctgttaccgagtactacgccgacaagggcgccttcccgaccaccaatgcaatggccggccttgctggcgcgtcgtcgatcaacggcaagtacgtggccagcgtgaccgttggtgccaacggcgtgattaccgccaagatgaagggctcgggctcggtgagctccaaggtcgccggtcgcgactttgcgctggtcccggcagacgctggcggctcgatcacctgggactgcaagggctccgccacgaccatcgacgccaagtaccgtccgtcgtcctgccgctaa

SEQ ID NO: 496786 - DNA, 1926 bp, Stenotrophomonas maltophilia
atgcgaagtgtgcctgctcagcgactgctgcctctggtgggtcttgtcctgctggcgctgctgggtgtgggcgtctactggaatggcttgaatggggggttcatctttgatgactttcccaatctggtggacgatccggattggcgcttgacctcgatggactttacttccatcgcgcaggtcatgggcaatggggtcacgggcgacgtgggccgtccattggcaattctcagtttcggcctgaattactactttactggcttggcgccttggccgatgaaggcgaccggcttggctctacacctcctgaattcagtgctggtgttcgccctggcgtccatgctgatcaggcgagtgctcagcatttcgtggtcacaggtgcgcttgacggccttcatggtcgccaccgcgtggatggttcatccattgcaggtgtctaccgtcctttatgtcgtgcagcgcatggaaataggaggggcgacgggagtcctgatcgcgcttctctgctatctcaaggcgcgcggcagcgctccctggtcccgggcgtcgttgctctggtggtgctgtgcggtgttcggagccgggattggcctgggcttcaaagagaccgcgatactcattccagcttacacactcttgatcgaggtgtttctcctcaagttccggaatccggatggaacacgcgcgcgcgcaatttccctcctatatgcctttggagcgataggggcgatctttctatatttcgcagtgattctgcctggcgccctggcgccggaacgctactcggcacgtgatttcagcttggcaggccggttgtactcgcaaccggcgattctgctgaactaccttcagcagatcatgcttccctggcccgagtcgttgaagttctattacgacaatgcacaggtcccgccatcctggcgttcaactactttcatagtcccgatgctggcgctggtcgcgctgtcgacagcggcttgggggctgcgcaagcgctggcccctgacggcacttggcatcggatggttctttgccagccatttgctgaccagtaacgttgtgccgctggagttggcatttgaacatcggaactacctggcaatcgtgggtatcgctcttgccctggtgcaaccactggccgcggtgatgcagaggtggaccgttgaggcacgccgtacggtagggggagtcctgctgctttttgttgcggccatggggtggatccaggtgcagacgtgggcagatccaatgcgccttgctctcacgttgtccaaccgtaatcctgattcttcgcgggccggttatgaacttggacgagcactgctggcatcggcccccgccgatcctgcctccccggcctgggcgctggctgagaaggagttcacgcatgcggcctcattgcccggtagttcgccacttcccgagcaggcactgatcattctcaagtcgcatcaagggcgggcgcagccccgggagatatggggttcacttgagcggaagatatccaggcggtcattgggaccacaggaagtcggggcgcttgaagcgatcgtcgcatgccgggttgagggggggtgcaggccagttgaagagcaggcactgtttgctctgttgtcgaccgcaactgcagagaatcctcgatcgtcgagggtccgggtagtgttctccaactacgccttcaacgtgatgaaagatccgtctctagcgatgaggctcattcgtgaggccgtgcagatctcgccggaggacctgggatgccggctttggttgctgaggatgggattggcatcgaacttgcttcaggtcagtgaggctaggcaaggattggggatcctgcgagccgtcaatcatcgccatgcatatgaccgggacattgagggcctggagcattggctggtggcgagccaacaaacaacaggggagtag

SEQ ID NO: 496787 - DNA, 417 bp, Stenotrophomonas maltophilia
atgaatcagcgtggattttccttgatcgaactcatgatcgtggtcgctatcatcgccatcctggcggcaattgcgctgccggcctaccaggactatgttgctcgaggacaggtggctgaggggctctcgttgtcgaccggggccaaggaggcaatagccacctactactccgaccatgggcagtttcctgccgacaatcgcgccgccggcatggctgctccagggtcggtctccggaagattcgtccgatcggtgaccgttgacggtaccggatcgatctcggtggcctttgcttcttcggccagcgcgaaggtcgccggacagacactagttcttaccgcgagcgataccaacggggcggtgaactggtcttgtggagggttggacgcccggtatgtgcccacatcctgtcgctag

SEQ ID NO: 496788 - DNA, 1104 bp, Stenotrophomonas maltophilia
atgcatgtcctcatgctcagcaagcggcagtacaccggacgcgacctcatcgacgaccgctatggccgactctgggaaatcccggaagcacttgcgcgccgtgggcatgccatcagcggaatcgcactgagctatcggcatcgagattccgggaatttcctgtctgcggcaggggttcaatggcgttccatcaacgctctttcactcgagaccatccagttagaacgtgcaatcaggcgacttcaccagcagtgccctatcgatgtcctcctgacaagctctgatgcaccatgcaccgtgctcggtgcaagcttggcgaagcacatccatactcctcacgttgcagatctctacgacaattacgaatctttcggactcagccggatcccaggcatgcgcgccgcgttccgtcgcgcatgtgcgggctcaaaggcaatcagcgcagtaacacatgccctggctgatcacgtgaaatccaccctttcaacacctgttccagtacatgtcattggcaacggagtccgccgggatctgtttcatccgatcgacaaacgtgtcagcagggagatgcttggtcttcccgtgaaggctcgcctaattggctgtgccggcgccctcgatcaaagcagggggattgaagatctattccgagcattccaggcactttcagagcgccaccccgacatccacctcgtcattgccggccccagggatgccacccttcaccgctacccacatcccaggatcatcgatttcggcgtcatcggctggaagcaggtcccgttactaatcaattcactcgatgtatcagtagtctgcaatcgcaattcagggtttgggcgtttctgctacccattgaagctagcggaatcgattgcctgtggtgtgccgatcgtcgcctcagacgttggtgacacacgacggatcggcgggggcgcaatacgcgtatacgcccccggcgacatcaatgatctcgtagaatccatcgatcttcagcttcagatgccgctttccaataccgccctgagggccttcgactgggaagagcgagccattcagatggaagcgcttcttctagaggcgacacgctcaaatcacccctga

SEQ ID NO: 496789 - DNA, 930 bp, Stenotrophomonas maltophilia
atgggccagttgaaggtgggaagtcacctgcggggggggggcatgggatttgcaacagcgctgaggcgggtgggtaatcagctgcgcatcggggagcggccgggctgggtgcagagcatgctgcgccgcctgttccgtcgggcccgcgggcggcagaccgtacgcgatttcgatggccggttcatcatgaccctcgatcttgccgagcatatgcagcgtcgcatgttctggatgggctactacaaccttcgcctcgtctctctcctcgaccgtctcctcgagcggggaatgaccgtgatcgatgtgggtgccaacatcggggagattagcctggtctgcgcgaatcgagtgggcagtgccggtcatgtcgtcgcattggagccgatagccgggattgctgacgaattgcgattgaatgtgcggcgcaatgggctgcaggggatagtgcaggtccatcagcagggcttggcgggagaggttggccggcaggcgatctatgcgtcctacggacagcatgatgtggatgaagttaatctgggactggggagcctgcatggaaccgagggcgtcgaccagcgcattggaatggtcgacatcacgacgctggacgaactcgtacggcgtattggcctgtcacggctggacctattgaaggtcgacattgaaggcggtgagttgccctgtctgcagggggggatcgaaacgctacgacgcttcctgccgataattgcggtggaagtgcaggagcgctccagcctggccgctggataccatagtcgggagattctggagctgctatcgccattgggctatcgcttctatcgcttggaggcgaggcggcggttggttcggatcggtgttcaggatctgtgtgactatcaggatgtgatctgcattgcagggccggtccgggccttggaggttgcatga

SEQ ID NO: 496790 - DNA, 1116 bp, Stenotrophomonas maltophilia
atgatctggctgctggccagccgctgggaagccggcggattggagcgcgtgcaattgaacctcgcgcgtggcttcaagaagagaaaatgctcggtgagtatcatcgccgggcgtgatctgaatgggccgggtgacaatggtgaagtgacgttcatcgctccgcgcggtgcctggcagatgctccttggattgcccttgcgcatccgacgtgagcggccacgcgtcgtggtcactacctccaacgacattgcggtatgggtcaccttctggcgccgcattctctatccttctacggcagtcgttgtggctcagcatctttcgctgtcagggcccaggcgggcggctcgtgggtttgtcaggctcaaactggaattgattcgttgggcgatgcggggcatgctgacgcggtcccagggtctggtcgctgtttctgtggcgttggcggcagaaatggcgtctgagctgaagctccctcgctccggaatacgagtgattcacaacccgttggtcagtacggagggtgtgcaggcaaggcacatttctcaggcgtggcccttcccgcatgacgatgttccggtttttatctatgcggggcgcctttcaccggagaagcgcctcgatcttctttgggaggcatttgtgctggtgcgagccacacatccggcacgtttgctcatactgggacaggggccggaaggtgcgcgtgtggcccagtggattgagaggagcacattccagagcgactgcgctctgctggggcgggtggaggatgcgctgccctggatggcccgaagcacggcgctggtgctgccgtcagactacgaagggtttggcaatgtcctggtcgaggccatgagctgcggcgttcaggtgattgctaccgactgcccacacggtccgtcggaagtcctgggcggcggtcggtttggtcaactggtgcctgtgggagatgcgcatgcattggcccaggccatgaggaatgtgctgaatggaaggcggcaggtggctgctgaagatcttcgcgaacgtagcaaggcattctccatcgatgcagcctgtgaggcgtatctggagctcttcagcttggcaattgagcggcttcagggccgggactga

SEQ ID NO: 496791 - DNA, 1251 bp, Stenotrophomonas maltophilia
atgtccgctaggctaccgcgccttggcaaccttgctaggacctcgatcctggtgatgttctggcagggcatgcggatggcgtgcttggctgcatggatcatcctcggcgctcgcgtcttgggggcaaccgactacggcctgttctccggcacggttggcacggcctcggctcttgccggcctagtcgggctgggcagcggcatgctgatgtaccaatacagcactgcggaccacgggaagtttccccgttattggaagcagagccttgtgctctgcgccctgagcgcagcgccactttccttggccttttctctactgaccgctggcttgatgtcgtggcccgcactcggccttgtcgcgctttcggagatcatcgcattccccatcgtcaccaatgctgcattcgcattttcagccaatgatcgtttgggctgggccgctgcccttcccgcattgaacgcaggcatgaggcttgcagccatctgcatcttcgggctgctaccggtcgaccacaacctgacgacctatctattgctgcacctggcctcttcggcatgcagcgcggtgctggccctcatgctggtccggcgaatactgcgccccggcccagcacacctgcagatcggacgcagcgatttgaagcatggcaccggacacgccgctgcatggagttctgccgttgccgtgactaccctggataaatcgttcgtcctgcatgcaggtggaagcgagctagccggcttgtatgctgcgtgctatcgcatcgcggcggtaattgcgatgccactcgatgcaatggtcatgtcagcgatgccgcggttgttccgtgcgcaaccagtgtccccccagcatctacacctgatcgtttcaatgatcttggtcgcgacggcgtatggaacgctggggggcctcgtgctgtggtgtaccgccagcatcttgccctccgtgctcggtattgagttctctgctgccattcccggcctgcaatggatgggcctgttcatcatcggctacagcctgcgccaaatcgcctgtaatgtgctgattggacgtggcaagaaaatgcatcgattcgtcatcgagactctcgggctggtgataatgaccttgatcgccgcagcctggattcctgcacacggactgttgggagcggtttggatgatcatcgtcgccgaagcactgatggcaatggccgcatggttgactgtgattttcagtcccggccctgaagccgctcaattgccaagctga

SEQ ID NO: 496792 - DNA, 1215 bp, Stenotrophomonas maltophilia
atgcagaccgcctctcttccggggctgctggtcgtggcgtccacctatccgcggtgggaaggagacaccgagcctgggttcgtgcacgccctcagccggcatctgaccggtgatttccgggtcactgtgctatgtcctcacgctcctggcgccgccacccaagagaaactggacggtgtacaggtcattcgctatcgctacgcgccggaaggcatggagcaacttgtcaatggtggtggcatcacctccaacttgcgccgccgaccttggatgcttgcactgttgcccacgttcctgctgtgtcagtggtgggcattgcaacgcgagctgcggcgaaatcgtcacgaagtgctgcatgcacactggatcattccgcagggactcacaagcgcgctgctgccaagacgcctccgccccccgatgctgattacatctcatggcggagatctcttctctctgaaggggcggctcctctcggccgtgaaacgattctccctagctcgcgcacaagcggccagcgtcgtcagtcaggcgatggtggcgccctttcgcgcattagcggcgaaccttcccttggcagtttcgccaatgggcgtggaccttcaacaccgctttgtcccctccccagtgaagcgggcacgtaacgaactgctgttcgtcggacgactggtcgagaagaagggattgacgtacctgattgatgctttgccactcgttctggctcgtcattcccaggtcttcctcaccgtcatcggacacgggccggaactaccagaacgggaagctcaggtggcagcattaggtctgcaaaagcacgtccgtttcgtcggcccggtgacacagaacgcgcttcccgcctactaccaacgtgcgactacgctcgtcgctcccttcgtcgaggcccgcaacggagatcaggaagggcttggattggttactgtggaagctctcggttgcggctgcccggtcgttaccacggacgtgccggcagtacgtgatgcatttccagcgggcccgcctcgctatctggccacgcaacgatcctcaacttcgcttgcaagcgtaatcatcgaactgctgagtgcaccggaacaggcgcaagcgtgggcacacgcacaacgacctgagctggtagctcgcttcgaccattcgcaagtcgccgcagactatgcgaagcgactacgcgccatcatggagccccagaatgtccgctag

SEQ ID NO: 496793 - DNA, 900 bp, Stenotrophomonas maltophilia
ttgcaccggggaaaatggggacacactttgaatcagctcagcatcatcctgccggccaagaatgaagccgaaggccttcttcgcacgctgccggaacttcgtttgcagtacccacttgcagagatcatcgtagtcgatgacggctccaccgacgccaccgcaacaattgcgcgggaacaaggtgttcgggtgctttccagcccctattcgatgggtaacggtgcctcgatcaaacgtggcgcacgcgcagcctgtggagacattctggtgttcatggatgccgatgggcagcatgacccggcccacatccgggcattgctggataagctgtccgaaggctacgacatggtcgtcggcgctcgcgacagcagcggccaagccaacgttcaccgcggccttgccaatcgattctacaactggctggccagccatatgaccggcttcaaagtaatggacctgacttcgggcttccgtgcggtacgcgcgcgacgcttccgcgagttcctgcatttgctgcctaacggatttagctacccaacgaccagcaccatggcattcttccgaagcgcctaccctgttgcctatgtccccattcctgtcgcgaagcgtgtgggaaacggtagccacattcgtccgatcaaggatggaatccgcttcctgctgatcatcttcaagattgccaccttgtactctcccctgaagctgttcgcacccgtggcgctggccttcttccttctgggcttgggctactacgggtatacattcgcgaccatgcatcgcttcaccaacatgagcacactgctgttcagcgcatcggtgatcatcttccttatcggcttggtatcggagcagatcaccggccttacctaccttgcatcgcggaaggactcaaccgagtga

SEQ ID NO: 496794 - DNA, 1731 bp, Stenotrophomonas maltophilia
atgaacgccgtaaccaccgccaatctcgtcggcatcaccggcctggcccgtcgcctggtccaggatggtgcgctggacgaggcttccgcccgcgacgccatggccaaggccgctgcggcccggcagccgctgccgacctggttcgcgcagaacaaggtggtcggagcggcccagttggcggcggccaacgcggtcgagttcggcatgccgctgttcgacgtgtccacgttcgacgccagccagaacgcgatgagcctggtcagcgaggagctgctgcgcaagcacaacgtgctgccgctgttcaagcgcggcggcaagctgttcgtgggcaccagcaacccgacccattcgctggacgagatcaagttccacaccaacctggtggtggagccgatcctggtggatgaagaccagatccgccgcacgctcgagcagtggcatgccagccatgacacgctgggcgacgcgctgagcggtgacgacgatggcattggcaacctggatgtgtccggcggtgacgaagacatttccggagccggcgactccggcatcgatgccaagggtgatgacaccccggtggtgaagttcgtcaacaaggtgctggtggacgcgatccgcaagggcgcctcggacatccacttcgagccctatgaagacgactatcgcgtgcgcctgcgcatcgatggcctgctgaagatggtggcgcgcgcgccggtgaagctgaaccagcgcatcgccgcgcgcctgaaggtgatggcgcagctggacatcgccgagaagcgcgtgccgcaggacggacgcatcaagctcaacctgtccaagaccaagcagatcgacttccgcgtgagcacgctgccgaccctgttcggcgagaaggtggtgctgcgtatcctggacggcagcgcggccaagctgggcatcgacaagctgggttacgagccggaccagcagaagctgttcctggacgccatccacaagccctacggcatggtgctggtgaccggcccgaccggttcgggcaagacggtgtcgctgtataccgcgctgggcatcctcaacgacgagacgcgcaacatctccaccgccgaagacccggtggaaatccgcctgcccggcgtcaaccaggtgcagcagaacaacaagcgcggcatgaccttcgccgcggcactgcgctcgttcctgcgacaggatccggacatcatcatggtcggcgaaatccgcgacctggagacggccgagatcgcgatcaaggcggcgcagaccggccacatggtgctgtccacgctgcacaccaacgatgcaccgcagaccatcgcgcgcctgatgaacatgggcatcgcgccgtacaacatcaccagctcggtgacgctggtgatcgcccagcgcctggcgcgccggttgtgcaacaactgcaagcgcccggccaacctgcccgaacatgcgttgctggccgagggctttacccaggcgcagctggatgcgggtatcgagctgtacgaggcggtcggctgtgacgagtgcaccgaggggtacaagggccgcaccggtatctaccaggtgatgccgatgaccgacgagatcgccacgatcgtgctggccggtggcaatgcgttgcagattgccgaggccgcgcagcagatcggggtgaacgatctgcgccagtcggcgttgaagaaggcggctgctggcgtcacgagcttggccgagatcaaccgcgttacgaaagattga

SEQ ID NO: 496795 - DNA, 756 bp, Stenotrophomonas maltophilia
atggcaagttcaaggaaaacgccgcctgacctggcgactgcattcggccgtatagaacaggcaagggcagaaactaatcgcccgcttgcggtcattcttgccggccacaatgggtctggtaaatcgacattgtggtatgaacacttggccgattcgttgcagattcctctgatcaatgctgatcgcatgatgctgtccatcctgccagatgcgaacaagcaggcgctcccacaatgggcggtgcagctacgagacgaaaatgacgcatggatgaaggtcgcacagcaaggagtccaggctttcgtcggccacgcgatgacggcaaacgttccctttgcgtttgagacggtgttctcgcactggcagcctcgtggcgacggtacgtttgaatcaaagattgatcaaatccaacaactgcaggaggcgggctacttcgtcattccggtttttgttgggttggccaatgatcaactttccatcgcacgggttctaacacgtgttgccagcggcggacacaacgtccagccgggaaagctgacctcgcgctttcctcgaacgcaaagggccattgcggctgcagcgggcgtggctgatgcctgcattctgaccgacaacagcctgaacgaagaagaagcgtttacggtatgtcggatacaactcggcaatatcgaaattttcgactgccgtacggacgatcatgcagtggccaagcccatccttgaatggatgaacattgtcagtccgatcgccgcgtga

SEQ ID NO: 496796 - DNA, 1374 bp, Stenotrophomonas maltophilia
atgaacgaaacccgcagcgccctcgtcgtcgacgacgaacgcgacatccgcgaactgctggtactgacgctcggccgcatggggctgcgcatcagtacggcagccaaccttgccgaagcgcgcgaactgctggccagcaatccgtacgacctgtgcatcaccgacatgcgcctgccggacggcaatggcatcgagctggtcagcgagatcgcgcagcactacccgcgcacgccagtggcgatgatcaccgccttcggcagcatggacctggccgtggaagcgctgaaggccggcgccttcgacttcgtcagcaagccggtggatatcgccgtgctgcgcggcctggtcaagcacgcgctggaactgaacaacaccgagcgccctgcgcccggccccgccgccgaacagggcgcacgcctgctcggcgattcgccggccatggacgtgctgcgcaccaccatcggcaaggtcgcgcgcagccaggcgccggtctacatcctcggcgaatccggcgtgggcaaggagctggtcgcacgcaccatccacgcccagggcgcccgcgcggccggcccgttcgtgccggtcaactgcggcgccattcccggcgagctgatggaaagcgaattcttcggccaccgcaagggcagcttcagcggcgcccacgccgacaagcccgggctgttccaggccgcgcatggcggcaccctgttcctcgacgaagtggccgagctgccgctgcagatgcaggtgaagctgctgcgcgcgatccaggaaaaatcagtgcgcgcggtgggcgcggctaccgaggagccggtggacgtgcgcatcctctcggccacccacaaggacttggccgagctggtcgaggacgggcgcttccgccacgacctctactaccgcatcaacgtgatcgaactgagggtgccgccgctgcgtgagcgtcgccaggacctgccggaactggccgcatcggtgctggcgcggctggcccgcagccatggccgcccgacgccgttgctggcgccgtcggcactggacgccctggcccagtacgccttccccggcaacgtgcgcgaactggagaacatcctggaacgtgcgctggccctggccgaagaagaccgcatcggcgccgacgacctgcgcctgccgcagcatgccccgcgcacgcccggcagcgcagcacacgccgaagccgtggtggacctgcagcccggcagcgccgccctgccctcgtacatcgaacagctcgaacgcagcgccatccagcgcgcgctggaagagaaccgctggaacaagacccgcaccgccgcgcagctgggcatcaccttccgcgcgctgcgctacaagctgaagaagctggggatggagtaa

SEQ ID NO: 496797 - DNA, 1614 bp, Stenotrophomonas maltophilia
gtgtcacccagtgcttcattgatcgaccgcatcgaatcgattccgcggcgtgagctgtacttcttcgcgctgtaccgggtgctgatcgcctcggtcatcgccgccctgctctacagcccgctgtcggccatggtcggcgaagcgcaccacccgcggctggccgacaccgtcgccgccatctatctggtgctgtccctgctggctctggtgatcggccgcaacgaacgctggctgcgcccgatcgtggtcagcggcgtgctggtggatatcgtcgccgccaccctgttgtcgcatgccctgcccggtgccagcgccggcatctcgatgtcgctgctgttcaacatcgccgccgccgccaccctgctgccgctcagcctggggctgggcctggccctggccgccagcctcgccaccggcgtggagtacacctggaagctgctggaaggcggcgaccccacccgtaccctggccgaactggccatgttcgccaccagctacctggcactggccttcatcagttaccaggtcggcagccgcgcgcgccgcaaccagcagctggccaaccagcgcggcgatgaagtggccaacctgttccagatcaacgagctgatcatccgccgcatgcgtaccggcgtgctggtggtcgacgccgacaaccgcgtcaccctggccaacgaggccgcctcgatgctgctcggtgacagtgatggcagcggcgaaagcggccgcctggacctggccagcgccgccccggaactcgcccgtcgcctgcagcgctggcgcaatggctgggcgcaggacgaactaccgctgcagctcaaccccgaccagcccgaagtgcagccgcgctttgcccgcctgctggccggcagcgacctggccctggtgttcctggacgactccagcgtggtctcgcgccgcgccgaatcgctcaccctgtcggcgatgggccgcttctcggccagcctcgcccacgagatccgcaacccattggccgcgatcaactacgcggtgcagctgctggaagaaggcaccggcttcaacgaaagcgatcgccgcctgctgcagatcatccgccagcagtgccagcgcaccaacggcatcgtcgaaagcgtgctgggcctggcccggcgcgagcgcgccacgccggagaacgtcgacctggccgccttcgtgcgccgcttcgtgctggagtacaagcagggccagacgctggagaccgacagcatcgagccgatcatcaacgacacctcggtgctggcccaggtcgacaccaagcacctctaccaggtgctgaccgtgctggtgcacaacgcgctcaagtacgggcgcatcggccagcagccggcgcgggtgcgcctgcgcgtggcgcagcacgagcgcagtgcggtcatcgatgtgatggatcgcggccccggtattcccgagagtgtggccgcacagttgttccgaccgttcttcaccacgtccgagcatggcaccgggctgggcctgtatatcgcccgcgagctgtgccgggccaaccaggcgcggctggactacatcccggttcccgctggaggctcctgcttccgcctggtgctgcccggcccgcatacgctgttgcccacctga

SEQ ID NO: 496798 - DNA, 1170 bp, Stenotrophomonas maltophilia
atgaatttccacgaataccagtcaaaacaactgcttgccgagtacggcatcccggtcccggccggcaaggtcgctgcgaccccggacgaagcggttgccgctgccaactccctgggccagggcccctggatggtcaaggcgcagatccacgctggcggccgcggcaaggctggcggcgtcaagttctgcaagaccaccgacgacgtgaaggccgctgcggccaagatgctcggcaccaagatggccacctaccagaccgcaggcgttgaactgccggtcaacctggtgctggtgaccaccgccggcgagatcgtcaaggaactgtacctgtcggtgctggtcgaccgtggcaccaagaccatcacctacatcgcctcttcggaaggcggcgtggaaatcgagcaggtcgctgctgaaaccccggagctgatccactcgctgaacgtcgacttcgtcgaaggcgtgcagggttaccacggccgtgatttcggcttcaagctgggcctgaccgccaagcaggccggccagttcgccagcatcatggtgaacctgtaccgcctgttcaacgaaaaggacctggccctggttgaaatcaacccgctggccatcctggacgacggcaacctgtacgcgctggacggcaagttcgacagcgacgacaacgccgcgttccgccagaaggccctggtcgccatgcgcgacaagacccaggaagatccgaccgaagtgatcgcttcggagctggacatcaactacgtcaccatggacggcaacatcggctgcatggtgaacggcgccggcctggccatggccaccatggacgtcatcaagctcaacggcggcgagccggcgaacttcctggacgtgggcggcggtgccaacaagcagcgcgtcatcgaagcgttcaagctgatcctgtcctcggacaaggttgaaggcatcttcgtcaacatcttcggcggcatcgtccgctgcgacatgattgccgaaggcatcatcgccgccgtgaaggaagtgggcgtcaaggttccggtcgtggtgcgcctggaaggcaccaacgtggaagaaggcaagcagctgctgcgcgacagcggcatggccatcatcccggctgacaacatcaacgatggcgccaagaagatcgttgaagctgtcaagaacgctgcctga

SEQ ID NO: 496799 - DNA, 876 bp, Stenotrophomonas maltophilia
atgtctgttttgattaacaagaacaccaaggtgatcgtgcagggcttcaccggccagcagggcaccttccacgccactcagatgatcgagtacggcacccaggttgttggcggcgtgaccccgggcaagggtggcaccacccacatcgatctgccggtcttcaacaccgttgccgatgcagtgcagagcaccggcgccaacgcttcggtcatctacgtgccgccgccgtacgcggccgacgccatcctggaagccgcagctgccggcatcaaggtcatcgtctgcatcaccgaaggcatcccggtgctggacatgctgcgcgtcaagaacgtgctgacccgttcgcatccggacaccgtgctgatcgggccgaactgcccgggcgtcatcaccccgggtgagtgcaagatcggcatcatgccgggccacatccaccagccgggcaagatcggtatcgtgtcgcgttcgggcaccctgacctatgaagcggtcaagcagaccaccgaagtcggcctgggccagtccacctgcatcggcatcggtggtgacccgatcaacggcctgaacttcgtcgactgcctgaagctgttcaacgaagacccgcagaccgaaggcatcatcatggttggcgagatcggcggtgacgctgaagaagccggcgccgagtacatcaagaaccacgtgaagaagccggtcgtcggtttcatcgccggtgcgtcggctccggccggcaagcgcatgggccacgcgggcgcgatcgcctcgggcggcaagggcaccgcggaaggcaagttcgccgccatggaagctgccggtgttgtcaccgtccgctcgccgggcgacctgggcgctgccatcgccaagctggtgaaataa

SEQ ID NO: 496800 - DNA, 1635 bp, Stenotrophomonas maltophilia
atggcttcgatccgtatcgcgatggcgcagttcgacttcccggtcggcgatgtcgccggcaacaccgagcgcatcatcgagatgatcggccaggcgcgcgacgagtacggtgccgagctggtgatgttccccgagctggcggtgagcggctacccgccggaagacctgctgctgcgcccgggcttcctgtacgagtgcgagcaggcgatggcccgcatcgctgccgcctgccgcggcatcaccgccgtggtcggctggccgcaggcggctggcgcggtggtctacaacgccgccagcgtgctgcgtgatggcctggtcgagcagacctaccgcaagcgtgagctgcccaactacgccgtgttcgacgagcgccgctacttcgatgtcgatccggatggcggcagctgtgtgttcgaggtcaatggcattccggtcggcctgctgatctgcgaggacctgtggtttgccgagccgctggccgacaccatgcgcgccggtgcgcagctggtggtggtgccgaatgcttcgccgtatgagcgtggcaagcacgcccagcgcgacgccgtgctggctgcacgtacccgcgagagcggggcggccatcgcttacctcaacgtggttggcggccaggacgcgctggtgttcgacggcgcctcggtggtggccgacggtgatggcacggtgcacccggctgctgctgccttcgtcgaccagtggctggtggtggagtacgacggcgccagccgccgcttcatgccgcacgtgtggatggacgacggcgacgagagcatggacgcgctggcctggcgcgcggtgacccgtggcatccaggactactgccgcaagaatggcttcaagaaagtgtggctgggcctgtccggcggcatcgactcggcgatcgtgctggccatggcggtggacgcgatgggcgcggagaacgtaaccgccgtgcgcctgccgtcgcgctacaccgcgggcctgtccaacgacctggcggccgagcagtgccaggcgctgggcgtgaagctggaggcggtgtcgatcgagccggcgttcaagggcctgatggaagcgttggcgccgatgttcgagggcaccgcgccggacgtgaccgaagagaacctgcagtcgcgcagccgcggggtgatcctgatggcgctggccaacaagttcggcggcttgctgctgaccaccggcaacaagagcgagtacgcggtcggctacgccaccatctacggcgacatgtgcggtggctatgcgccgctgaaggacctgtacaagaccgaagtgttcggcctgtccaagtggcgcaataccgtgggcggcgcaccggtgatcccgccggcggtgatcagccgcccgccgtcggccgagctgcgcgagaaccagctggaccaggattcgttgccggcctatgacgtgctggacggcatcctgtaccgctacatcgaccaggagcagtcgcgcacggagatcgtggccgccggttacgacgcggccgtggttgaccgcgtgctgcgcctggtgcgcatcagcgagtggaagcggcaccaggccgcgccggggccgaaggtctcgcgccgggcgttcggccgcgagcgtcgttacccgatcagcaacggctacaagggctga

SEQ ID NO: 496801 - DNA, 1749 bp, Stenotrophomonas maltophilia
atgtccgagcacacccccgccagccccgagccccccgccgacagccacgaaaagcgcgatttcatccgccagatcgtgcgcgaggacctggccagcggaaagcaccaggcgatcaagacccgcttcccgccggagccgaacggctacctgcacattggccacgccaagtcgatctgcctgaacttcggcatcgccggcgagttcagcggcgtctgcaacctgcgcttcgacgacaccaacccggccaaggaagatccggaatacgtggccgcgatccaggacgacgtgcgctggctgggcttcgagtggaacgagctgcgccacgcctcggactatttccaggcctattacctggccgccgagaagctgatcgaacagggcaaggcctacgtctgcgacctgtcggccgaggaagtgcgcgcctaccgcggcaccctgaccgagccgggccgcccgtcgccgtggcgcgaccgcagcgtcgaggaaaacctcgacctgttccgccgcatgcgcgccggtgaattcccggatggtgcgcgcaccctgcgcgccaagatcgacatggccagcggcaacatcaacctgcgcgatccggcgctgtaccgcatcaagcacgtcgagcaccagaacaccggcaatgcgtggccgatctacccgatgtacgacttcgcccacgcgctgggtgattcgatcgaaggcatcacccactcgctgtgcacgctggaattcgaagaccaccgcccgctgtacgactggtgcgtggacaacgtcgacttcgcccatgacgacgcgctgacccagccgctggtcgatgccggcctgccgcgcgaagcggccaagccgcgccagatcgagttctcgcgcctgaacatcaactacacggtgatgagcaagcgcaagctgatggcgctggtcaccgaacagctggtggacggctgggaagacccgcgcatgccgaccctgcagggcctgcgtcgccgtggttacaccccggccgcgatgcgcctgttcgccgagcgcgtgggcatcagcaagcagaattcgctgatcgacttcagcgtgctggaaggcgcgctgcgcgaggacctggacagtgccgcaccgcgccgcatggcagtggtcgatccggtcaagctggtgctgaccaacctgccggaaggccacgaagagcagctgaccttcagcaaccacccgaaggacgaaagcttcggcagccgcgaagtaccgttcgcacgcgaagtgtggatcgaccgcgaggacttcgccgaagtgccgccgaagggctggaagcgcctggtcccggggggcgaagtgcgcctgcgcggcgccggcatcatccgctgcgacgaagtgatcaaggatgccgacggcaccatcaccgagctgcgcggctggctggatccggaatcgcgtccgggcatggaaggcgccaaccgcaaggtcaagggcaccatccactgggtcagcgccgtgcatggcgtgccggccgagatccgcctgtacgaccgcctgttctcggtgccgaacccggacgacgaatcggaaggcaagacctaccgcgattacctcaacccggaatcgcgccgcactgtcaccggctatgtcgagccggccgcggccagcgccgcgccggagcagtcgttccagttcgagcgtaccggctacttcgtggccgaccgccgcgaccataccgcagccacgccggtgttcaaccgcagcgtgaccctgcgcgatacctggtcggcctga

SEQ ID NO: 496802 - DNA, 654 bp, Stenotrophomonas maltophilia
atgatcaccgccctttccgtcctgctctggttcatctcgcagcatccgctgctgacgttctttgcagcaatggtgctggccgggctggtctcgtggtggcggcgctttccgggctacgccatcgtggtgttcccgctggcgatgctcaacatgttcctcggccacttcctcaacgccaccttcctcaacgtggtgggcgagcgtggtgaagcggtgatcgtcaaggccgagcgaaccagctccacgctcaacgaacagtacatctggcgctacgaagcggtgctgcgtaccgccgaggggcgcgatgtggacgtggtgttccacaccaataccgcttcgctgtggccgctggaaaacgccatccgcatcccggcgcgcgaccagccgttcgtggtgaagtacacgccgggcttcccacgcaacatcgtcatcctcaccaacgagtcaccgcacggcatcgcccaggcccgggccagcgcgcgcgagcgggtggaagtggcggcgcgcaagctgcacttcagcccgggcaatgccgagttccgcgccgactatcgccgcgaactggaaagctggctgcgcgaccacggcagcgacccgcagcagcagcccgacgcgcagcgatatcgcgccgagctcgacgcactcgaccgctag

SEQ ID NO: 496803 - DNA, 723 bp, Stenotrophomonas maltophilia
atgaccacgagcgccaccgccctcctcccgctgctgcagcaggccctgcaggacaccggcaccgccagccgcatcgacggcaacgcgctgctgctcgacagcggcctgcgcctgaccccgcatgcgatggccgcgcagccgcgcgacaacggcggctggcagacctccaccgtcattgaaagccagcatccgcagttgttcgccgatggcctgttcgagtaccagcacgcaaatggtgccgatgagcaggcatcgctgttgtccggcttccaggcctgggcccgggtggacctggtgaccctgcagaccgcgatcggcgcccaagacgcacagggcctgccgatgatgggcctgacctatccggccggtgacaatggcgaggaacacgagcgcactgtggtgctggggccgttggcgcactaccgtgcacaggacgtggatgcctccacctgcagcgaagacgatcatggctcctgcccctgctgcctgttcacccgcagcatggaggccttcgacgagctgctgaaagcccgccaattcctggccatccgcctgttcgcctcgcgccataccgatggtctgtgcgaggccgattgccgggtcaacggccacgacttcgccgccgccctgcccctgctgcgcgcctatgccgccagttggccgcaggccgggctggaattccgcaagcagtacgtggtgatccgcaccggctcgccgggctga

SEQ ID NO: 496804 - DNA, 561 bp, Stenotrophomonas maltophilia
atgctgtacgcgcaagtccacctgacccttcccgcctggatccacgaccagatcgacctggatcgtcgatatccgggcgatgaggccaaggtcgcgctggcgatcgagctgtcgcggctgaacgtcgagcacgccagtggcggcccgttcggtgcggtggtgttcggcccggatgacaaggtcatcgccgccggcgtgaaccgggtgatgccgcacgcgacctcgctggcgcacgccgagaacatggcctacatgctggcccagcagcgcctgcagaccccgcgcctgaacgcggtgctgtcgccggtcaccctggccaccagctcgcagccgtgctgccagtgctacggcgccaccgtgtgggccggcatcgaccgcctgctgatcggtgccaactcggccgacgtcgaggaactgaccccgttcgatgaaggcccgctgccggccgactgggtgggtgaactcaacaagcgcggcatcgaagtggtgcaaggcctgaaccgcgacgccgcgcgcagcgtgctgcgtgcctatggggaaagcgatggcgcccgttactga

SEQ ID NO: 496805 - DNA, 1068 bp, Stenotrophomonas maltophilia
atggcgcccgttactgaaaccggcatcggcctgctgtgcctgtgccggcagggcttcgagcccgacctggccggcgagctgcagttccgcgccggtgaagccggtttcgccggctatgcgcgcacccagcgcaatgacggctacgtgcttttcatgtgcgacgaagccgccgcgctggcgccgcgcctgcgctggcgcgagctgatcttcgcgcggcagaagctggtggtgctggccgaactgccgcagctggacccggcggaccggatcaccccgatgctggaagtgctggccgatgcgccgcgcttcggcgacctgtgggtggaacaccccgattcggacgccggcaagccactgtccggtctggcccgtgccttcggcaatgcactgcgcccggcgctgcgcaaggccggcaagctcactgataagccgaacaaccgcctgccgcgcctgcacgtggtgttcgtcgacggcacccatgccttcgtctgcgtggccgacccggccgacagcgcgccgtgggcactgggcatcccgcgcctgaagctgctgcccgaggcgccttcgcgttcggcactgaagctggacgaagcactgctgaccctgctgacgccggaagaacgcgaagcactggccaagcccggcatgcgtgcggccgacctgggcgccgcccccggcggctggacctgggtgctgacgcgccaacacatgcatgttctgagcatcgacaacggcccgttgcgccagcatgtgctggacaccggcctggtcgagcacctgcgcgccgatggcttccactggcacccggaacagccgctggactggatggtctgcgacatggtcgagcagccgcgccgcgtggccgaacgcatggccacctggttccgcgagggctggtgccggcatgcgatcttcaatctgaaactgccgatgaagaagcgctgggacgaaacccggctgtgcctggacctgttccaggaccaggccggcaagccgctggtggtccgcgccaagcagctctatcacgatcgtgaagagatcaccgtgctggcttcgccactgcgctga

SEQ ID NO: 496806 - DNA, 399 bp, Stenotrophomonas maltophilia
atgaaccttccgcgtgctgccctgctgttgaccatcctgctggcctcggtaccggccatcgctcagcacggcccgtccacgccggcgcagagccagccgctgggccccaccggcggcacgatccgccagcaaccgctggatgcgggccgggtcagcggcagcgtcgagattccgcagccggccggcgaggcgcaggtgaccgtgcgttcgctggaaccgagcagcgtggtcggccagtaccgcatccatttcgccgcgctggatgtgaatggcgacggtttcatcagccgcgaggaagcacaggccaatccggcgctggccgacgaattcaattcgctggaccgcaggcaccgcggcaagctggaccgcaccgacctggccggctggctggtggattga

SEQ ID NO: 496807 - DNA, 1182 bp, Stenotrophomonas maltophilia
atgagccggcgtgtgcgcctggacgtggccatcgtcggaggtggcgtggtcggcgctgcctgtgcgctggcgttggccgatgccggcctgtcggttgcgctggtggaaggtcgtgagcccgcgccgtggcaggccgcacagcctgacctgcgcgtgttcgccttcgctgctgacaacgtacaactgttgagccgcctgggcgtgtggccggcgatcgcgcaggcccgcgcctggccctaccggcgcatgcaggtgtgggatgcggccggtggcgaagatctgctgttcgatgctgatcgcttcggccgtcgtgaactgggctacatcgtcgagaacggcctgctgcaggatcgcctgtggtcggcactgccggcggcgggtgtgcagctgcactgcccggcgcgggtggaagcgctggagcaggacgacgacggcgtgcgcctgcgcctggatgacggtcgtcgcctggaagcggcgttggcggtggccgccgacggcgccgaatcgaccctgcgccaactggccgggatcgaggttgaaaagcatgactaccaccagcgtggcgtggtggcctacgtggacagcgatcttcccaaccaggccaccgcctggcagcgcttcctgccgggcgggccgctggcgttgctgccggtggccgagcgccgcagctcgatcgtctggaccctgcccgaggacgaggcggcacgtgtgctggccttggacgaggacgccttcaaccgggaactgacccgcgccttcgcggcacggctgggtgagctgcgactggcgtcaccgcgagcggccttcccgctgcgtcgccaactggcccgtcactacgtggccggccgagtactggcattgggtgatgccgcgcatgtggtgcatccgctggccgggcagggcgtgaacctgggcctgcgcgatgtcgccgccctgcagcagtggctggcgccgtcggccgagcgccgtggccagccgcggctgtcgccgcagcgcctgcagcgctgggcacgcgaacggcgcagcgacaaccagatcgccgcctacagcttcgatgcgatcaaccgcctgttctccaacgacgagatgcacttgaccctggcccgtggccgcgcgctgggctgtgtcggcaaatggccgccgctggtacaggcgttctggaagcgcgccgccggcgtctga

SEQ ID NO: 496808 - DNA, 1218 bp, Stenotrophomonas maltophilia
atgaacaccatgagtgaacgacatgacgtgctgatcgtcggtggcggcctggtcggtgccagcctggccattgccctggaccggttgggccgcgacgtgggcctgctcgaagccagcccggccggcgagctgccggcggtgttcgaccagcgcaacctcagtttcgccgcggcgaccgtcaacgcgctgaccgcgttgggggtcatgcagaagctggcgatggcgccgggcccgatccgccgcatccatgtcagccgcgccggcgatttcggccgcgtgcagctggaggcttccggctacgaccggccgtggttcggccaggtggttgtcgcgcgtgacttcggccaggcgctggaagcgcgcctgcaggagctgccgcagctgcggcgctaccggccgatgcggttcctgggcctgggcgaggtggtcgacggctaccgccaggtgcgggtggccgacgagaccggcgagcgcgtactgctggcacggctggtggtcggtgccgatggcacgaccagcggtgtgcgtggcgcgctgggcatcgaggtcgaccggcatgatttccagcagaccctgttcgtggcccgcgtgcgcagccagcgtgcgccggatggcacggcctgggagcgcttcaccgataccggcccgaccgccctgctgccgcgcggcgaccgccacttcggcaccgtgcacggcgtggcgcgggaccaggccgatgcggtgatggcgctggacgatgcggcctggctgcagcgcctgcaggatgcgatcggctggcgtgccggtcggctgctcgaatccggcccgcgcagcgcttacccgctcatccaggtgctggcgcgcgcattggccggtgaacgcacggtgctgctgggcaatgccgcgcagaccatccatccgctgggtgcgcagggcttcaacctgggcctgcgcgatgcgctgaccctggccgaactgctggaggatgcgcacgaggatgccggcagcgatgtgctgctgcaggcctatgttgcgcgccgccaggaagaccgacggcagacggtggcgttctcgggtggcctggcacggctgaccagcaatccggcaccgctgatgcggccgctgcgcagcctcggcctggtggccgcgcaacgcgcctcggtgcagtcgatgctggtcggtggtgcgatgggcttccgtggcgaagtgccgcggctgtgccgtggagaagcggcatga

SEQ ID NO: 496809 - DNA, 585 bp, Stenotrophomonas maltophilia
atgtccgccaccgccaaccgtgccttcgtcctgtccgtactcgtgctgttgctggcggcgacccgggtcaaccacttcgcggcgatcccggatgcctcctgggcggtgttcttcatcggcggcttctacctggctggctggacccgctgggcgttcccgctgctgatggtgttcgcggtgctggtggactggatcgtgatccgcagcagcggcctggatttctggcagcactactgcgtgtcgccgggttactggctgctgctgccggcgtatttctcgctgtgggccggcggcatgctgctgggccgcaactaccagggggcacgctggccggtactggccaagggcgcgctgctgctggtggcctcggtggcggtctgtcacctgctcgcgcagggcggcttctactggaccagccgcaacgtggccgagccgacgctggccggctgggcacagaactacgcacagtggttcgggccgtacctgcgcaccaccgccatctacgtggcgctggccgccgccctgcagctggccgtggagcaggtgctgaagctccagcaggcccgccgcgacatccggcactga

SEQ ID NO: 496810 - DNA, 555 bp, Stenotrophomonas maltophilia
atgggtcatcgcctctcgcgcatctatacccgcaccggcgacgacggcagtaccggccttggcgacggccagcgcgtggccaaggatgatgcccgcgtggcgtcctacggcactgtcgacgaagccaatgccgcactcggcctgctgctggccacggcgctgcccgacgacgtgcgcgcgctggtggtgcatctgcagcaccagctgttcgacctgggcgccgaactgtgcatccccggccacgccgcgatccacgccgccgatgtgtcggcactggaacagcagctggatcactacaacgccagcctgccgatgttgaaggaattcatcctgccagccggtggcgaggccgccgcacgctgccacctggcgcgcaccatcgtccgccgggccgagcgcgagacggtcaccctggcccgccacgacgccgtgcgcagcgaggcgctgcagtacctcaaccggctgtcggacctgttgttcgtgctggcccgggtgctggcccgtgccgatggccatggcgaagcgctgtggcagccacagcagcgccagcgctga

SEQ ID NO: 496811 - DNA, 939 bp, Stenotrophomonas maltophilia
atgctggtcttcacccatccgtcctgcctgctgcatgaccccggccctggccatccggagtgcccgcaacgcctgcagcatgtgctcgatgccctgcacgccgccttccccggccagctggactggcgcgaggcgccgccggccaagttcggcgaactgacccgggtccacgacagcgccctgctcgacttcgtgctgcagccgcagaccgcgccgctgcgacagctggacatggacacctggacctcgcccggctcggccagtgccgccgtgcatgccgccggcgccggcgtggcggcggtagatgcggtgatgctgggcgaggacccgctggcgttctgcgcggtgcggccaccgggccaccacgccaccagcagcactgcgatgggcttctgcctgctcaacaacatcgccatcgccgccgcctacgcccgtgaccgtcatggcctggagcggatcgcggtggtcgatttcgatgtccaccatggcaacggcacccaggacatcttccagcacgacgcccgggtctcgtactacagcacccaccaggccgggctgttccccaactccggcctgcgccgcgaccgcggtgccggcaacctgatgaacatcctgctgccccccggcagcggcggtttccgcttccgcaatgtgtgggccgacgagatgctgccagccatcgacgacttccgcccgcagctgctgctgatttcggccggcttcgatgcccacctgcgcgatccgcaggccgatctgatgctggaaaccgacgatttcgcctggatcacccgcgaactgcatgcgctggcgcgccgccatgcggccggccgggtggtctcgatgctggaaggcggctatgacctgcaggcccttgccgagtgcagcgtggcccatgtccgggccctgctgccccccccaccgggcagcgtctccggatga

SEQ ID NO: 496812 - DNA, 2595 bp, Stenotrophomonas maltophilia
atgaacccgaaccggcaggatccgacgcccttcattgcccctatgcaagggatggggcaagctaccgtccgttttcgcccgaatccgaaccgcgtgcgccgagccctccgcctgcttcccctgcctctgagcatcgccatctgcctgccggcaatggccgatgaaaagccgctcaactggggcctgtgcccggctaccgacgtgattcccgcgttcaccgatgcccctgtcccggtcccggggcaggacaaggccgccgccagcgccgcgcgcgagcagcagccgaccgacatcgagggtgaccagctgctgggcaccaccaccgtgccgcagtacgaaggcaacgtggccctgcgccgtggcgaccagttcgtcggcaccgacaagctcagcttcgataccgagaccggcaactacatcgccgacggcaatgtccgctaccaggactcctcgatccgcatggtcgccaagcgcgccgagggcaaccaggaaagcgacacccacaagatcaccgacatcaagtaccagctggtgtcgcgccgcggcaacggcgatgccgaatcggtcgacctgcagggcgcggtcggccagatgcaccgctccacctacaccacctgcgacccgtcgcagccggtgtggaagctgtcggcgccgcagatcgaagtggacaacgacgaaggcttcggtaccgcccgcaacgccgtgcttcgcatcggcaaggtgccggtgctgtgggcgccgtacttcaagttcccgatcgacgaccgccgcaagaccggcctgctgttcccgcagctgggcatgtccggccgcaacggtttcgattacgcacagccgatctacttcaacctggcgccgaactacgacgacacgttgaccccgcgctacatgagccggcgcggcctgatgctcgacaacgaattccgctacctctacaacggcggccgcggcgaactgctgaccgcgttcatgcccaacgacaaactgcgcgaccgcgaccgcggccgggtgatgttcggcggctaccacaacctcgacgaccactggcaggcccgcgccaacctggcctgggtcagcgacgaacgctatgtggaagacttcgccaaccgcctggtgggggtcaccgcgtcgaacctgcagagcaccatcggcctgtacggcactggcaggaactggacggccggcatcatggccgaccgctggcagctgaccgactacaccctcaacgagggtgcgctggcctacaaccgccagccgcgcctgtatttcaactgggacaagccggtcctgccgtggctggaaaccggcatctacgccgaagccgtgcgtttcacccacgacgacatcaacttcaagtacggcgctgatgcgggaccggacctgcagtacacccgcaacggcagccgtcagaccgacggcatcggtgtcagcggcggctcgcggctggatgtcaaaccctacgtgtcgttcccgatcagcggcgcggcctggtatgtcacgccgaccctggcctaccgctataccggttaccagctggaccgtggcctggttgatggcgtgaacggcatccgcggccagatcctgcgttcgcagggcatcgacccgaacaccgccacaccggaacagctgcgcggcaacacctcgcccagccgcagcctgccgatcggcagcatcgacgccggcctgttcttcgatcgcgagacccgcatcggtggcaagtccttcctgcagaccctggaaccgcgcctgttctacctgcgcacgccctaccgcgatcaggacgagctgccgatcttcgacacccgcgacttcaccttcagctggggccagctgttccgcgattctcgctataccggcgccgatcgccagaacgacgccaaccagctgaccatggcgctgagcacccgcttcatcgaccagaccaccggcaaggaacgcttctcggcctccatcggccagatccagtacttcgacgaatcgcgggtgaccgtcaccccgggtggcgcgccggtggagaagggcaagtcggcgtggatcgctgacggcaactacatgatcaacgaccgttggaccctgggtgccacctaccagtgggaccccaagtacaagcgcgaggatctggccagcgtccgcgcccgctacctgatgcccaacgatggcgtgatcaacctcagctaccgttaccgcatcaactccggcgccccggccaccgccaacaagcatgaccgcacgctgctggaacaggccgacctgtcgttcctgtacccgctgaatgcgcgctggagcctggtcggccgctactactactcgctgcaggacaaggaaccgctggagatcatcgccggcgtccagtgggacagctgctgcctggccgtgcgtgcggtcgcccgccgctacgtccgcaaccgcgaaggcgagatgaacaacgccatccagctggagttcgtgctcaagggcctgagctccctgggccaggacacggaccgtaccctgcgccgtgctatcctcggctacaaccgcgacgacctctatctcgtgccgccgagcaacaccggggcgacccgggatgactacgatccgaacctgatcccatga

SEQ ID NO: 496813 - DNA, 1347 bp, Stenotrophomonas maltophilia
atgaccaagcgcttccccgttcttctcgcctcgctgctggcggtgtccagcgtgtccgcccccctgcaggtgcttgcccaggaggcgcagccgcttgaccgcatcgccgccgtcgtcgatgaggacgtgatcctgcagagcgagctccagcgtgcgatcgccaacatcaaggcgcagtacgccggccgtgaaaaccagctgccgccggaagacgtgctcagccgccaggtgctcgagcgcctggtgctggtcaagctgcaggtggcccgcgcccagggcagcggcatccgggtcagcgaccaggaactgaaccaggcgatgaactccatcgcccagcagaacggttcgaacctggatgccctgcgccagcgcctggcccatgacggcatcgacttcaacgatttccgcgcctcggtgcgtgacgagatcaccgtgcagcgcctgcgccagagcttcgcgcagagccgcatcagcgtcagcgagggtgaagtcgacgccgcgctgaagcagcaggccacggtgggcaaccagtaccacctggcgcacatcctgatcgccctgcccgacggtgccaacgccgaccagatcgccaccggccagaagaaggccgatggtgtgaagaccctgctggacaagggcgagctggacttcaacgctgcagccgtgcgctattcggacagcccgaatgcactggaaggcggtgacctgggctggcgcagcctggatgaaatcccgcaggcctttgcccagatgatggaaaagatgaagcccggcgaagtggtcggcccgatccgtggcccgagcggcttccagctgctgaagctggtggaagtgcgtgacgccagctccgccgccgccggtgagcatacggtcaccgaattccacggccgccacatcctggtgcgcgtggacgaccaccagaccgacgccgccgccaaggccaagatcgacaccctgcgtgcccgcatcgccggtggtgccgagttccagaccgttgccaaggaatcctccgaggacaacaacagcaagggccagggcggtgacctgggctggttcccggccgacgcgttcggtccggccttcggccagcaggtggaaggcctccaggacggtggcgtcagccagccgttccgtaccgatgccggttggcacatcgtgcagcgcgtggcgacccgccagaccgacgtgaccaccgacaaccagcgtgcccaggtccgcgagaccatcggccgccgcaagctggaagacgagtacaaccgcttcctgcaggaactgcgtggcgaagcctacgtcagcttccgcagcggcgaccgcgcggaaaacaccgccaccccgccgcagtcctga

SEQ ID NO: 496814 - DNA, 981 bp, Stenotrophomonas maltophilia
atgcgccccgagctcgctctggtaccgggcgagcccgccgggatcggcccggagctatgtgtccgcctcgtccagcagccgcgtgaagattgccggctgctggccttcgccgatccggacaccctgcacgcggccgcggccgcgctgaacctgcccctgcagctgctgcccgaggacgccgaagcacgcgcccccggcgatctgcgcctgcgcgctgtccgcaacgctgcgcccagccgcttcggccaggccgatccggccaatgccggcgcggtcatcggcgcgctgctcggcgccggccaggcctgcctgtccggcgaactgcacggtgttgtgaccggcccggtgcacaaggcggtcatcaatgaaggcggcatcgcctacagcggcaccactgaactgctggccgaccaggccggggtgaaggtggtgatgatgctggccaaccacatcgtgcgcgtggccctggccaccacccacctgccgctgcgcgaggtggccgatgcgatcaccgcgcccggcctggagcacgcgctgcgcacggtgcacgccgcactgcgccgtgagttcggcctgcctgcgccgcgcatcgccgtgctcggcctgaacccgcacgccggcgaagatggccacctgggccgcgaagaactggatctggtcatcccgctgctgcagcgcctgcgcgcggagggcatggacctggtcgggccgctgccggccgataccgccttcctgcccgccaagctggccggcttcgacaccgtgctggcgatgtaccacgaccagggcctgccggtactgaaatattccggcttcgaacaggcggtgaacctgaccctgggcctgccctatccgcgcgtggcggtggaccatggcaccgcgctggagctggccggccgcggcatcgccgatccctccagcctgcaggcggcaacgacgctgtgtgcgcagcttgcgcggcaacgtacactgggcgcatga

SEQ ID NO: 496815 - DNA, 804 bp, Stenotrophomonas maltophilia
atgaattccccgcattccccctccggcccggtgttcaccgcaccggccaagaagcagcttggccagcatttcctggccgaccgccactacatcgacaagatcgtgatggcggtcaacccgaaagacggcgaccgcctggtcgagatcggccctggccagggcgcgatcaccctgccgctgctgcgcgtgcaccccacgctgacggtgatcgagttcgaccgcgacctgatcgcgccgctgaccgccgccgccgagccgctgggcgagctgaccatcgttcatcgcgacgtgctgcgcgtggacttcaccgaactggccgccggccagccgatccgcctggtcggcaacctgccctacaacatctcctcgccgatcctgttccatgcgctggagcatgccgcggtcatccgcgacatgcacttcatgctgcagaaggaagtggtcgaccgcatggcggccggccccggcagcaaggtgtatggccgcctcagcgtgatgctgcaggcctactgccaggtgacctcgctgttcgtggtgccgccgggcgcgttccggccgccgccgaaggtcgattcggccgtggtgcgtctggtgccgcgtgacccggccgcgatcaacatcaacgaccacaagcgcttcgccgaggtggtcaaggccgccttcgggcagcgccgcaagaccctgcgcaatgccctgaacaacgtggtgtccgccgagcagttcatcgccgccggcgtgcgtcccgatgcccgcgccgaacagctggacgtggccgaattcatcgctttggccaatgcctcctga

SEQ ID NO: 496816 - DNA, 384 bp, Stenotrophomonas maltophilia
atggaagacgctgacgtttatgccatctccgtcgaagtcgcgccgcgcttcctcgacgatcaatccgcgccggaagacggtcgctttgcgttcgcctacacgatccgcatccacaaccaggggcgggtcgcggcacgcctggtcgcgcgccactggcgcatcaccgatgccaatggtcgtgtcgagcatgttgatggcgacggggtgatcggcgagcagccgcggctgcgccccggtgaagacttccgttacacgtccggtgtcatgctggggaccgatcacgggaccatgcaggggcactacgacatggtcgccgacgatggcaccgaatttgccgcgccggtcgcacccttcgtgctggccgtgccgcgtaccctgcactga

SEQ ID NO: 496817 - DNA, 1017 bp, Stenotrophomonas maltophilia
atgagtgtgtgggcgatcggcgacctgcagggctgctatgacgtcacccagcgattgctggagaagatccgcttcgacccggcgcaggacaccctgtggttctgcggcgacctggtcaaccgcggcgggcagtcgctggaaacgctgcggctggtgcactcgctgcgcgagcacagcgtggtggtgctgggcaaccatgatctttcgctgctggccgtcggttcgcgtaccgaagaggaacagcgcaaggtcaacccggacctgctgcgcatcgtgcaggccgaggaccgcgacgaactgctggactggctgcgcctgcagaagctggtgcacgtggaccgcgagctgggctggatgatggtgcacgccggcctggcgccgaagtggaccacgcagatggccgagaagcatgctgccgaggtcgaggtgcaactgcatggcgccggctaccgcaagctgttccgcaacatgtacggcgacaagccgagctgggccccgaacctgtccggttacgaccgctcgcgcgcgatcatcaacgtgctcacccgcatgcgctactgcaccccgcgggggcgcatcggcatcgaggacaagggcacgccgggcacgcaggaacaggggctttatccctggttcgaagtgcccggccgggtcgagcgcgacctcaaggtcgtctgcggccactggtcggcgctgggcctgaccatcacccagggcgtgcacgccatcgacaccggtgcggtctggggcggcaagctgaccgcgctccagcttgataccgacgagctgcgcgtagtgcaggttccgggccgcgacgtaccggcacccgtgcccaacgcccgcccgccggcgcgaccggcgcacgagcgccccggcgccgcgacgcagggcaaggaacagggcggcaacgccgctgccaccccgggcaaccgtggcccacgccgccgtcgccgtcgtggtggcggagggggcggcgcgggtggcggcacccacaacaatcccccgccgcaggcgtga

SEQ ID NO: 496818 - DNA, 663 bp, Stenotrophomonas maltophilia
gtgacgcggcgcggctgggcaccagggacggtgctgctgctgacgctggccctggccagcggctgccagcccggctcgccgcctgctcccacggctgcggatggtgccgcacatgcgccgacgcagccgcaggccccttcgccgccactggtggccgcagcccgcgcgcaggtcggcgtcaccacccgttacgatcctgcttaccaggtactggcctatcccggcggcgacgtgccactggatcggggcgtgtgcacggacgtggtggtgcgcgccctgcgcgatctgggcctggacctgcaggcacacgtgcatgaggacatgcgcggcagtttcagtgcctatccggcgatctggggcctgtcacggccggaccgcaacatcgatcatcgtcgtgtaccgaacctgatgcgctggttcgagcgccagggctggcagaaaccggtcacggccctcgccgccgactacgcggccggcgacatcgttgcctggaagctcaatggcaacggcctgctgcacgtgggcatcgtttctgaccggcgcctggccaacggcacaccgctggtgctgcacaacatcgcgcgcggcacgcgcgaagagaacctgctgttccagcatgcgatcatcgggcattaccggatgccgttgcgacagtcccggtag

SEQ ID NO: 496819 - DNA, 501 bp, Stenotrophomonas maltophilia
atgagcgccctgaagctgtcgatgatcgtggcgctggaccgcaaccgtggcatcggccagggcaatgccatgccctggcatctgccggatgacttcaagcacttcaaggcgctcaccctgggcaagccgatcctgatggggcgcaagacggccgagtcgatcggccgcgtgctgccggggcggaccaacctcgtactgacccgcagcggccaggtgccgttcgagggcatgcgtgcggtggcgtcgctggacgaggcgaaggcgattgccgaaggcgagggcgccagcgagctgtgcatcatcggcggcggcgagatcttccaccagttgctggaccaggccagtgacctgtacctgacctgggtcgatgccgaagtccccgccgatacccatttccccgaagtggacgtgcaggactggcaggaagtgagcagcgagccgcacccggccgacgaacggcacgcctacgcgttccgcttcgtgcactacgtgcgccgctga

SEQ ID NO: 496820 - DNA, 795 bp, Stenotrophomonas maltophilia
atgaagccctacctggacctgctggcgcacgtgctcgagcacggcgccgagaagagtgatcgcaccggtaccggcacccgcagcgtgttcggctggcagatgcgcttcgacctcaacgaaggcttcccgctggtcaccaccaagaaacttcacctgcgctcgatcatccacgagctgctgtggttcctgaagggcgacaccaacatcggctacctgaaggacaaccaggtgcgcatctgggacgagtgggccgacgagaacggcgacctcggcccggtctacggcaagcagtggcgcagctgggccaccgccgacggccgccagatcgaccagatgcagtggcttgtggacgagatcaagcgcaaccccgattcgcgccggctggtggtcagtgcctggaatgtgggcgagctttcgcagatggcgttgatgccatgccataacctgttccagttctacgtggtggacggcaagctcagctgccagctgtaccagcgcagcggtgacatcttccttggcgtgccgttcaacatcgccagctacgcgctgctgacccacatggtggcgcaggccaccggcctgggcgtgggcgacttcgtgcatacgctgggtgacgcgcacctgtattcgaaccatttcgagcaggcccgcgagcagctgtcgcgtgaaccgcgcgcgctgccgaagctgtggttgaacccggaggtgaccgacctgttcggcttccagttcgacgacatccgcatcgatggctacgacccgcacccggcgatcaaggcgccggtggcggtatga

SEQ ID NO: 496821 - DNA, 888 bp, Stenotrophomonas maltophilia
atgatctatttccacgacatcgaccccatcgccctttcgctggggccgatcaaggtgcactggtacggcatcatgtacctgctcggcttcaccgcagcgtggctgctgggccgcacgcgcattgccgcggggcgcctgccgggcgtcgatgccaacggcttctccgacctgctgttctacgccatgctcggcgtggtgctgggcgggcgcatcggctacatgctgttctacgcgctgggcgatttcctgcacaacccgctgctgctgttcaaggtgtgggacggcggcatgagcttccacggtggcctgctcggcgtgctgggcgcctgctggtggtggtcgcgcaagcacaagctgcatttcttcgacaccatggatttcatggcgccgctggtgccactgggcctgggcttcggccgcatcggcaacttcatcggcgccgagctgtggggcaagtacaccgacgggacctggggcgtggtgttcccgtccggcctgccggccccgctgaaccagctcgaccacgcgacgctgcaggcgcagttcgccaccggcgcattgaacccgtacgcccgccatccgtcgcagctgtatgaagcgttcctggaaggcctggtgatgttcgtggtgctgtgggcggtgtcggccaagccgcgccaccgctacctggtgggtggcctgttcgcgttgatgtacggcctgttccgcttcgcggtggagttcgtgcgcatgccggacaacggcgtctacgtggccttcgactggctgacccgtggccagatcctcagcctgccgctgatcgccttcggcctggtgctgctggtgatgtcgcgccgcgcgccggtattgcagccgcagttgccggtggctgccgagggcaatgcatga

SEQ ID NO: 496822 - DNA, 495 bp, Stenotrophomonas maltophilia
atgatccaacgtctgttccgccatgtattctcgccctcggtgcggcgtgccttcccgccggccacattgcaggcgatcaccggggccatcgcggccggtgagcagcgccactgcgggcaggtgatgttcgcggtggaagcggacctgccgctgggtgcgctgtggcacagggtgaccccgcgccaggccgccgagcatgcctttgcgcgcctgcgaacctgggataccgcccacaacaacggcgtactgatctacctgctgctggccgatcacgcgatcgagatcgttgccgaccgtggcctgcacggccgggtcagcccggcgcagtggcagcgggtctgcacccacctgcgcgagggcctgcgcggcgcccatccggtcgaggcattgcaggatgccatcgacgaggtctccagcctgatcgaagggcactttccggcctcgatgcggtccgagcatgacgcgttgcctgacgcgccccagatcctggactga

SEQ ID NO: 496823 - DNA, 627 bp, Stenotrophomonas maltophilia
gtgctggccgatcgcacccgtcgcttcgacaagggcggcgagcagttctacgaccagatctcggcgctgcacaagtcggtacgcagctccaacccggatgccgcgctgtactggctgacccgcatgctcgatggtggctgcgacccgtcctacctggcgcgccggctgacccgcatggccatcgaggatatcggcctggccgatccgcgcgcgcagagcatggcgctggaagcctgggacatctacgagcggctgggcagcccggaaggcgagctggcgttcgcgcagctggtgctttacctggccagcaccgccaagtcgaacgccggctatgccgccttcaaccaggccaaggccgacgtgcgcgagagcggcaccgaagaagtgccgctgcacctgcgcaatgcgccgaccaagctgatgaaagagctcggctacggcgccgagtaccagtacgaccatgacgccgagggtggcatcgcgctggaccagacgggtttcccggatgcgatgggcgaacgggtgtactacaacccggtgccgcgtggcctggaaatcaagctgaaggaaaagctggaccggctgcgtgccgagcgcgaagcggcgagggcggcaaagggtcgctga

SEQ ID NO: 496824 - DNA, 372 bp, Stenotrophomonas maltophilia
gtgcaggaaatgattctgccgttgaagcgctacgcccagttcgaggggcgtgccaaccgtcgtgagtactggatgttccagctgttcatgctgatcgtctccgccgtcctgatggtgccgctcgttgccgggctggtgatgcagtccgacgtcctgggcatcgcgtcgatcatcctgtttgtcgtgttctggctggccacgttcgtgccggtcatcgccgtcaccgtgcgccgcctgcacgactgcaaccagtcgggctggatgtacctgctggccttcgttccgttcggcggcctggtgatcttcgtattcgcgctgctgccgggcacgccgcaggaaaatgcttatggtccggtgccttcggggccgtga

SEQ ID NO: 496825 - DNA, 375 bp, Stenotrophomonas maltophilia
ttgaagcacaccaccctgatcgccctctccctcggcctgcttgcgccgctggccgcccatgccgcacaggacctgtcaacgctctaccaggcctttgaagaagccggcaattcgtcactgggcatggaccaactcaaccagacggtgacattcactgccgtagccctgagcgtttccagcaacctggcgggcgagccgctgatcgaggccggcgacgaccagggcaatgtcctggcccgactgaccagcgacgacgaacagcaggcggccaagctgggcgcactggaagaaggcgcgacgttcaccgccagctgcacgctgcagttcagttccggcacggactacctgtccttcggcgactgcaccatcaagtaa

SEQ ID NO: 496826 - DNA, 1029 bp, Stenotrophomonas maltophilia
atgaagcactttgttccgccttcgcgccgtggtccgctggcccgcggcctggtcgccttgatgatgggtctgctcctggccaccccatatgcccatgcacagcagcgcaacccgctgcagaagatcggccgcaccgtgctcgacgagccggcggccagctatcgcttcgagcatttcgtggtggacagcccggaccagcagcgccgttggcgggtgaacctggcgatcccggccaaggccggcaaggtgtcctctccggtgctgtacgcgctggacggcaacgccgtcgcgatggtcctggatcagccgttgctggccgagctggccgcgcgcaaggcgccgccggtgctggtgctgatcggctacgacaacgacctgcgcatcgattccaaggcgcgcacccgcgactacaccgcgtggatcgaccgcgccgacgatgagagcggtacgacccaggcggtcggcggtggggctgccgcgttcctggatgtgatcgagcgccgcatcaagccggaagtggagcgtcgcgcacgcatcgacacgcagcagcaagcgctgtggggccactcactgggtggattgttcgtgctcaatgcgctgtacacgcgtccggccgccttccagtcctatctggccgccagcccgtcgctgtggtggagccagggtgcggcgctgggggatccggaacaacagttcgtgcagaacgtgcacggccaaccggcaaggctctggctgatgctgggcggtgccgagcgtgtcggtgatcgcggcaagcgcgacatgaacaatccgcgcgtggtcgcgcacctgcgccgcatcggtggcgccaccccggatgcggcgatgcagctgtccgagcgcttgggcaaggtgccgggcctgagcgtgcagtaccgcgagttccccggccttggccacggcccgatgctgccggcgtccttccatgcggcgctgcatgagctgtacggcgtgaccgatcgcagcgccggcgatggcgcgcccaatggcggtgacaacgccgccgaatga

SEQ ID NO: 496827 - DNA, 1377 bp, Stenotrophomonas maltophilia
atgtcgttccgtccgtctctccgtcttacctctctcgctgccggcctgctgctggcagtgaccgccaccgcgcagccggtgttcgaccagccggccaacgccaccttcaagggtgaggtcgtctcacgcggtgagaacgtggttcccggcagcaccgccgacgtggtcggccgtggtttcgtgccgggccagaaggtcagcctgctgcgtggcgacagcgtgctcaacgcacagccggtggtggtcgatgccgatggcaacttcaagacccagctgagcattccggccgacgcggtgccgggcacccacccggtggtggtgcgcgccagccagccggctgcggccacggtgctgaagctgcgcgtgtcgccgcagttgccgctgtccggccaggcgcagttcgccacccggtccagcaagctggtgccgggcctgtaccagtccgcctacagtgccgccagcaacgcagtgttcgtgacctcggcggtgggtcgcccgccggtgacccagtcgcagctgctgaagctggacccgacgtcgctgaaggtgaccagggcgatcaccccggcgcaggtaccgggcagcaccaatggcgcggtctatgcggtctacggcgtgggcgtggatgacaccaacggcaatgtctgggtgaccaacacccgccagaactcgatcgcggtctaccggcagaaggacctgtcgctggtccaccagttcccggccgacgctgtgccgcacgcgcgcgacgtggtggtcgatggcacccgcggcaaggtgttcgcctcggcgacgggcgaggaccacctgtcggtgttcgacgccaggaccttcaaggagctgccggcagtgacgctggaatccggcgtggacgacggcacgttcacaccgatgagcctggtgctggacgagaagggcggcaagctgttcaccgtcagcatcggcaccccggaagcggcggtgatcgatgtggccagcggcaaggtcgagaaggtcatcgatctgggtaattcgatcagtgcctcgggcgtggccttcgatgcggcacgcaaccgcctgtacgtcgcctcgcagggcaccgacaacctgctgatcgtcgacgtggctgccggcaaggtgctgcatgacgtgccggtcggcgccggtgcgctgaacgtcgccttcgatgatgcctccggcctggcctatgtcagcaaccgtggcgctggcacggtcaccgtggtgaatggtgacggcaaggtggtcgccaatcttgatggcggcacgctgccgaaccacgtccgcgccgatggcaagggcaacgtgttcgcggtgaacaagtcgcgcggcgctgaggacccgaagggtgaccgcatcacccgcatcaccccgaagcagtaa

SEQ ID NO: 496828 - DNA, 1047 bp, Stenotrophomonas maltophilia
atgaacatcgcgtcccgtctgcgcctgtgtgcgcttccgttggctgtttcgctggtactggccgcctgtggcggcgcgtcgacaccgcctgaaggccagaaggccgccgagccgcccgccgcaccggccgctgccgaaaccgcgttgccggcaggctggcagcgcgtggccggtgccgagctgccggccgtgcatgaccagaaggcggtgctgccggccaaggtgcattccgatgacggcgccgatatcgaggtgaccgataccagccggatcattgccggtggcgacgacgtcatcgcggtgatcgaagcacttgggttgggcacgcaggtattcgccgcgccgaccaacaccaccacccaggccggcctggccgcgccgcaccagttcctgttcaaccgcaccactggcgtggagggcgtgctgagcctgcagggctcgctgttcctcggcaacagcctgcgccgccacaccgagctggccaaaaagctgcgcgaagtcggtgagccggcggtggtcatcgatgatctgcagccggcgccggacaaggtgcgcaaggtcgccgccgcactagggctggccgaagcggggcaaacactggccacgcaggtgcagcgccagctcgacgaggctgcagcgattggcaagggcctgggccatgcgccacgactgatccacgtatcggccaccggcgctggcggctcgcccactgttgccggtgccgacagcgcgtcagcgcagctgatcgcgctggccggcggcatcaacatcggcaccgaggccggggtgaagaactactcgcagctgagcaacgagggggtggtcgccgcggcaccggaggtgatcctggtgaccgagcatgacctgcagctgttcggcggtgcccagggtttgtggaaggcgtacccgacgctgaagcagacgccggccgggcaggccaatcgggtctgggtgatgccggatgtgcagctgaagtacaccagcgtgggttctggtgcgggcgcgctggcgctggccaaggccctggcagccttgccgaaggcatga

SEQ ID NO: 496829 - DNA, 999 bp, Stenotrophomonas maltophilia
atggtggcgttgctggcgctgctgggggcagtgctggcgtcgttcgccgtgggtccgttgcggttgccgccgctggaggtgatgcaggcgcttgcggtgaagttgggcctgcttgacccaggggcagtccgcagccgtgatctggccgtggtctggcagctgcgcattccgcgcgccctgttgggcgcgatggtcggtgcgtcgctggcgatggccggtgccagcctgcagggcctgtttggcaatccgctggccgaccccggcatcgtcggtgtcagccagggtgctgcgctgggtgcggtggctgccattgttctcggcgctgccggtgcggccggctggctggtgccggtggcagccttcgtcggcggcgcgctggcgatcggcctgacctatgcgctggcccggcccggcaaaggcagtgggaatgccacgctgctgctggtcggcatcgcgatggccgcgttctgctcggcgctgattggtttccttacttacatcgccagcgaaagcgagctgcagtcgctggtgttctggcagatgggctcgctggcgcgcgccaactgggccgacgtggccgcggtggtgccgctgtttgcgctcggcgtgtttgcgctgcagcgactggccacgccgctggacatgctggcgctgggtgagcgccaggcgcagcacctggggctggacgtgacccgtacgcggcgtcgcctggtcgcgttcagtgcgctgctggtgggcgcagcggtggcgttcgcgggctcgatcagcttcgtcggcctggtggtgccgcacgtggcgcgactgctggtcggcccgggtcatcgctggctgctgccgttgtccgggctgctcggtgcgctgctgatcgtggtggccgacaccgccgcacgcacgctcgatccacctgcggagattccgctgggcctgttctcggccgcgctgggtgcgccgttcttcctctggctggtgctgcagcagcgccgcaaggcggcgccatga

SEQ ID NO: 496830 - DNA, 762 bp, Stenotrophomonas maltophilia
atgagcgtgctgctgaaactgcaccaggtggtggtgcgccgccagcagcgcgagatcctgcatggcatctcgctggcgttcgagccgggcacggtgaccgcgctggttggcccgaacggcgcgggcaagtctacgttgctggcggtggcggccggtgacctgcgcgccgatgcgggggaggtgagcctgctgggcaagccgttggccagttacaaggcggggccgctggcacgcgagcgcgcggtgatgccgcaggaacatggcgtgcgcttcgccttcagcgtggaagaagtggtggcgatgggtcgactgccgcatccgcccgatccagccgtggacgacgcccaggtggaagcggcaatcgatgccgccgagctgcaggcgctgcgcctgcgcgaggtgcagcagctgtccggtggcgagtccgcccgcaccacgttcgcgcgtgtgctggcacaggacacgccgttgctgctgctggatgagccgaccgccgcgctggatctgcgccatcaggagcgcacgctgcgcagtgtgcgcgcctgtgccgaagccggtgcgtgcgtgatcgtggtgctgcacgacctcaatctggccgccggctacgccgaccgcatcgtgctgctggagcagggcagggtggcggccgatggcacgccgctgcaggtgctgaccgaagacaacctgcagcgggtttaccagcaggatgtggtggtgctggagcatccgcggcgcggggtgccgctggtagtggtgacatag

SEQ ID NO: 496831 - DNA, 750 bp, Stenotrophomonas maltophilia
atgatctgtagcatttcgcgcggcactgtgctggccgtgttggctggcttcgcaggcgctgcgactgcggcttccacctcaccggtttcgctgaccgatgcagcggagaatgcctcgctgatcgagatccggcattccgctggcgcgggctcccctgttgcgtccatccggacgcagtacttcgccaacgaggaaatgtccgtgagctgggacgaccagcaggtgctggtgctttgcaaggaggcggcgtacctgcagattccccctgccaagctcaaggccgctgcgttgagcaccgagcagcggcagatgatcgtctaccaggcgctgatgtccggcctgggcgccgtcgcgggcgtagtcggcccggcgggcgaggtggtggcggtggcggatgacggaagcgagacccgcagcgttggcgaaaacccttgggcgtacggtatcgagcgctacgacgtcaccacccagcgcatgccgggcggcgcgctgcgcgtgcattcccgcaagaccgcgaccgtgaacacgacgcccccggcgagcccggacgacacgttcagcaccgaggatgaccaggcggcacgcctgtccgaactggccccggtcggtagctggaccgagctggtgatccatggcggcccacggctgccgcacatggacccggcgacgtcgctgaaggggtggatgtcgatgggtgatgaccaggcggcgaccgtggccgaggcgcgcacgctgcacggctgcaagtaa

SEQ ID NO: 496832 - DNA, 2037 bp, Stenotrophomonas maltophilia
atgaacacccaagtcctttcccgccgtcgcaaccttggcatcattgcccacatcgacgccggcaagaccacgctgaccgaacgcctgctgtggaaaagcggcgagatccaccgcgtcggcgaagtacacgacggcaacgcgaccaccgacttctcggcgatcgagcgcgaacgtggcatcaccattggcgcggccgccgtgcaggcgcagtgggcgccgcgcgacctgccgccgcatcggctgaccctgatcgacacccctggccacatcgacttcgccatcgaggtcgagcgttcgctgcgggtgctcgacggcgccgtggccgtgttctcggccgtggacggcgtgcagccgcagtccgagacggtgtggcgccaggcgcgtcgccatcgcgtgccgctgatcgctttcgtcaacaagatggaccgcgtcggcgcttcattcgagcgcgtgctggagcagctgcaggacaaactgcgggcgcggccgtgggcgctgggcgtgccgttgggcagcgaaagtggcttccacggctgggtcgatctggtcgatgagcgcgtgctgcagtggcaggatggtgccgcaaccacggtgaccccgtgggaccaagcggcgcgggcccagtggcaagcccaacgcgatgcgctggtcgaggccgtggccgatcacgatgagcaactggccgatgcctggctggaaggtcgcgtgatcgatgccgggcagctgcgcgcggcgatccgccgggcgacgctggcgggtgcgggcgtgcccgtgctggccggtgctgcgttcaaggacaagggtatcgagacgctgctggacgccgtggtcgattacctgccgtcgccgctggatcgccctgccgtcagcgccgaaagcgatgagggcgaggtcgtgctgccgccggacccggacggtccgctggccggcctgctgttcaagatcacccaccagcagcacggcgcgttgagcttcgtgcggctttactcgggcaccttgaaggtgggcgatgcggtggccagttcgcagcatccgcaggggcggcgtgtcagtcgcctggtgcgggtgcaggccgaccagacccacgacatcgaacaggccgtggccggtgacatcgttgcagtgctgggctggaaggatgcggtcagtggtgaaacgctgagcggtcgtgcgcagccgctgcgcctggagaacatccaggcacaggcaccggtgctggcgtggcggttggagccggcgcgtgcggccgacctgatccggatggcacagggtttggccagcctggcccaggaagatccgtcgttccgcgtcgagaccgatcgcgacacggcggagaccctggtctggggcatgggcgaactgcacctggaggtgatggtcgagcgcctgcgcagcgaatggaaggtcgacgtaggcgtaggtgcgccgcgcgtggcctaccaggagacgccgatgcgtgcgatgaccggcgtcgtcgggcggctggtcaagcagaccggcggccagggccagttcgcgcacgtggtgctggatgtatcgccgcgcgaggacgaccaggtcgtattcaacgaccgcatcgtcggtggcgtggtgccgcgcagcttcatcgcggcggtggagaagggcgtgcgtgctgcgctgtcggaaggcccccagggccatccggtggtcggcatcgaggtcagtcttgtcgatggccagacccatgccaaggactcctcggagatggcgttccatcgcgcaggcgccgaggcgatcaaggcggcgctggccgaaggcggcacgcagctgctggagccggtgatggcggtgacggtgcattcgccgtcagcgtcggtgggtgatgtggtcggcgacctcaaccgccgccatggtcgcattgcccgcatcgacgatcaggatggtcgcgccgaggtcagtggcttcgcaccgctggcgcagctggtgggctataccacctcgctgcgttcgctcagccaggggcgggccagcagcgaggcgcacctgcatggctacgagccggtgcgcgctgcatga

SEQ ID NO: 496833 - DNA, 273 bp, Stenotrophomonas maltophilia
atgcgtgatgacaaagaccccggaaccctggagctgaccctgccgcgcaagcgcggtcgtccgcccaagttcgggtatgcgatgagcgatgcgcagcgggccgcacgctatcgtgcgcgccgggcagggcaggccaaccacgccgatgtgcgctcctgcagcgacatggtgctgctggacaagatccgtgcagcggtgagcgcgcgcgacaccgaactggccggattcctggtccacgtgctctggcagcgctaccccctgcagctgaaatag

SEQ ID NO: 496834 - DNA, 756 bp, Stenotrophomonas maltophilia
atgaccaccaccagcgacaccaccaccgaagcggcgccgagcggcgctcccctgttctatacccgtccggtgccgctgcaggccgatgtgcacgccgatctgcgcatcctgccgggcaagctcgagttcgccgccggcaacaacgccattccgctggtgctgggcgagttctcgctggcgctgcatcatttcccgatcctgttcgccggccccggtgcggttccgatggctgccgtcggcgtgtccgaccagaacctgttcatcaaggacggcctgtgggaagacgaggcctatattccggcctacctgcgccgccaccccttcatcttcatcgacaccggcgcggagaatgacttcctgctgggcatcgacgaagaaagcccgcgcgtggtcaagggcggcgaggaaggccagccgctgttcgttgacggcaaggccaccgaaatggtgcagcaggcgctggagttctgcggccggtacacccgcgagcacgaacagaccctggccttctccaaggccctgaccgacaacggcctgctggtcgagcgcaacgccaccgtgcgtaccccggatggccgcgagttcaacctcaatggcttcctggtggtggacgtcgagaagttcgttgcgctgccggaagccaccgtggtcgattggcaccgcagcggctggctggcactgatccaccagcacctgatgtcgctgggtcgcttcaatgacctgacccgtcgccaggtcgagcgcctggccgcctga

SEQ ID NO: 496835 - DNA, 2328 bp, Stenotrophomonas maltophilia
gtgaggcgccagccgccgttgcgccgccgcttcctgtccacggggctgctggcgctccttctcctgccggctgcctcggccgaagatatccgctcgccacgctggctgccgggcagcactgtacgggtcgccacgactccctccctgcgccccctgcccgcggccctggccgatccgtcatcaccgccaacgctcgcccatggctatgccaacctggtggcgcggcacgcccaattccgtttcctggaacacccctacccgacaaccgccgcatcgatcctcgctgtatgccatcacgaggctgacctggtcatggtgtttggcggcgcaaggcaccaggcgctgccctgccccggccttgccgcgtccaccccgttccgtggcggcgccaccctgttggccggacgcgccggcgagtggctgccacgggagatgcgcgaactcgacggccgggtcatcgccgtcgttgaaggcgggccctacgccagctggctgcacgcgcatcacccgcaggtccggctgcggcagctgccagaccggcatgcagcactggcggcagtcgaagccggcctggcggacgtggcgattggcctggagcccacgctgcgccccctggttcgacgccatttcaatggcagcctgcgcctgcagccgttcgatagcggtttctccaccgacctttacctgctggttcgccgggaagaccagcaactgcttgggcgcatcgaacaggcattgcgggagatcacactggaagagcacgcaggcctgctccacctatgggcaggccagaccctgcctgccgcggccgggaatgcactggactggatgcaggcgtcgcccccgcgcgggtggctgctgctggccccactgctgattgccctgccgctgctgtggctcgcaatgcgccacctgcgggcgcgcggtgaccgaagcagcgcgcatgccatcggcgtgatcagccacgagatgcgcaactcggcgcaggccgtgctgacctcgatcgagctgctggggcaatcgacattgcccaagggcgagcgtgacctgctcgccgctgccagcagcgccagccaatccctgcgcagcctgttgaatcgcgcactggatttttcgcgccttgcgagcggcgctttcaagccgcatgcgcaaccctgcgatgcaacccagctgtgccggcaggctctggaggcaatccggccacaggcccagcggaaaggcctgcagctgcatctcgatgcccagggcgcatccccgtcgaacatcctggtggacgccgatgcgctacgccagattgccagcaatctattggcgaacgcagtgaagttcagcgattccggccgaatcgagctgcgcctgcaactgatgccggcggcgcgtccgcgggcgctgctgctggaggtgatcgacagcggcatcggcatcgcgccggcgcaggtagccaccctgttccagcctttccagcaaggcagcagcggacagcggcgtggcggaagtgggctggggctttccatcgcgcgcgagctggcccgcgcaatgggcggcgacctcaccgtgcacagcgtgctgggccgtggcagtcgcttcatcctgcgcctgccggtgtgcccggctggcaccggcgtggatgcccaggacatgcccgtgggcgatacgccactggccggactgcacctgctgctggtcgaggaccacgagctcaatcgccacgtgatcgccgaacagctgcggcgctggggcgcagaggtgtgcgccgtgaaagatgcggccagtgccctggccgaacaggcacgacagccccgctccgttgctctgatcgacattgggttgcctggcgccgatggtcacgtgctggcgcgcgagctacgcgggtctgccgggcgcaccgttcgcctgatcgcattgtctgcccgcaccggacggcgtcatcgcgcacgctgccaccgctcgggcttcgacgcggtgctggccaagccgctgcgcgccgcccagctgctgcctgcgctcggcattgcgcgaccagagggcctgggcgcagccgcgcagacgattgacatggacgcggcctacatcgccgacatccacgatgagctcggcaacatggagcgggttattgatcgagcggatgcatcggcactgggccatcacgcgcaccgattgcagggcacgctgcagatgctgggccaatgcgagcatgcggccatcgcggcggagctggtcgacctggcgcatgacgccgcgccggactgggccgatgcgcggcgcctgctggacgtgctgaaggccggacagggctcccgcccagcgggaaccctgccaatgccttga

SEQ ID NO: 496836 - DNA, 651 bp, Stenotrophomonas maltophilia
atgggcgccgaccacctcccgcgcatgaatggatttcctgcaccgcgtcggcttcgcctggcgctcctggacgatcacgaagtcgtccgtcgcggcaccgccctgcacctgtcaggcgatctccgcttcgacatcgtcgccagccacggttgcagcaacgaactgctctgcagcctgcaacgcacaccagtggatgtggccatcatcgatctcacgcttgcccgtgacgacctgggtagcctcgagctggttgcgctgctgcgccgggaattcccgcgcacgccattgctggccttcgccacgctctgccccaccaccaacctcaacagcctgatcgatgccggactcaacggattcgtcagcaaggccgaaccgcttgctgcattgtccgacgccatcgtacgtgtttcccagggcctgacccgggttccaccggacgtcaggctggccggcgaccgcggcgagctcagccgcaacgagcgcgaagtgctgggcctgctgctggaaggcttgacggtctccgagatcgcattgcggcggcaccgcagcatcaagactgtcagcacgcagaaggttgctgtgctgcgcaagctgggattgcgcagcgacgtggaaatctacgcactgcgcgaacgactggagacaccgtga

SEQ ID NO: 496837 - DNA, 3474 bp, Stenotrophomonas maltophilia
ttgaaggaagaacgacgcaacgcgttgcaggccagtcatcgcgcgatcctcagcttctggcacagggttgagttcttcatcccctacgatctgcagggccaggtccttgagtcgaaggacgcggactggagcgtacggcagctgtccagggatcagctcgagcgattggacccgaaggatctgtggtccccacccctgccattcggtcgcaggctgagcggattcgatgtctacctcggcatattcgacaaagcccagctggccgatatcacccagcgggtactggctgagacgccaagcggagacgagtcgctggaacaggacgaacgggccgaactggaaggcctgacctgcgcggccagcctgcgggcaagcgccgagggcgtgctgcagctgggtgaaatctcggtatcgaccgttccgtgggcactgggcacgatctccaggcgtggcttgcagggcctggacttcgacgccttccaggcaagccttgaagcactcaagcgcgacgtagcaacgttccgcagcgccgctgccacccccgccggacagggtgagggcccaacgccctgcagccccgacgacctgttgcgcctgctcgacatcctgtgcaactggtcgggtcatgacccttccgcgggcgacgcgtccgctccgctgctggtcatccgggcgaaaagcgttgaagacaagccgaagccggaacaagcaccaaaagccacacccccagggcccgacaacgagtcaacggcggaagcggacgacgccgaggacgacgaggcccagcccgaagaggacgcggagatcagcatcctcaacagtttcttcgtcgaggatatcgcgcgggccatcggcgcactcgaccagggcaaggccagtgcgccgctacgcgcctatctgagcccattgcctgaaagccgacgcgaagacctttacaccccagaaggccatgtactgattgccgaccggctgcgcccgcgccacatcaatcggggccactggcccggcgatcctgcacacacgatgagcctgatgcagcagttcgctgtgaacagcatcttcgagcaggtgcgcgattcaggcatcttctcggtcaatggcccgcccggaaccggaaagaccacgctgttgcgtgaggtcttcgctgagaacatcgtgcggcgtgcacgtgcattgtcacagtacgcgacgccagccggtgcgctcggcccagcccgcgaagtgaacttcgaaggtgagaagccgtgcagggtctcgccactgaaggccgacctgaccggcttcgagatggtggtcgcatcgtcgaacaatgccgccgtggagaatatttcgcgtgacctgccgaagcgccggtcactgggcaagcccggagggtcgcgctggcgcaacagcacaggggacgtgaccttcgactacctgcggccactggcccgcaacctgctcgaatggaacggcaggggcgcctatgaacgaccggcggcagacagcgatgcctgggggttgatcagctgcgcgctgggcaggaaggccaaccgcgaggcacttgtgcgggccatcagcaggagcgccccaaaagatggcaaaaccccgaagggctacgaccgcgcccgccaccagtcgctctgggagtggcgggacaacccagcagccatgagcttccagcaggccaggcaggaattcggcaaggccgatgcgatcgtcaatggcctggtcgaaaagctggatcggcttgcctcgctcagccgtgaaatcagcggcaacgatgaggagagcttctgccggcaaacgacttctcagcttcgcgatgcacagcgcgcgcatgaggaagctgcacagcagtgccgtgcactcgagggccagcgcagcagatccgatgaacagctcgccctgctcaaggcgcaacgcatcctgctcaaggaagagaagcctggctggtgggcccgcatctttgaccggcagcgcgcgcacagccatgcggccgcaatggtgcagaacgcagatcatcaacaccgatggacccagcgcgggctcgaactcgggacgcaatgtgatacggcgcaacagcacctgggccgaaccgcgagcaccctggccgaggcatcggccgccgcgcaggcacgggcgcagcaatgggctggaatgacgcaacagctcgaacaactgaaagccgaattcggcaccgcgtcccatcccgccaacgcggccgaactggaagatcaggactggcagatcaagggagtctggaacagcgagcagctcaacgagcagcgcgccaacctcttcgtggcggcactgcagcttcaccaggcctggctgcacgaagtggtgcagaagggcggcggcttcgcccagaacgtcattgcactgtgccacctgctgagtggcaagcggctgcaggagccacgcgatgcgctggccatctggcagagcctgttcatgatcgtgccggttgtctccagcacgttcgcctcggtcgcacgccagttccgccacctggggccggactcgatcggctggctgttcatcgatgaagctggccaggccgtgccgcaggcggcagtcggtgcactgctgcgctccaggcgcgcggtcgtggtgggtgatccgctgcagatcgagccggtgttcaccgtgccggtcaagctgctgcaggcgctgggccgaaccagcgcactgcctgcaggcgtgaacgtctcgcccgacaagacctccgtacaggtactggccgacgaggccaacccgctcggtgcccgcatggagtcgggcggctcgccgctctggatcggcagtccgctgcgcgtgcatcgtcgctgcgtcgaaccgatgttctccattgccaacacgattgcctacgaggggaagatgatcttctccaacccctgggaacccagtgcggcgcggccacccgccgacagcctggacatcggcagcagcgcctgggtacacgcccccggccgcaccagcgacaagcaggtcgtgccgtgccagatcgacctggtgcagcaggcgttggccgcgctctatcacagcaccggaagccttcccccggtctacatcatttcgcccttcaagcgcatcaagaatgccctgctcgagcgactgcggagccaggacgcttggcttggcccggatgccccacccggcacgcaggcgccacgcaccaccgaactgcgcacgtggtgcagggagcgcgtcggcaccgtgcacaccttccagggcaaggaggagagcattgtctggatggtcctgggctgcgacacggacacggtgggcgcggcgcactgggcctccagcaagcccaatctgctcaacgtcgccgtcacccgtgcccagcaccgctgcttcctgatcggagacaccgcactctggggcggcctgcgccacttctcagacgcccatgccaaacagttgccccgcatcaccccggcgcagttcctgggtcgcatgtcgatcccccgcgtgcagactcgatag

SEQ ID NO: 496838 - DNA, 420 bp, Stenotrophomonas maltophilia
atgggtgactggtatgtgatcgcccacatcccctcatggccggagcgcgaagctttcgacgcggtggagagctacgcattgaagcccgacgggcgcatccagaccacgttcacctatcgcaagggcagcttcgacgccccccagaagtcgatgcaccctgttggacgggtcgagaaggacggcaacggcgccatctggggcatgcagttcatctggccgatccaggccgagtatgtgattgcctggctgcgcgatgactacggccagaccatcgtcgcgcgcagcaagcgcgactacgtgtggtacatggcacgcacgccacaggtgtccgagagcgactaccagcaggccgtgcagcgcatcgcggccatgggttacgacaccgcaaagctgaggcgcgtgccgcagtcggtgcgctga

SEQ ID NO: 496839 - DNA, 1299 bp, Stenotrophomonas maltophilia
atgcgcaaagaccctgtcgaatggatcctgcgcggcctgtattcggtcgtgctctacatcctgctgccgatcaccgtgtaccacctggtctggcgcggtttccgggttcgtgaatacttccggcgctgggatgaacgctatgcctcctatccgcagccgaccgggcagccgcgggtctggctgcacgcggtctcggtgggcgaggtcaatgccgccgcgccgctggtcaatgccctgcgccagcagcgcccggacatccgctgggtgatcaccaccatcaccccgaccggctccgagcgcgtacgcgcgctgtggggcgacgccctggaccatgtctacctgccgtacgacgtgccgggcagcgtcaaccgtttcctcggccatttccagcccagcctggcgctgatcctggaaaccgagctgtggccgaacatgctgttcggctgccgtgaccgcggcattccggtgtacatcctcaacgcccggttgtcggcgcgttcgctgcgcggctaccggttgctggcggcactgatccgccgcgcgctgcgcaccgtcacctgcgtggccgcgcagtcgcaggacgatgccgagcgcttcgtgcagctgggggcggatcccggccaggtgcaggcgctgggcaacctgaaattcgacatcgccacgccggatgtgcagggtttcgtcgaacagttccatgcgcgggtaccggccgctcgtccggtatggatcgccgccagtacccatgatggcgaggagcaggcggtgatcgacctgcaccggcgcctgcgccagcggcatccggagctgctgctgctgtgggcaccgcgacatcccgagcgtttcccgaaggtggaagcgctggcgcgcgaacagggctggagcgtggcgacccgccgcgtggaccagtggccacacgcggccacagacgtgttcgtcatcgacacccttggcgagctgatgccgttctatgcctgcgcccaggtcgccttcgtcggcggcagcctgcaggccatcggtggtcacaacctgctggagccggccgcgatgggaacggcggcggtgaccggcccgcacctgcacaacttcgcggaaatttcccggcgcatgcgcgaggccggggcgctgctgatcggcgaggacgcgcaggcggtgggcgatctgctgcagcacctgctcgacgatgcccaggcccgcgaagacatggcgcgggcgggatgcacgctggtcagcaatggccgcggcgcgctgcaacgcacgcttgccctggtggcgccgcacctgccaccaccgcgcgagtga

SEQ ID NO: 496840 - DNA, 918 bp, Stenotrophomonas maltophilia
atgtcagatgcctccaccgccgtccgcccatcgctgcgcgatccgcgcaactggccgatgttcgccgccatgttcggcgccttcgccatcgctcgcctgccgtggatgctgcagcgcgcgctgggccggggcgtcggctggatcacctggcgcctgctcggcagccgccgccgcgccgccgaagtcaacctgcagctctgcttccccgagaaggacgaagcctggcgccagcgcctggtgcgcgacagtttcgatgcgctgggcgtgggcgtgttcgagtgcatccgcgcctggtggggcagcatcgaccgcatccgcccgcaggtacggatcgaaggcctggaacacctgcggcagatggaggctgaaggccgcggcgtgctgctggtctccggccacttcatgaccctggaaatgtgcggacgcctgctgtgcgactacgtcgacctgtccggcatgtaccgcaagcacaagaacccggtgtacgagtgggcggtgaagttcggccgcctgcgctatgccaaggcgatgttcgccaacgaggacatccgcgcgaccgtgcgccacctgaagaagggcggcttcctctggtacgcgccggaccaggacatgcgtggcaaggacaccgtgttcgtgccgttcttcggccacaccgcttcgaccatcaccgccacccaccagctggcaaggatgaccggttgtgcagtgatcccgtacttccaccgccgcgaaggcgggaagtacgtgctgaagatcggcgcaccgctggagaatttccccagcgaggacgtggaagccgataccacgcgggtcaaccaggccatcgaagagatggtgcgcgaagcccccgaccagtacctgtggatccaccgccgcttcaagcgccagcccggcggccggagtgatttctacaaatag

SEQ ID NO: 496841 - DNA, 1332 bp, Stenotrophomonas maltophilia
atgccgatctcgccggctgaccccgctgccatcgtgcgcgacgaccgcgctgggcgctgggcgccctggtgggtgctggcgtacgtggcgatgtggccgttgccaggcatcgccgaaaccgtgctcggccttggcgcgctctatgctgccgcgcgcatggtcatgcgccggctgcagcgccgcccgcacctgttgagcacggcggcgtgggccctgacctcgatcctgttcctcggctactggctgccacaggcgttctcggccatcgatgcgatcgatccggcggcctcgtggaccaaggctgccgccggactgcgctacctgcccttcatgtggctggtggcgatcgcggtggccacaccggaacggcggcggctgaccttcggcggcctgacgctgatcaccggcgcgtggacgctggacgcgttggtacaggcgctggccggcaccagcccatggttctggtcgctggagcacctgaagctggccgtaagtggccacgcgctgtgcccggccgacgaagccgcactggccgaccgcctcagtggcgcgctcgggccctgcaacctgaaattcggccaggtgctggccagcctgtcacccttcctgctgctgccgatggcgcggcgtttcggtagtgcggggtggttgctggccgccgccgcactgggaggcgtgctgctgctggccggttcgcgcgcctcgtggatcacctttgtgctggtgctgggctacagcggcctgcgccagttcggctggaagcggctgctgctgctggcccttgtggcagcgctgggtacggccgcactgacagcgggcgtgccgcagctgcgcgagcgtgttgcgcgcacggcacaggcatggaacgaagacgggcagggcgttgacgaggcgctttcggggcgcgcgcgcatctggacggcggccgtgtgcatgatcgaggaacatccggtcaacggtgtcggtgcgcgcggcttccgtgatgcgtatccggcctgcgtgtcagacgagggccccgccgtgtggggcaatcaaccggcattgcacgcccaccagatcgtgctggaaatcctggccgagaccggcgtgctgggcctgctgctgtggctggcggcggtggcgcaggcctggcgggcctggcgctatgcaccgccggcggcgcgtgaccgcgcccgcccggcgatgctggcgctggcggttaccgtgttcccgctcaatacgcacctggcgttctattctgcgttctggggcggcctgaccgtgctgctggcggccctgttcgccggcagtctgctggcccgcgaatcggacgaatctccgccgatgcagtag

SEQ ID NO: 496842 - DNA, 1116 bp, Stenotrophomonas maltophilia
atgcgccgattgaccgtggtgcagttgctgccggcgctgcactccggcggtgtcgagcgctcgaccctggaaatcgctgctgccctggtcgcggccggccatcgtgcgctggtggtgtccgccggtggccgcctggtgcagccgctgctggacagcggtgccgagcacctcaccctggacatcggccgcaagtcgctgctgaccctgcgccatctgccgaccctgcgccgcctgtttgccgaggtcggtgcggacatcgtgcacgcccgttcgcggctgccggcctggctgggcctgtacgcgatccgcgccatgcccgccgcacagcgcccgcactgggtgaccaccgtgcacgggttgaattcgcccagccgctacagtgcggtgatgaccagtggcgaacgcgtgatctgcgtgtccaacaccgtgcgcgccttcgtgcaacgccactatccgacggtgccggaagaaaaactgcagatcattccccgcggtgtcgatgtcggccagttcccgcgcgtagcgcatgccgaccgtcgcccgcggctggccctggccgccgattacccctggctggcgcaggttgatggcccgctgctgctgttgcccgggcgcggcacccggttgaagggccacgcccacgcgctgcagctgctggccgacgtgcgtgccgccggcgtgcctgcgcagctgtggatgctgggcaccgaggaacccgggcgcgaggcctacgtggccgatctgcgccgtcaggctgcggcactgggcgtggccgaggccgtacagatcagtacgcctaccgcacgcatcgccctggcctacgccgccagcgatctggtgctgcagctgtcggacaagccggaagcctttggccgcaccgtggtcgaggcgctgtcggtcggccgcccggtgctgggctgggaccacggtggcgtcggcgaactgctgcagcagctgcagcccagcggcgcggtgccgctcggcgacgcgcgcgcgctgggtgaacgtgcgctggccctgctggcgcagccgccatccttgccgacccgcatcccgtttaccctgcaggccatgcagcgcgataccctccgcctctatgccgatctcgccggctga

SEQ ID NO: 496843 - DNA, 198 bp, Stenotrophomonas maltophilia
atgagccataccgccaccgcgcccgccaacgccgagaagcgctacaccgtgcaccgcagcgatctgccgttgagctgcccgaccccggaaatggcgctgtggaactcgcatccgcgcgtgtacctgccgatcgaagacgagcccaacggcgaagcgcagtgcccgtactgcggttccgtgttcgtgctggccgactaa

SEQ ID NO: 496844 - DNA, 3345 bp, Stenotrophomonas maltophilia
atgaccctgtccgatccgcgccgcgccctgcttccactcgccttggccctggcctgtgcgaccactgcgatgccggtgctggcacaggggctgcagacctcgttcgagcccggcgaacctgccccgacgcaggccgcgggtgcacttcaggtcacgatcggcaacggccctgcggcgccttacgcggccaagcgcaacgccggctacagcggcctgcatgcactgcgctacagcagcgaaggcggcagcgcgcggcgcgaactgttcaaggccgacctgcccatcgaggccgataccacgctgtcgtggctggtgctgccggagatcgtcggcaaggacaccgtcgcttcgacctatgtctcgctggacctgctgctggacgatggcagccgcgtgtcggccggtacggcgcgcgaccagcatggggtggcgatcggcgcgctcgcgcagggcgaatcgaagacgctgtacccgcaacagtgggcgcgcaaggcagtgcggctgggcgacgtacccacgctgaagggccgccgcgtggtggcgatcgagctggaggtggccagtgccgagggcgcgccggtctctggctggattgatgacgtgcgcctggacgcacagccgcggcagcagccacagcgcgtctccgactgggtgctgaccacccgcggcacccaggccaacggcaccttctcgcgcggcaacaatttcccggccacggcggtgccgcacggcttcaacttctggaccccggtgaccgatgccggcgcactgaactggctgtaccgctggaacgaacagaacgacgcacagaaccgcccgcagctgcaggcgcttgcgctgagccaccagcccagcccgtggatgggtgaccgccagaccttccaggtgatgccctcggccagccgtggcgtgccggaggccgaccgccgcaagcgcgcgctgtcgttcgatcgccgccatgaaagcgcgcgcccctaccgctacgacgtgcgcttcgacaacggcatcgctgccgccatcgcgccaaccgatcatgccgcgttgttccgcttcgacttccccgaaggcggtgacgccaacctgctgttcgacaacgtcgatgcgcgtggtggcctgaccctggatgccgccacacagacgctgtccggctacaccgatacgcgcagcggcctgtccaacggcgccagccgcatgtatgtcgtggccagcttcgacaagccctggcgcagcagcggccgcctcgacaccgggcgcccgaccggttacatcaagttcgatgccggcagcgagcggcgggtgacgatgcgcatcgccacctcgctgatctcggtggagcaggcgcggcacaacctggcactggaaatcgccgccgccgatacgctggagagcgtggccggccgcgcacaggacgcgtgggacgcgcgcctggcccgcttcgacatcggcgatgccagcgacgaccagaagaccacgctgtactccagcctgtaccggctgtacctgtacccgaattccggccacgagaacgtgggcagcgccgccgcaccggagtggcgctacgccaaccaggccagcgccagcgatgacaacaccgaaggcagcgcgacccgcagttacgccggcgtgcgcgatggcaaggtgttcgtcaacaacggcttctgggacaccttccgcaccacctggccggcctatgcactgttcacgcccgacgatgccggccagctagtgcagggcttcatcgagcagtaccgcgccggcggctggatcgcacgctggtcgtcgccgggctatgcggacctgatggtcggtaccagctcggacgtggccttcgccgatgcgtggctgaagggcatcggcggtttcgatccggccgaggcctacgccgccgcgctgaagaacgcgaccgtggtcccgcccgaccgccatgtcggccgcaagggcatggaccgttcgaccttccgtggctacgccagcgcggacgtgcatgaaggcatgtcgtggacgatggaaggcgcactcaatgatttcggcatcgccaacatggccgacgcgctggccaagcgtgcgaccacgccggccgcacgcgagcgctacagcaccgaggccgactacttccgccatcgcgccgccagctacacgacgatgttcgatccggccgccggcttcttccagggccgcactgccgatggccagtggcgcgtggacgcgaaggactacgacccgcgcgtgtggggccacgactacaccgagtccaatggctggaccttcgcctttaccgccgcccacgatggcgagggcctggccgcgctgtacggtggccgcgacaagctggcggcgaaactggatgccttcttcgccacgccggaaaccgcggacccggcactggccggttcctacggcggcaccatccacgagatgaccgaggcgcgcgacgtgcgcatgggcatgtacgcgcacagcaaccagccggcgcaccacatcccgtggatgtacctgtacgccgggcagccgtggaagacccagcagcacgtgcgcgagatcctgtcgcggctgtacgtcggcagcgagatcggccagggctatccgggcgacgaggacaatggcgagacctcggcgtggtacgtgctggcctcgctgggcctgtacccgctgcgcatgggcgccccggagtatgtgatcggttcgccggccttccgccacgcgcgggtggaactgcagggcggcgcggtgctgaccgtgaacgcggccaacaattcgcgagagaacgtctacgtgcagtcgctgaagatcaacggcacgccctggacgaagacctgggtgccgcacgagctgatcgccaagggcgcgacgctggacttcgtgatgggcccgcagccgtcgcgctggggcagcggcgtggatgacgtgccgcgctcgctgaccgcccgtggccagcgcccgcaactgctgcacgacctgctcggcagcggcgcgaaggcgacgctggccgatggccgcgccctgccggcgctggtcgatgacgatgcggccaccaccgtcggcctggatggcggcgcgaccatcgcactgaccggcctgagcaatggcacgccgacgatgtatacgctgaccagcggtgacggccgcatccagggcggcgaatggacgctggaagcgcgcaatggcaacggccactggatcgtgctcgaccagcgcagcggcgaagccttcgagtctgcccgccagacccgtccgttccgcatcgccagacccggtcgttacagcgagtaccggctgcgcctggccgcgccgggcctgctgccgctggcggagatcgaactgttggcgcccagcgccgtacaatga

SEQ ID NO: 496845 - DNA, 744 bp, Stenotrophomonas maltophilia
atgagccctatgcgctaccgtctgttgcctctggcccttgttgccctttccttctccagcttcggccagacccaggcctttgatgcgcagctgacccgcgacggcgtgacgctgaactaccaggacgcccgtggcgccctggccgcgccgcagcgcaagcgggtgatcgatacgttctacttcgcctacctgcgcgaacgtgcggacttccacccggccgcgccatcgatggtgcgcatcgtgatcgatccggcctacaccgggatcgccttcgtcggtgacaaggaccaggcggcaacgatcaccatcaatccgggttggctggcgcagcaccccaacgacatcgacctggtcacccatgaggccatgcacatcgcgcagggctatccgggccatggcgacgcacgggtgccgggttggctggtggagggcatcgccgactacgcacgcgaccgctacggcatggacaatgccgccgcgggctggtcgctgccgggcaaggtcgagaagggccagaacttcgacagcggctaccgggtcaccggtgcgttcctgaaatgggccgacgccgaacaccccggcctggtgctggcactggacacggccctgcgcgatggccgctatgcaccggcgctgtggcagaagcacaccggcaaggcactgcccgcactgtgggcccagtacgccaagccgcgttcggatgcaccgccgccggcccctgcacgccgcggcaagcggcgctga

SEQ ID NO: 496846 - DNA, 2292 bp, Stenotrophomonas maltophilia
atgtccaacgaagatttcaaacaggccgccctcgattaccaccggatgtccccgccgggaaagatcaaggtttccgctaccaagcccatgctgacccagcgcgacctgtcgctggcgtattcgccgggcgtggcgtacgcctgtgaagcgatcaaggccgacccgcagcaggccagcgagctgactgcccgcggcaacctggtggcggtgatctccaacggcaccgcggtgctgggcctgggcaacatcggcgcgctggccggcaagccggtgatggaaggcaagggcgtgctgttccagaagttcgccggcatcgatgtgttcgacatcgaagtcgacgagaccgacccggacaagctggtcgacatcatcgcctcgctggaaccgaccttcggcggcatcaacctggaagacatcaaggcgccggaatgcttcgtggtcgagcgcaagctgcgcgagcgcatgaagatcccggtgttccatgacgaccagcacggcacggcgatcatcgtcggcgcggcggtgctcaacgccatggcgatcactggcaagaagatcgaggacgtgaagctggcgaccacgggcatgggcgcggccggtatttcctgcgtgaacatgctggtgcagctgggcctgaagccggaaaacatcctggccttcgaccgcgagggcgtgatccacaccggccgtaccgacctggacccggaaaagcagcgctatgcgcgcgacaccgacaagcgcaccctggccgagatcgtcgacggcgcggacatcttcctgggcctgtcggcgccgggcatcctgaccgccgacatggtcaagaccatggcgccggatccggtgatcttcgcactggccaacccgaccccggaaatcatgccggaactggcgcgcgccgcccgtccggacgcgatcatcggcaccggccgttcggactacccgaaccaggtcaacaatgtgctgtgcttcccgtacctgttccgtggtgcgctggacgtgggcgccaccgcgatcaacgaggaaatgaagatcgcctgcgtgcgtgccatcgctgcactggcccgccgcgccgccaccgacatgggctcggcctatggcggtgacaccccgagcttcggccgtgaatacctgatcccgcgtccgttcgaccgtcgcctgctggtggagctgtcggccgccgtggcccaggccgcgatggactcgggcgtggcctcgcgcccgatcgacgacatgggcgcctaccgcgacaagctggcccagttcgtctaccgcaccagcctgatgatgaagccggtctacgaccgcgcgcgcagcgacaagcagcgcgtggtgtacgccgaaggcgaagaggaagtggtgctgcaggcggtgcagaacgtggtcgatgacggcctggcgcacccgatcctgatcggccgcccggaagtgatcgaatcgcgcatcgagcgcctcggcctgcgcctgaagatcggcgagaacgttgaagtcaccaacatcaacgatgatccgcgcttcaacgaatactggcagtactaccacggcctgaccggccgtcgtggcgtgaccgtggccgcggcgaagaacctgatgcgttcgcgcccgaccctgatcgcagcagtgatggtggcccgtggcgaagccgatgcaatgctgaccggcatcgtcggccgcttccacaagaagctgggctacgtgcgcagcgtgctgccgctggagccgaaggtcacctcgacctcggcgatgaccggcgtgatcaaccagcagggcgtgttcttcttcgtcgatacccacgtgcaggaagacccgaccgccgagcagctgtgcgaagcgaccctgcaggcggcctaccgcatgaagttgttcggcatcgagccgaaggttgcgctgctgtcgcactccaacttcggcagccatgactcgaaggacgcgctgaagatgcgccaggtgcgcgagctgctgctcaagcgcaacccgcgcctgaacgtggacggcgaaatgcagggcgacaccgcatgggatgaagcgctgcgccagaagctgctgcctggctcgaccctgcagggccgcgccaacctgttcgtgctgccgaacctggaagcggccaacatcgcctacaacctggtgcgcgtgttcaccgatggcgtggcgatcggcccgatcctgatgggcgtgaacaagccggtgcacatcctgaccaccagcgccacttcgcgccggatcctgaacatgaccgcgatcgcggcggtcgatgcgcagatccgcaagcagctggaagcggaaaagaaggcataa

SEQ ID NO: 496847 - DNA, 1344 bp, Stenotrophomonas maltophilia
atgcacatcccgaccgcagcaccggtgcctgcaaagccgttgccgatctatcgccagctgtacttccaggtgatcgtggcgatcgtcctgggcgccatcctcggccattacgagccgttgatcggcgagaagatgaagccgctcggtgatgccttcatcaacctggtgaagatgatcatcgcgccggtgatcttcctcaccatcgtcaccggcatcgccagcatgacccacctgcgtacggtgggccgggtctttgccaaggcgatggcgtacttcctgttcttctccacgctggcgctgatcgtcggcatgatcgtggcgcacgtggtgcagcccggcgccggcatgaacatcaacccggccgagctggaccagaccgcggtgcacagctacgtcgagaagtcgcacgacctgaccctggtcggcttcctgatggacatcatcccgaagacgctgctcagcgccttcgtcgacggcaacatcctgcaggtgctgttcgtggccgtgctgttcggcatcgcgctggcgatggtgggcgagaagggcaagccggtgctgaacttcctggaggcgctggtcgctccggtgttcaagctggtgcacatcctgatgaaggccgccccgatcggcgccttcggtgcgatcgccttcaccatcggcaagtacggcgtcggctcgctgatcaacctggcctggctggtgggctcgttctacctcaccgccttcctgttcgtggcggtgatcctcggcgtggtctgccgcctgtgcggcttctcggtattcaagctggcgcgctacctgaaggccgaactgctgctggtgctcggcacctcgtcgtcggagtcggcgctgccgtcgctgatggagaagatggaacgcgccggctgcagcaagtcggtggtgggcctggtggtcccgaccggctactcgttcaacctggacggcaccaacatctacatgaccctggcggcgctgttcatcgcccaggccaccaacaccgaactgaccctgggccaccagatcgcactgctgctggtcgccatgctcagctccaagggcgcggccggcgtcaccggcgcgggcttcatcaccctggccgccaccctggccgtcgtgccggaagtgccggttgccggcatggcgctgatcctgggcgtggaccgcttcatgagcgaatgccgctcgctgaccaacttcatcggcaatgccgtggccaccgtggtggtctcgcgctgggaaggcgcgctggaccgcaaccgcctgaagctggcgctggatggccgcgaaagcgaactgccgccgccggtcgatgcgctgcccgaggcactgccggccaagggctga

SEQ ID NO: 496848 - DNA, 1170 bp, Stenotrophomonas maltophilia
atgcgcccgaatcccaccttgctggccctgtcgctggccgcccttcccgccttcgcctcggccgccgatttcgacaactggccgaccaagtacaccttcggtgatggcaccgagctggcggccaccgccaacatcgcctacgactacaacgacttctcctcggccagtggccttgaggacgacgatgccgtgcgccgcaaggaattcggcgcgacgctgaaaaagaagggcgtctacgatgcgatggtctactacgacttccaggccgatacctggctggacgtgttcgtgcgcttcgagagcaaggccttcttcggccgtgacgtcggccgcttccgcttcggctacatgaagaccccggtcggcctggatgcgaacacctcttcgcgtgccggcagcttcctggaaacctcgctgccggtgcaggccttctacgaaggccgccgcaccggcgtggagtgggtgctggagcgcccgcagtacctgctgcaggccggggcctatggcggcaaggacctgcagggcgacaaccccggcaccacccaggcggtgcgtgcggtgtggacgccggtgaaggcaccaggcgatgtgatccacctgggcctggcctactcgcaggaaaacccgcgtggttacagcgatggccgcgacgtgcatcacgaggccagcgcccgcctgcgcgcgcgcccggaagccggcctgaccgacatccgctacgtcgattccggtgcgctggtcaccgccgaccagatccgccgcaccggcgtggaaggcatctggatccggggcccgttctcgctgcaggccgaagcgctgcgcgctacggtcacccgtcatgacggcaagcccgactacaccggcagtggccagtacgcgatggccagctgggtgctgaccggcgaatcgcgcccgtacaacgccggcgcggtggccaacatcaagccggcgcacgattacggcgcggtcgaactgctggcccgatacagccgtctcgacctggacgatggcagcatcctcggcggccgccagcacgacctgacgctgggtgcgaactggtacctgaccagccacttcaagttccaggccaactacgtgaaggtcgacgccagccgtcgtggcgtgcacagcacgccggagatcttcgaactgcgcgcgcagatgcacttctga

SEQ ID NO: 496849 - DNA, 2643 bp, Stenotrophomonas maltophilia
atgtactggctcagccgccaccggatgctgttgctgaccatcctggtgatggtcggcggtactgtgctgtgcgcggtcgccgccggtcattacgcctggcggcgcgcgctcggcgaggaaagcagccaggtgcaacgccagctgcagctgtatggccagggcctgcaacagcgcatcgaccgcttcggcaccttgccgcaggtgctggcacttgacccggatctgctgcatgcactgcgcgtgccgccctcgcccagcgaacggcagcggctgaacctcaagctgcaacgcgccaacgaagtcacccgtgcctcgaccctgaccctggtcggccacgacggtgtggcggtggcggccagcaactgggaccagccgaccaccaatgtcggcgagaactacagctaccgcccctactaccgccaggcgctggcgcagggccgtggccgcttctacggcatcggcatgaccaccggcgtgcccggctattacctttcgcaggccatcgaagaagacggcaagcggctgggcgtggtggtgatcaaggtcgagttgtccgcgctggaacaggaatggctgagcagcccggacgtggtgctggccagcgacgaccacgacgtggtgttcctggccaaccgggacagctggcgctaccggctgctgcgcccgctgggggccgatgagcgccgcgagatgctggacgcccgccagtacgccgaccgcgcattgcagcccctgcgcgcacgcaccgaagacgtgctggccgatggcggccgcatggtgcgcctgctggacccggcgctgccgcagccgatgctgtggcagagcctgccgctgcccgccgaaggctggaacctgcacctgctgcacgatgccagtgccgccaccggcgccggccgcgccgcagcactcaccggtggcgctgcatggctggcgctgggcttcctggtgctgttcgtgcagcagcgccggcgactgtccaagcatcgcctgcgcagccgccgcgagctggaaaccctgctcaagcagcatgcacaggaactgcgtaccgcgcaggatggcctgctgcaggccgccaccgatgccgacagcggcctcagccgcagcctcgaacacctgccgcagggcgtggtggtgatcgaccgcgaactgcgcctggtcgcgtggaattcgcgctatctggaactgttccgcttcccgcaggacctggttcgcgtcggccggccgatcgaggaactgttccgcttcaacgcacgccgtggcctgcttggtccgggcccggtcgatgaagccatcgagcgccgcctgaaccacctgcgcagcggccgcccgcacatgcgcgagagcgaaaaagacgatggcaccgtgctggaaatccgtggcaacccgctgcccgacggcggcttcgtcaccagctatgccgacatcaccagctacaagaacgccgcgcgcgaactgcgctcgctggccgatgcgctggaacaccgcatcgccgagcgcacacatgacctggaggaagcacgccgcgaagccgagcaggccaaccgctacaagacgcgattcgtcgcctcggccgtgcacgacctgctgcagccgctcaacgcggcgcgcatgttcgtttcggtgctgcgcggcaagctgggcgacccggcgcagcagcagactgcggaccacatcgatgctgcactggccgcgcaggatgcgatcctcaatagtctgctggatatcgcgcgcctggaatccggcagcctgccgacccgagtgcaggcgttccggctcgggcctttgctgcagacgctggcgcgcgaattcggcatcgccgcacagtcgcgtggcctggtggtcgactgggtcgataccgatgcggtagtggtcagcgatgaagccctgctgcgccgaatcctgcagaacttcctgtccaacgcgctgcgctacagcgaacgcggccgcgtgctgctcggctgccgtcgccgtgaaggcatgctgtggatcgaggtgcacgaccagggccccggcattcccgacgcgttgcagggcgagatcttcgaggagttccgccgcctgcacgacggccagcagcgcggcgccggccttggcctggccatcgtcgatcgcatcggccgcctgcttgggcatccgatccggctgcgctcgcagctgggccagggcagcgtgttcgcggtgggcgtgccgttcggcgaagccagcgcgattcccgctactgctcctgtgccggtgctggtgcaggaaccggcggcggacaacccgcttcgcggtcgccgggtgtgggtgatcgacgacgatccgcacgtgtgcgcggccagccgcgcgctgctggagcgctggggctgcgaggtggcgctggccgatggcccacaggcggcgctgcagctggcagcaacaggcgcagtaccggagctggtgctgctggatgtgcgcatgggcgatcaccatgggccggtgctgtacgagacattggccgaattgtggcaggcccgcccgccggtagtgctggttactgccgagcgcgatgcgggattgcgtgagatggccgccgaacgcggctgggggatgatggccaagccggtgaagccgccggcgctgcgggcactgatgagtcagttgctgatccgccatcgcgggtag

SEQ ID NO: 496850 - DNA, 909 bp, Stenotrophomonas maltophilia
atgagcgaatcccttgataaccacctggtccacggccgccgccagcggccggatgggccgtcgccgatcgatgtcatctcggtccagtcgcaacttgtgtacggccacgccggcaacagtgccgccgtcccgccgatgcgcgcactgggcgtgcgcgtcgccgaaatcccgaccgtgctgctgagcaatgcgccgttctacgacactacgcggggccgcgtgctgcccgccgactggtttgccgacctgctgctgggtacccacgagcgtggcctgccgcagcgggcgaagatgctggtgtccggttacttcggcagcaccgccaacggtgcggccttcgccgactggctggacaacatcctgccggcctgcccacagctgcgttactgcctggacccggtgatcggtgatacccataccggaccctacgtggaaccgggcctggaagcgatcttcgccgagcgcctgctgccgcacgcctggctggtgacgcccaatgccttcgaactgaatcgcctgaccggcatgccggcactggccgaggccgatgccatcgccgccgcgcgcacgctgctggatcgtggcccgcactgggtgatcgcgcacagcgtaggcggcaacccgggtgagctggtcaccctggcggtcgggcacgaggaaacctggcgctggacctcaccgctgctgccggtggacgtggccggtaccggtgacgtgctgatgtcgctggtggtgtcgttcctgctgcgcggtgagtcgatgcagcaggcgatttcgcgcgcgattgccggcacccatgcggcgctggaggcgaccctggacaacggcttcgaggagtttgacgtgatcgctgccgcgccggcggcgctggccgaaggaacgcgcttccgcgctgaacgcgtggcatga

SEQ ID NO: 496851 - DNA, 1125 bp, Stenotrophomonas maltophilia
atgagcggcctggatccacgcacgccgcgcacggtcggcatcgtcggcagcgctggtgcctatgggcgctggctgtgccgcttcttccagcagcacctgcagctgcaggtgatcggccatgacccggccgacccggactcgcacacgccggaacacctgctggcgcaggccgatgtactggtgttctcggcaccgatccggcacacgccggcgttgatcgccgagtacgtgcggcaatcggcgggccgcgagcagggcaggctgtggctggatgtgacctcggtaaaggaggcaccggtgcaggcgatgctggcctcgcaggccgaagtggtcggactgcacccgatgaccgcgccacccaaggcgccgaccctgaaggggcgggtgatggtggtctgcgaagcgcggctgcagcattggcgggcatgggtcgatacgctgtgcaccgcgctgcaggccgagtgcgtgcgcgcgacgccgcagcaccacgaccagatgatggcgctggtgcaggcgatggtgcatgccacccacctggcgcaggcaggcgtgctgcgccagtaccagccgcagctgggcgatctggccgcgatgatgccgtaccgttcggcgtcgttcgagctggatacggcgatcatctcgcgcatcctgtcgctgaatccggcgatctacgaagacatccagttcggcaacccgtacgtggcgccgatgctggagcggctggtggggcagctgcaggccctgcaggtgcaggtcggacagggcgacgacggcgcacgggctgcattccgtgagcagctgctgtcagccaatcgcagtgccttcggcgagcaggccctggcggatggcaactacacgttcgaacgcgtggggtatctgctggccgatctgaccgagcgcaacgcgctgtcggtgcacctgccggaggaccggcctggctcgctgcgcgagctgttgaacgtgttcgagcagcaccgcatcagcctggcctcgatccattcctcacgcacgcccgggggcgaggtgcatttccgtatcggattcgtggccggcagtgatccgacggcgatccgtcgggcggcggccgacgtggacgccagcggcatcggacgggtgctgggctga

SEQ ID NO: 496852 - DNA, 195 bp, Stenotrophomonas maltophilia
atgtcgttccgtcagttccctgcagtcgacagcaatggcgaaagccacatcatcatcgagttcaagcccgaggcgaatggcagcgggcatcactctgaatccacgccgcgttacgagctggatgacgggcgtcatctggttcgcaatggccgcgaattcaccaccagcggcggcgaactgcggttgatgatctag

SEQ ID NO: 496853 - DNA, 1773 bp, Stenotrophomonas maltophilia
atgactgacaaggacgacgcccctgcctcggccccaccgctgcgccgcctcggcagcctgcggacgctgtggccgttcgtgcgccgccacagcgggctgttcaccgcctggctgctggcgctggcggtctcttcggccgccacgctgagcctgccccccgccgtgaagcagatgatcgaccacggcttcaccagcggtggccagatcaaccgtgccttcgccctgctgatgctggtggcggtggtgctggcactggcaacggccgcacggttcttcttcgtgtcgctgctgggcgaaaaagtcgtggccgacctgcgcagccgcctgtacgcacacctgatccagctcggtgccggtttccatgaccgcagccgcagcggcgaactggtctcgcgcctgaccgctgacagcgaactgctgcgcagcgtggtcggctcgaccatgtcggtcgccctgcgcagcagcgtcaccgtggtcggcagcctggccatgctgttcgtcaccagccccaggctggcggcatggtcgctgctcggcatcccactggcggtactgccgatcatcatcggcgcgcgcaagctgcgcacggttgcacgcagcagccaggaccgcatcgccgatgccaacagcctggccagcgagacgctgggcgccgtgcgcacggtgcaggcacatgcacgcgagccttacgagcgcggacgcttcgacaaggcactgggcgatgccattggcgccgcgcgccgacgcatcggtgcgcagtcgctggtcaccgccagcgccatcctgctggtgttcggcgccatcgttggcgtgctgtggctgggcgcgcacgatgtcatcgacgggcgcctcagtgccggcacgctgggccagttcgtgctgtacgcgctgatcggcggcggctcggtgggcgcgctggccgaagtgtggaacgaactgcagcgtgcagccggtggcatgggccgcattggcgagctgctgcaggaagacatcgagatccgtgcgccggcgcagccgcacgttctgccgcaaccattgcgcggcgaaatccagttcgacgacgtggtgttccactatccgcaacgtccggaccaggccgcgctggaccacttcaatctgcatgtccgcccgggcgagacggtggccctggtcggcccgtcgggcgcgggcaagagcacggtgctgtcgatgctgctgcgcttccacgatccggccagcggccgcatctgcgtggatggcatcgacgtacgccaggtcgatccggccgagctgcgcgcgcagctggcgctggtgccgcagcagccgacgctgtttgcggccagtgcgcgcgacaacatccgctatggccgcctgcaggccagtgacgccgaggtcgaagctgccgcgcgtgcggccgaggccgatggcttcctgcgcgcgttgccgcagggctacgacagtgagttgggcgaacgcggtgcgcgcctgtccggtggccagcagcagcgcgtggcgattgcccgggcactgctgaaggacgcgccgatcctgctgctcgatgaagccaccagcgcgctggacgcacagagcgagcacagcgtgcagcaggcgctggagcggctgatggccggtcgcaccacgctggtcatcgcccaccgcctggccaccgtgctcaaggccgaccgcatcgtggtgatggaccagggccgcatcgtggccgaaggtacccatgcccagcttctggccgaaggcggactgtacgctgaactggcacgactgcagttcatcgattga

SEQ ID NO: 496854 - DNA, 597 bp, Stenotrophomonas maltophilia
atgcccgataccctcgcccagccggtaagccacacgctggaagtcaaacacagccgcttcattgcccatgccgcgccgatcgatggcgccgcggcagcattggcgttcctgcaacaggtggccgtagccgacgcaacccacagctgctgggcctaccggcacggccaggactaccgctccagtgacgatggcgagcccgccggcaccgctgggcggccgatcctggctgcgatcgacggccagggcttcgaccgggtgatggtggtcgtgacgcgctggttcggcggtatcaagctgggcgccggtggactggtgcgcgcctacggtggcgccgccgccgaatgcctgcgtaccgccccgcgcttgccgctggtggcgatggcccggctgcagctgttggccggcttcgaggatctgggcaccctgcatgccacccttcccagcttcggcgccgtgaagcgcgatgaacagttcgatgccaacggcgtgtgcctgcgggtcgaattgccggccgatcaggtcgatgcattgaaaatccgcctgcgcgacgccacccgtgaccgtatccgcatacaagacgacgaccaggatgactga

SEQ ID NO: 496855 - DNA, 999 bp, Stenotrophomonas maltophilia
atgaaccgagacgaaccgctgacgccggaagaacgcgagctggcgcgcctgctcggccgtcgcgtcgaacaggccccgccggccgcgctggacgccaccatcctggccgcggcgcgcgctgccgtgcacgcaccggcggccgatgctgctgtctccgccgaggcgccgcgcaggcagcgcacacgtccgcgttggccggcggtgttcggtatcgccgcctcgatggtgttcgccatcggcatcgcctggcagctgcgcccggaaccgccgccggttccggcaggcgaggccgctgttgctgcggcacccgctgcggcagacgtcgcggccgccgatcaggccgctgggagcagtccagccgacagcgcggctgcggcatcggaaacggccaccgaacctgcagcacccgaggcggcccctgttgccgctcccccggcgccgtccgtcgcgcgggtagccaagcctgcgccgaccgagactgctgaggctccggcccaggctgcacgatcgatggcggcggatgcggccgccgatacgtcctttgcggcgctcccgcctggtccggccgccgcaccggcagcggcaccgcccgcgcctcccgcaccggctgcctattcggcacctgcaccggcattggcgccggccccggcaggggcgctgaaagcacgcaccgccgaggcgccagtggccaacgctgccgatgcggaacgggcgcaggcactggatcgggtagagatcacctcgatgaagcggcaggccccgagccgctccgcgcccggcgtcatgcgccgcggcgccgacgcgcggctcagtgcggatgccgtgcaggccgaggtggacgccgatgcacagctgccgcgacggcagtggctgcagaagatccgcgcgcgccgcgatgacggccagcgcgacctggcccgcgccagcctggagcgctatgtgcagcagtatccggaagcgcgcctgccgcgcgacctgcgcccgctgctggacgactga

SEQ ID NO: 496856 - DNA, 624 bp, Stenotrophomonas maltophilia
atgaacctcgccctgcccgcccccgtcaccggctatgcgccaccgcctgcaggccttaccctgtacggcgtggaagccagcgcactgccaaccgatgaagccttgatgctggcctgggccggtggcgacctgcgcgcgttcgaaagcctgtatgcacgccatcgcaagcgcctgttcggcttcctgctgcggcaactgcgcgacaacgcgttggccgaggagatcttccaggatgtctggcagcgggtgatcagcgcgcgcgcgggctggcagcctgacgctgcattcagcacctggctgttccgcatcgcccacaaccgcctgaacgaccactggcgggccgctcgccatcgccctgccgcaccggccgacgccgacctgcgcctggccgcgatcgaggacgggcagaccccggaagccgagctttccgaattcgaacaacgtcgccgcatccagctggcgatggagcaactgccgcccgagcagcgcgaagtgctgcagctgcggctggatcaggaactgagcctggaggagatcggccagatcaccggcgtaggccgggaaaccgtgaaatcgcggctgcgctatgcgatggacaagctgcgtgcgggattgaacgcatga

SEQ ID NO: 496857 - DNA, 2796 bp, Stenotrophomonas maltophilia
gtgctgagcacggcgctggtgcgcgcattgcatgcgctgctgccggactcggccgtggtccgcgttggctgggatgacccgcagctgggccgcggacagggcggctggccggctgtcgcggcggccgacgcgttgacggtgcccggcgtgggcaacggttgccatggctgggaatatgacggtgcccgcctgcagttgtcggtcgaaggcgccgtgccttcagcggcgtggtgggggctggcccggcaggccatggagctggcgctgcagcgcggtcgccaggccgggcagatcaaggcgctggaagaagctgaacggctgcagcaggcgctgttccagatcgccgatctggctggcgccgacctggagatgtcggagatgctgcgtcacgtgcacggcgtgcttggcacactgatgtacgcggaaaactgctacatcgtcgagtacgacgatgtccgcgaccagatccgcttcctgtacttcgccgaccaggtcgatgacttcgtcgccgatccgtcgcagagccatgacgccgacgagatgccgcgcagcctgaccgtggcgttgctgcgccacggcaagccgctcagcggcccctcgcgcgagttgctggcgcgcgtggtcgagcaggagcacgacccgcagcgtggaccggagagcctggactggctgggcgtgccgatgctgcgcgatggccgggtatgcggcgccatcgtggtgcagagctatgagctggcggcccgttatggcgaggccgagcgggcgctgctgggttttgtcgcgcagcacgtgcagaccgcgatggaccggcgccaggcgcaggtccggctggaacagcaggtggagcggcgcacgctggagctgcagcgtgccaaccacagcctgcaggatgaagtggccgagcgccgccgcgcagagcagctgcagaccgcgctgtacaacatcgccgagatggcgatgtcggccgacagcctggcccagttctacgggcaggtgcatggcgtggtcgggcgcctgcttgacgcgcgcaatttctacatcgcgctggtgaacggggccggcagcggcctggacttcgtctactcggtggacgagcacaacgccagccgtgcgccacgcccgttcagccgcggcctgaccgagtacgtggtgcgcaaccggcgtccgttgctggcttcgcggcagcagatcgacgcactgctggccagcggcgaagtgcgcgaatcgggcgcacgttcgcattgctggctgggcgtgccgctgctgcgcgatgacgaggtggtcggcgcgatcgtggtgcagagctacagcgagaacagcacgttcagcgtgcacgatcagcgcttgttgaccttcgttgcacagaacatcggaaccgggctggcgcgccagcgcgaccagcagcagctgcgttcggcgcatgccgagctggaaaagcgcgtggaggaacgtacccgcgagctggccgaggtcaacgagaagctgctcgggcagatcggcgagcgcctgcgtgccgagcagcgcctgacccatcaggccatgcacgatgcgcttaccggcctgcccaaccgcctgcacctgctcgatcgcctgcaggatgcgctggcgctggccaaacgcgagggtgggccggtgttcgccgtgctgttcctcgacctggaccgcttcaagctggtcaacgacagcatcgggcacgctgccggcgatcgcatgctggtggaggtggccaagcgcatcgtatcgatggccggcaccgatgacgtggtggcgcggctgggcggcgatgagttcgcggtgctgctgcagtgtccgcaggggctggcacaggcgctggagttcggccagcggctgttgctggcactgcaggaatcgatgtggatcgccgggcgcgaactgttcccgtccggcagcctgggcatcgccttgtggaacccgcgctaccggaccggtgaagaactgctgcgcgacgcagacgcggcgatgtaccgggccaaggcgcagggtcatgaccgctgcgcgatcttcgacgaagacatgcgcgaagaagcgatgcgcagcctggacctggaagcggatctgcggcgtgcgatcaacaaccgcgacttcgtgccgttctaccagccgatcgtgcggctgtccgatggcgaagtggtggggcacgaggccttgctgcgctggcagcacgagcgccgtggcctgttgctgcccggggcgttcctggagctgggcgaggaaagcggcctgatcgagcaggtcgactggctgatctacgaacaggtcatcgcgggactggccgaaggcggccacggctatgtctcggtgaacgtatcgccacgccatttccgctcggccgagttcagtggccgcctgttcggtctgctcgatgcatgcggtgccgacccgcgccggctgcgcctggagattaccgaggtggcgctgctggatgatggcccgcacacgctgcgcatcctgcagggcctgcgcgagcgtggcatccaggtgcagctggacgatttcggtaccggcttctcggcgctgtcctacctgcaccgcttcccgatcagcacgttgaagatcgaccagagcttcatcgccggcctgcatgggccggaagtgcagagcacgcgcgcgctggtcgagggcgtgctgtcactggcccgcaccttgggcatcgaaaccatcggcgaaggcatcgagaccgaagcgcagcggcagacgctgcgcgaacttggttgcgactacggccagggctacctgctgggccgcccggcgccgtgggacggcgcggtggcctga

SEQ ID NO: 496858 - DNA, 594 bp, Stenotrophomonas maltophilia
atgaaatcgatctgtgtgtactgtggttccaacgctggcagcaagccggcctacaccgaacgcgccattgccctgggtgatcgcatcgcccgtgacggcctgcgcctggtgtatggcggcggcaacgtcggcctgatgggaaccgtggccaatgccgtgctcgccgccggcggggaggtgaccggcgtgatcccgcgccagctggccgactgggaagtggcccaccgcggcctgaccgaactggagatcgtcggttcgatgcatgagcgcaagtcgcgcatgttcgacctcgccgacggcttcgtcgccctgcccggcggcttcggcaccatggaagagatcttcgagatgctgacctggcgccagctgggcatcggcaacaagccatgcgccttcctcgacgtggaaggcttctacgccccgctgatcggcatgatcgatcgcatggtggaagagcgcttcctgcatccggaccagcgccaggacctgtggtacggctcggacatcgaggaaatgctggagtggatgcagaactatcagccggcccaggcttccaagtggatcgacgagaagcgtcgctccgccctgcgctga

SEQ ID NO: 496859 - DNA, 1497 bp, Stenotrophomonas maltophilia
atgagcttcatcgaacgcctcgcccccctgcgcacccagcccggcacccgcctcaccaccggcctggacgacgccaccctgaccgccctgtccgtccgccacccgcagctgatcgccgcagtggatgccgccgccgaggagttcgcgcgcgtgcaggccgacctggggccgctgctggcgcaggacgaacaggcgcagatcgacgcgatgcaggacggcttcgtcaatttctacgccgatgatgcagtgaccccgtacgtggcgctggccgcgcgtggcccctgggtggtcaccctgaagggcgcggtgctgtacgacgccggcggctacggcatgctcggcttcgggcacaccccggatgccgtgctggaggcgatggcacgcccacaggtgatggccaacatcatgacccccagcctgtcgcagcagcgcttcatcacggccctgcgcgccgagatcggccaccgccgtggcggctgcccgttcgcgcgcttcatgtgcctgaattccggctccgaggcggttggcctggccgcgcgcatcgccgacgtcaacgccaagctgcagaccgacccgggcgcgcgccacgccggtgccacgatcaagcgcgtggtggtcaagggcagcttccatggccgtaccgaccgccccgccctgtattccgattccagccgcaagagctacatgcagcacctggccagctaccgcggcgaggattcggtgatcaccgtggcgccgtacgacgaggccggcctgcgcaaggtgttcgaggacgccgcacgcaaccagtggttcatcgaggcggtgttcctggaaccggtaatgggcgaaggcgacccgggccgttcggtgccgccggcgttctatgccgtggcccgtgagctgacccgtgcgcacggcagcctgctgctgctggactcgatccaggctggcctgcgcgcgcatggcgtgctgtcggtggtcgattacccgggcttcgaaggcctggacccgccggacatggaaacctactccaaggcgctcaacgccgcgcagtacccgctgtcggtgctggcggtgaccgagcacgccgcgcagctgtaccgcaagggcatctacggcaacaccatgaccagcaacccacgcgcgctggacgtggcctgtgccaccctggcgcagctgaccccgcaggtgcgtgccaacatcgccgaacgcggtgccgaggccgtgcgcaagctggaacagctcaagagcgaactgggcggtctgatcaccaaggtgcagggcaccggcctgctgttctcctgcgagctggccccgcagttcaagtgctacggcgccaattccaccgaggaatggctgcgccagcacggcatcaacgtgatccacggcggcgagaattcgctgcgcttcaccccgcacttcggcatggacagcgatgagctggacctgctggtcggcatggtgggccgcgccctgcgtgaaggcccgcgtcgcgaacaggcggctgccgcgtaa

SEQ ID NO: 496860 - DNA, 1068 bp, Stenotrophomonas maltophilia
atgcgcgccattgtcgacctgttgccgcccactgccttgaagaagtccgatttcaactacgacctgccggccgaactgatcgcgcaggcgcccctggccgagcgttccgccagccgcctgctgctggtgccgcaagcccccgctgcgttcaccgacctgcaggtgcgtgaccttccgtcgctgctgcagccgggcgacctgctggtgttcaacgacacccgggtgatcccggcgcgcctgttcgggcagaaggccagcggcggccgcgtggagatcctgatcgagcgcttgctcggcggccagcaggcccgtgcccaggtcggcgccagcaagtcgccgaaggccggcagccgcatcgcgctggatgccggtggcgaagccgaggtgctgggccgcgatggcgagttctacgtgctgcagttccacgtgcccgagtcgctggagcagtggctgctgcatgccggccgcctgccgctgccgccgtacatccagcgcgagccgggcgtggacgaccgcgagcgctaccagaccgtgttcgcgcgtgaagtgggcgcggtggcggcaccgaccgcgggcctgcatttcgacgaaccgttgctggccgcactgaaggaaaagggcgtggagttcggccacgtcaccctgcacgtgggcgcgggcaccttccagccggtgcgtgccgaagacctgaaggaccacgtgatgcaccgcgagtggctgaatgtcggtgcagaactggtgcagcaggtgcggcgcacgcgcgccgccggcggccgcgtgatcggcgtcggcaccaccgtggtgcgcgcgctggaaagcgcaatgcgtgatggcgagctgctgccgttcgccggcgagacgcagatcttcatcacccccggctaccgcatccgcagcgtggacgcgatggtgaccaacttccacctgccggaaagcacgctgctgatgatgatctccgcgtttgccggcaaggagcgcgtgttcgaggcctaccagcacgcgatcgagcagcgctaccgcttcttcagctacggcgacgcgatgctgctgttcccgcaggcggggtag

SEQ ID NO: 496861 - DNA, 1131 bp, Stenotrophomonas maltophilia
atgtcccgactgcagttccagctccagacccgcgacggccgtgcccgccgtggccgcctgaccttcccgcgtggcacggtggaaacgccggccttcatgccggtggggacctatggctcggtcaagggcatcctgccggaccaggtgcgcgcgctgggcgccgagatcatcctcggcaataccttccacctgtacctgcgcccgggcctggacatcatcgccgaccacggcggcctgcacggcttctgccgctgggatggcccgatcctgaccgactccggcggcttccaggtgttctcgctggcgcaccgccgcaagatcaccgagcagggcgtgaccttcgcctcgccgaccgacggcgcacgggtcttcctcggtcccgaggagagcatgaagatccagaaggtgctcgattcggacatcgtgatgatcttcgacgaatgcaccccgtacccggccaccgaggacgttgcccgccgttcgatggagttgagcctgcgctgggcgcagcgcagccgcaacgcgcatgacgaactgggcaacgacgcggccctgttcggcatcgtccagggcggcgtgcataccgacctgcgcagccgctcggccgatgccctgcaggcgatcggcttcgacggctacgccatcggcggcctggccgtgggcgagccggagcacgagcgcaacgccatgctcgaccacctggacccggagctgccgggcgaccgcccgcgctacctgatgggcgtgggccggccggaggacctggtcgagggtgtcgcacgtggcgtggacatgttcgattgcgtgatgccgacccgcaacgcccgcaacggccactatttcacctcgttcggcaccgtccgcatccgcaactcccagtacgcgcgcgacatggacccgatcgagccgggttgtggctgcgtggcctgcaccggcggctacacccgttcctacctgcgccacctggaccgctgcaacgagatgctggcgccgatgctgggcaccctgcacaacctgttctactacgaaaagctgatggccgacatccgcgcggcgatcgaggcgggaaccttcctggccttccgtgagtccttctacgcggcacgcggggcggtggccccgccgctgtaa

SEQ ID NO: 496862 - DNA, 345 bp, Stenotrophomonas maltophilia
atgaacctgcttgctttcctgattcccgccgcccacgcccaggccgccggcggccaaccgcagggcatgggcctgaccacgctgctgttcccgatcatcctgatcgccatcatgtacttcctgatgatccgcccgcagatgaagcggcagaaggaacacaagtccatgctggagaagatcaagcgtggcgacgaagtgctgaccaacggtggcatcgccggcaaggtcaccgacatcggcgacaacttcatcaccatcgaagtggccgagaacgtgcgcatccgcgtgcagaagggcgctgtcggcagcgtgctgccgaccggcaccctggattcggccaagtaa

SEQ ID NO: 496863 - DNA, 1857 bp, Stenotrophomonas maltophilia
atgctcgaatttccacgctggaagtacgtcgtcatcctgatcgtactggcgctcagtgcgctgtacgcgctgcccaacatctaccagaaggacccggccatccagatcaccgccaaccgtggcgggcagatcgacgatgcgctgcgcgaccgtgtgctggccgacctgaagaaggccggggtcactgccatcggtgccgaaaaggaaggggaaagcctgatcgtccgtctgccggacctgaagtcgcagtctgcggccagcgatgccctgcgcgacaccgtcggcgagaagtacacggtggccctgaacctggcctcgaccgtgccggactggctggcccggctgggcggtcgcccgatggtgctcggcctggaccttcagggtggcgtgcacttcgtgctgcaggtcgaccagaaggccgccctcgacaagcgcctggatgcctacaccgaagacgtgcgcagcaccctgcgtgacgcccgcatcgcctaccagtcggtggaacgccgcgcggacaacagcatcgtggccaacctgagcccgtccgccggcgatgacgccgcgcagcgtgcccgtaccgccctggtcaaggcgcagccgaccctcggctacgacgtcagcggcaaccgcatcacggtcaccgtgccggagaccgagatcacgcagatcgccaacggcgccatcgagcagaacatcaacaccctgcgcaaccgcgtgaaccagctcggcgtggccgagccgatcatccagcgccagggtgccgaccgtgtggtcgtgcagctgccgggcgtgcaggacaccgccgaagccaagcgcatgatcggcgccaccgccaccctggagtaccgcgcggtggtcgagggcaatgcgcaggacgccatcaattccggccgcatcccgccggaagcgaaggtctaccagcagcgtgatggccgcggcccgatcctgctgaacaagcgcgtgatcgtcaccggtgaccagatggtcggcgcgcaggcggtgaccgattcgaacagtggctccccggccgtcagcgtgacgctgaacaatgtcggcggccagcgcatgttcgacttcaccagcgccaacgtgaacaagccgatggcggtggtctacaccgaacgcgtgccgaccgtgaccgtcgtcgacggccaggaagtgcgtggcttcaaggtcaacgaggaagtgatctcggtggccaacatcaacggcgtgttcggcaagaacttccagaccaccggcctgcagaagaaggaagccgaggacctggccaagctgctgaagtccggctcgctggccgcgccgatggacttcgtcgaagagcgcgtggtcggcccgagcctgggcgccgagaacgtcaagaacggcatgcgcgcggtggtgttcgcgttcctgttcaccctggtgttcttcagcatctactaccgcatgttcggtgtgatcacctcggcggcgatgctgttcaacctgctgatcgtggtggcggtgatgtcgctgttcggcgccaccatgaccctgccgggcttcgccggcctggcgttgtcggtgggcctgtcggtggacgccaacgtgctgatcaacgagcgtatccgtgaagaactgcgcgccggcgtgccgggcaagaccgcgatcgtgaccggttacgagcgtgcctcgggcaccatcctcgacgccaacctgaccggcctgatcgtcggcgtggcgctgttcgcattcggtaccggtccgctgaagggcttcgcgctgaccatgatcatcggtattttcgcctccatgttcactgcgatcaccgtgtcgcgtgcgctggcgacgctgatctacggccgtcgcaagaagctccagaacgtggccatctga

SEQ ID NO: 496864 - DNA, 981 bp, Stenotrophomonas maltophilia
atgaaactgtttccgctgcacatcctcccgaacgacaccaagatcgacttcatgcgctggcgccatgtcgccatggcagtcaccatcgtggtgttcctggcctcggtcgccatcatcggcatcaagggcttcaactacgcactggacttcaccggcggcaccctgatcgaaacgcgtttcgagaaggccgtggacgtcgagcaggtccgcgccaagctggagcagaacggcttcgacggtgcccaggtgcagagcgtcggtggcaataccgacctgctgatccgcctggcgccgcacggcgagcatgcgccgggcaccggtgatgccgctgccgaggataaggccaccgccgcggccgtggtgaaggtgctgtccagcgccgacaaccaggccacggtgatgagtaccgcattcgtcggcccgcagatcggcaaggacctggcgaagaacggcctgtacgccaccatcttcatgctggccggcttcctgatctacatcgcggtgcgcttcgaatggaagttcgcggtcaccgccagcatcgtggcgatgttcgacctgatcgtgacggtcgcctacgtgtccctgctgggccgtgagttcgacctgaccgtgctggccggcctgctgtcggtgatgggctttgcgatcaacgacatcatcgtggtgttcgaccgcgtccgcgagaacttccgcagcctgcgcgtggactcgatggaggtgctgaaccgttcgatcaaccagacgctgtcgcgtacggtgatcaccgcggtgatgttcttcctgtcggcgcttgccctgtacctgtacggcggtgcgtcgatggaaggcctggccgagacgcacatgatcggtgcggtgatcgtggtgctgtcctcgatcctggtcgcggtgccgatgctgacgatcggcttcctgcgcgtcagcaagcaggacctgctgccgaaggcgaaggacgtcgaggccctggcccgtcgcccgtaa

SEQ ID NO: 496865 - DNA, 1866 bp, Stenotrophomonas maltophilia
atgatttcgcttcgtaatttcgccttgcgccgcggcgagcggctgctgttgtccaatgtcgacctgaccctgcatgccggttaccgggtgggtgtggtcggtcgcaacggtgctggcaagtccagcctgttcgcggcggtgaagggcgagctggaggcggacaagggtgacgtcgacctgcccggcaaggtgcgcatcgccagcgtggcccaggagaccccgtcgctgcccgacccggcgctgagcttcgtgctcggcggcgacatcgaggtcgccgcggtgctggccgccgaggccgacgcgaccgcccgcgaagactgggaagcggtggccgaggcgcacacgaagatggccgagctcaacgcctacgacgccgaagcgcgcgccggcaagctgctgcacggcctcggtttcccggcagagacccaccaccgcgcggtgtcttcgttctccggtggttggcgcgtgcgcctgaacctggcgcgcgcgctgatgatgcccagcgacctgctgctgctggacgagccgaccaaccacctggatctggacgcggtgtactggctggaacagtggctgctgaagtacccgggcaccctgctgctgatctcgcatgaccgcgagttcctcgacaacgtggccacccacaccctgcacctgcatggtggcggcgccaagctctacccgggcggctacaccgatttcgagcgccagcgcgccgaacagctgcgccagcagcagatcgcgcacgagaaggaacaggccgagcgcgcccacctgcagagcttcatcgaccgcttcaaggcgcaggccagcaaggccgcgcaggcgcagagccgcatgaagcgcctggccaagctggccggcaccgaagcggtgcgcgccgagcgtgagttccgcatcgagttcgcgccgccggccaagctgccgttctcgctgatccgcctgaaccacgtcgaggccggctacggcaaggacgcggtgatcctgcatgacgtcggttttggcctggaagcgggccagcgcatcggcctgctcggcccgaacggtgccggtaagaccaccctggtgaagaccctggtgggcgagctggcgccgatcgttggcgagcgcatggcgcatccggacctgaagatcggctacttcgcccagcacacggtggagtcgctgcacgaaggccagtcgccgatggagcacttccgcgagatcgccccggacgcaccgaaccagtccttccgcgatttcctcggcaagtggaacttcccgggcgaccgtgcattcgagccggtcgatgggttctccggtggcgaacgcgcgcgtctggcgctggcgctgattgcctggcagcagccgaacgtgttgctgctggacgaaccgaccaaccaccttgacctggaaatgcgtgaagcgctggccgaagcgctggccaccttcgaaggcgcgatcgtgatggtctcgcatgaccgccacctgatcggcctggtctgcgatacctactggcgcgtggccgatggcgtggtcgagccgttcgatggcgacctggacgcctacgccgcgtggctgcgcacccgcccgcaggcgcagggcaccaaggcacgcatggagcaggtggaagaaccggtggtggtcaagaccgcgccggtggcgcaggtggtgcagaagaagccggtgaacccacacaagctggcggctgccgaggccaaggtggccgaactggagagcgcgctggccgagctcgaccgccagctggccgatccggccaactacgccgatgcgacccgcatggcggtgatcggccgcgaccgcgaaaccaccgccgcgcagctggagaaagccgaagcggcgtggatggagctgctggagtcctga

SEQ ID NO: 496866 - DNA, 2388 bp, Stenotrophomonas maltophilia
atgacccgcaagaccagcctgatcgccgccgccgtcgctgtcgcactcggtggctctccgttcgtcgccgctgcccagcagaccggcaccgccgccaacaccctggatacggtgatcgtcaccggcacccgcgtggccgaccgcacggtcgccgaatcgcagtcgccgatcgacatcatcacccccgaagtgctgcagtccaccggtaccagtgaactggccaccgcgctgtcgcgcgccctgccctcgctgaacttcccgcgcccggcgctgaccgacggcaccagcggcgtgcgcccggcgcagctgcgcggcctgtcgccggaccaggtgctggtgctggtcaacggcaagcgccgccacacctcggcgctgatcaacgtcaacggcagcatcggccgtggctcgtcggcggtggacatcaacgcgatcccgatcgccgcgatcgagcgcgtggaagtgctgcgcgacggtgcgtcggcgcagtacggctcggatgccatcgccggcgtcatcaacatcgtgctcaagggcagcggcagtggcggcagcctggcagtggactacggccagtactcggctggtgacggcaacaagtaccagctgtccggcgacaccggcgtcgagttcggcaacggccgcggccgcgtgcacgtggccggccagatcagccagcaggacgagagcaaccgcgccggcccgtaccgcggcaccacgccgaacaccggcaacttccccagcatcggccagaagaccttcatcgtcggcgacccgcgcgtggatgccaccgcggcctcggccaacgccagcttcgacttcagcgaccacgtgaccggctacgccagcgcgctgctcagcaaccgcgacatcacctcgttcgcgttctaccgttcgcgcaaccacagcgggcagagcgcgctgctggcgcagacctatccggacggcttcgtgccggagatcaaccagtactccaaggaccgctcgctggtggccggggtcaagggcaacaccgacaacggctggacctgggacctgagcctgaatcacggcgagaacaccctggacttccacacccgcaacagcatcaactacagcctgggtgcgaccagcccgcgctcgttctacgacggcacgctgaagtaccagcaggacatcttcaatgccgacctgaccaagtcgctggactggggcctggcctacccggtcacgctgtccttcggcggtgagtaccgcaaggagaagtgggaccagaacccgggcgaactgaactcgtacaccggcagtggcgcgcagggcttcggcggcttcaccccgaccaatgaagtgcatgccgaccgccacaactacgcggtctacgccggcctggaagcggacctgaccgagaagttctcggccggcatcaccggccgctacgaagactattcggacttcggcgaccgcttctcgggcaagctgtcggcgcgctacgcgttcaccgacaaggtggcgctgcgggccaccgcctccagtggtttccgcgcgccctcgctggcgcagcagggctaccaggcggtgaccagccagttcctcaatggcgtattcgtcgagcgcggcaccttcccgaccaccagccaggccgcgcaggcgctgggcgcctcgccgctgaaggccgagacctccacctcctacagcctgggcctggtgctgcagccggtcgaccgcctgtacatcaccgtcgatgcctaccagatcgacatcgatgaccgcatcgcgctgtcgtcgagcatcaccaccaatgccgcgaccagcacgctgctgggcaccctgggcctgccgcaggtgaccgcgttctcctacttcaccaacggcctggatacgcgcacccgcggtgtcgacttcgtctccagctacacggtaccgttcagcgccagcagcctggagctgaccgcggcatacagctacaacgacaccgaagtgcgccgcgttggcggcaccccgccggtgttcggcacgctgggcctgacccagtcgctgatcggtcgcgatgaaattggccgcatcgaggacagctacccgcgcgacaaggcgatcctgagcggcacctggcgctcggaccactgggaactgggcctggccgccacccgctacggcaaattcaccgtgcgcaactcggccaccgcgctgcgtgaccagacctacggcgacgcctgggtggtggatgcctcggccagctacaagccgagcagcaactggaccctgaccgtgggcgccgacaacctgctggacaagtacccggaccgcaccgaagacctgcagaactcgaccttcggcatgctgccgtacagcaactattcgccgttcggcttcaacggcgcgtatgtgtacgggcggatcaagtacacctggtaa

SEQ ID NO: 496867 - DNA, 1821 bp, Stenotrophomonas maltophilia
atggcgggggtagaggagaaatgcgtggacaaacccgccggccacggcacgtggacggcgggtttgccgtatctggccgcttcggtgaaaatcggggtatccccctgctttctgcgagtgccgatgcaccatgacaccgacctgatcaacatcgttgccgttggcctggggctcgccttcatcttcggcgcgctggccaacaagctccgcttgtctcccttggtcggttacctggttgctggcatctgcgtaggtccgttcacccccggcttcgtcgccgaccaggcgctggccaaccagctggccgaactgggcgtgatgctgctgatgttcggtgtcggcctgcacttctcgctgaaggacctgatggcggtcaaggcgatcgccattcccggtgccattgggcagatcgcggtggccaccctgctcggctggggcgtggcctcgctgatgggctggccggccatccatggcgtcatcttcggtttctcgctggccaccgccagtaccgtggtgctgctgcgggcgatggaggaacgccgcctgctggaaacgatgcgcggcaagatcgcggtcggctggctgatcgtggaagacctggcctgtgtgctggcgctggtgatgatgccggtgatggccggtgtgttcggtcctgacgcggccaaggaatcgcactcgctcggcagcgtgctggccgacatcggctggaccttcgtgcagctgggcctgttcgtggcggtgatgctggtggtcggtcggcgggtcatcccgtggatcctcgagcgcatcgccggtaccggttcgcgtgagctgttcaccctgtcggtgctggcgatcgcgctgggcgtggcgttcggctcggcgatgctgttcggcgtctcgttcgcgctgggcgcgttcttcgccggcatgctgctcaacgaatcggagctgagccacaaggccgcgcatgattcgttgccgctgcgcgatgcgttcgcggtgctgttctttgtgtcggtcggcatgctgttcgaccccaacatcctcgtccagcatccgtggcaggtgctggccaccgtcgccatcatcatgttcggcaagtcggcggcggcattcttcatcgtgcgtgcgttcggccacccgaccagcaccgcgctgaccatctcggccagcctggcgcagatcggcgagttcgccttcatcatcgccggcctcggcgtggcgctgcagatcctgccgaaggaaggccagtcgctggtgctggccggcgcgctggtgtcgatcatgctcaacccgctggtgttcggcctgctggaccgttggcaggccaagcaggagcagtctccgcaggtacccgagccgcccgaagcgatcggcccgtcgcgcgacctgcatgaccacgccatcgtgatcggttacggccgcgtcggcagcgaactggcgcaggtgctgcgcgaccgtggcgtgccggtgctggtgatcgatgacaacaaggaacacgtcgagcaggcacatgccaagggcctggcggcgatccgcggcagtgccgccgccgaccgggtgctggccgaggcccatccggagcgcgccaagatcgcggtgctggcgattccgcagccgctggaagccggtgaggcgctggccaagctgcgggcgatcaatccggacctgaccctgctggcgcgcgcacacagcgatgccgaggtgaagcatctgctggagcacggcgccgatggcacggtgatggccgagcgcgagctggcgtattcgctggcggagatgatcatgtccacgccgccgtaccggaacctggggcagcacagcatcccggtggtgtga

SEQ ID NO: 496868 - DNA, 1287 bp, Stenotrophomonas maltophilia
atgagcgacccgcagtggcaactggaaaccctggccgtgcacggcggttaccgtcccgacccgaccacccgcgcggtggcggtgccgatctaccagaccgtggcgtatgccttcgatgacacccagcacggcgccgacctgttcgacctgaaggttccgggcaacatctacacgcgcatcatgaaccccaccaccgacgtgctggagcagcgcctggccgcgctggaaggcggcatcggcgcgctggcgctggcctcggggcaggccgcgatcacctatgccatccagaccatcgccgaggccggcgacaacatcgtcgcctccagtgcgctctacggtggcagcctcaacctgctggcgcacacgctgccgcagtacggcatccaggcgcgctttgccgatccggccgacccggcggcgttcgccgcgctgatcgacgaccgcaccaaggcggtgttcgtcgaatcgatcggcaacccgcgcggcaatgtcaccgacatcgctgcgatcgccgaggtcgcgcatgccgcgggcgtgccgctgatcgtcgacaacaccgtggccacgccgttccttctgcgcccgttcgagcacggcgccgacatcgtggtgcattcgctgaccaaatacctcgggggacacggcaacagcctgggcggcgcgatcatcgattccggccgcttcgactggaccgcacagccccaacgcttcgcacggctcaaccagcccgaccccagttaccacggcgtggtctataccgaagccctggggccagcggcctacatcggccgcgcgcgggtggtgccgctgcgcaatacgggcgctgcgttgtcgccgttcaacgcgttcctgatcctgcagggcatcgagaccctggccctgcgcatggaacgcatcaatgccaatgcgctggccgttgcgcagttcctgaaggcgcatgccaaggtcgcctgggtgcgctacgccggactggccgacgaccccgagcatgccgccgcgcagcgctatctgggtggacacggctcgggcgtactgaccttcggtctgcccggtgggcgcgaggccggcgcccgcttcctcgatgcgctgaagctgttcacccgcctggtcaacctgggcgatgcgaagtcactggccacccatcccgcctcgaccacccaccgccagttggatgcggcggagctggccaaggccggcgtcagtgaagacaccgtgcggctgtcgatcggcatcgaacatatcggcgacctgcgtgccgacctggagcaggccctggccggcgcctga

SEQ ID NO: 496869 - DNA, 738 bp, Stenotrophomonas maltophilia
atgcagccatccccctggactccccctgccagcagttcgcccacgtcggtcctgctggtggaggacgaccgtcgcctggccgaactggtcagcgactatctccacgaacatggcttcaccgtgcagcacgtggcacgcggcgacctcgccagcgccgcctgccgccagcatgcgccggagctggtggtgctggacctgatgctgcccggcctggggggcatcgatgtgtgccggcagatccgcagcttctccgatgtgccgatcctgatgttgaccgcctgtgaggacgacatcgagcaggtgctgggcctggaatcgggtgccgatgactatgtgcacaagccgatcgagccacgcctgctgctggcccgcctgcgcgccctgctgcgccgccgccacggcagcagcaacaccggcacccccagccggctgatgcatggtgagctgctgatcgatcgcatgcagcgcgaggtgcacctgcacggccagccggtcgagctgggcaccacggaattcgagatcctgtggctgctggccagccagccggggcagatcctgtcgcgcgaccagatcctgcaagcggtgcgcggcatcggcttcgacggtctggaccgcagcgtcgacgtctgcatcggcaagctgcgccgcaagctcggcgacgatgcgcgcgaaccgcggcggatcaagaccgtgtgggggcgcggctaccagttcaatcctgcggcctggtcggaatga

SEQ ID NO: 496870 - DNA, 1290 bp, Stenotrophomonas maltophilia
atgaagcggctgttcctgtggctgtggttcatcaccggcgcctgcttcctggtgtcggtgttctttctcaaccacatcctggatggcatctacacgcccgtgcaggatcgcgtgttcgtgcagcaggtgcgcgggcaggtgtacgccctgcgcagtggcctggccggcctggacgccgtccagcagcgtgagcgcctgcaacagtggcagccacactacggcatcgccctgaccctgctcgacaaacctcccgcgctcgacgcgcaggaacaggaggccgtgaaggccgatggcttcgtcgtgcgcgatcagtaccagcaggtgctgctgcccatcgacggcatcggcggccgctggctgcacctgcgcctgcccggcgcggtgcagatgacgacgtacatgaccatcgccgcctacctcagcatcctgctgctggtgggcgccagcctgtatgcctgggtgcgcctgctctggcgcgacctggaagcactgcgccggcacgccgaccgcatcggttccggcgacctgcaggcacgtgcgcaggtttcgccccgctcgcagatccgggtcatcgtcgaacactccaaccgcatggcggcacgcgtggccgaactggtgcagcgccagcgcgacctgacccatgccatttcgcacgaactgcgcacgcctatcgcgcgggtggccttcggcctggacctgatgcaggacagcgatgaccgcgaacgccgcgaacggctggcgcagggcctgcacggcgacctggccgagctcaaccggctggtcagcgaactgctggcctacgaacggctggagcatcccagcgagggcgaaccgatgcagcgcatcgaagccaacgactggctgcaggcctgcctggccgatgcccgccgcgatgccgaacgtgccggcattgtcctgcgcgtgcagcccagcgcgttgccgcgagtggatgccgagccacgcctgttgcagctggcgctgagcaacctggtcggcaatgcgctgcgccacgcgcgttcgcaggtggaggtctcgctggtcggtatcagcggccgcgcctgcctgcgcgtggacgatgacggcccgggcatcgccgaagccgatcgggagaaggtgatgcgcccgttcacccgcctggacgacagccgcagccgcgataccggcggcttcggcctgggcctggccattgtcggccgcattgcagcccgccacggcggcgagctgcgcatcagtcgcgccacgctgggcggcgcgcgcctggaaatgcactggccgctggctgccagctga

SEQ ID NO: 496871 - DNA, 801 bp, Stenotrophomonas maltophilia
atgtcccagcttcgccgttcccccgccctgctctgcctggccgtgttgccgctgttcgccgccccgatcgcccacgccaaggatgaccactggaccttcgagctcgccgccggtggcggcgtggcaccgcgttacagcggcagcgaggagtatcgtgcgacgccgtcgctgtcctttgatgtcacctcgccggggggatggtttctgggcaccagtggcatcggctggggcacctccctcggcgagcacacgcgcgtgcgtgcctatgtcggcgccagcggcatccgcaaggacaaggactcgctgctgggcggttcggacttcctgcgcggcatgggtgatatcgatacccgtcccctggtcggcgtctcggctggttatacgctgggcgaagccgtgctgagcggctcctggcagttcacccgcaaggacgaggataaggccgagaacggcctggccacccagcagatccatctgaacctgagcatgccgctgttcgacctggccggtggcgtggtcagcggcagtgtttccaccgactacggcaaccgcggctacatgcagacctggtacggcgtcagcccggaacaggccaaacgcacgggcttcgccgagcacaagccgaaggccggcctggtcagtgccggtgtcggcctgaagtggagccaccgcgtgggccgcaacggcaactggtacatctcggccgaaggcacgcgcctgctcggcgatgcggccaacagcccgatcgtgcagaaggcaaaccagttcgggctgatgagcggttacacccaccgcttctga

SEQ ID NO: 496872 - DNA, 546 bp, Stenotrophomonas maltophilia
atggacgttgcccgcagggcttcactctgcatgacgctggcgttggctgctgtttgtggacacgccgcggccgccgaacaggcccagctgccgccgatgaagggctaccagcaggcccaccagagcaccgacgcgcaaggcaaccgcatcaccgagtacgtgccacagggccagaccgtgcacgactggaccgacatggtcaccgtcaacgatgcgccgaacagtggccatgtgagtccgcgtgagttcctcggcatcatcgaggcggggtggcgcatcgcctgtccggcggcgcagagccactggatccgcgaaggtgaagaagggggacggcccttcgccctgctgatgctcggctgcccgcggaatccggggacaggcaagcccgagttcacctggatcaagggcgtgcagggcaggcagggcttccacaccgtgcagaagtcgttccgctccgagccggagaaggaggacgtcgtgcagtggatcggctggctgcgcgaggtcgggttgtgcggcagcggcgacgcaccggcctgccgctga

SEQ ID NO: 496873 - DNA, 2586 bp, Stenotrophomonas maltophilia
atgcggatggacaagctcacctcgcgtttccagcaggcgctggcagacgcccagtcgctggccgtgggccgcgacaacagcatcattgaaccggttcacctgttcagcgcgctgctggaccagcagggtggcagcacgcgcccgctgctggcccaggccggggtgaacgtgccggtgctgcgcgagcgcctgaccgaggcgctggacgcactgccgaaggtatccggccaggccggcaacgtttcgatgggcaacgatctggggcgcctgctgaaccagaccgacaagctggcgcagcagcacggggacgccttcattgccagcgaatggttcgtgctggcggcgctggacgatggtggcacgctgggcatggcgctgcgcgccgccggtgccgacaagacgcgcctgcaggcggcgatcgacaagctgcgtggcggcgagaacgtgcagtcggagaatgccgaggagcagcggcaggcgctggagaagtacaccatcgacctgaccgcgcgggccgagagcggcaagctcgacccggtgatcggccgtgacgaggaaatccgccgcaccatccaggtgctgcagcgccggaccaagaacaacccggtgctgatcggcgaacccggcgtgggcaagaccgcgatcgtggaagggctggcccagcgcatcatcaacgacgaagtacccgagggcctgcgcggcaagcgcgtgctgtcgctggacatgggcgcgctgatcgccggggccaagttccgcggcgaattcgaggagcgactgaagggtgtactcaacgacctggccaagaacgaaggccagatcatcctgttcatcgatgaactgcacaccatggtcggcgcgggcaaggccgacggcgcgatggatgccggcaacatgctgaagccggcgctggcacgcggcgagctgcattgcatcggtgcgaccacgctggacgaataccgcaagtacatcgagaaggacgctgcgctggagcgccgcttccagaaagtcttcgtcggtgagccgtcggtggaggacaccatcgcgatcctgcgcgggctgaaggaaaagtacgccgtgcaccacggggtggagatcaccgacccggccatcgtggccgccgccacgctgtccaaccgctacatcaccgatcgccagctgccggacaaggccatcgacctgatggacgaggctgcctcgcgcctgcgcatggagatcgactccaagccggaggagctggatcgcctggaacgccgggtgatccagctgaagatccagcgcgagatgctgaagaaggaaaaggacgaagcctcgcggcagcggctggccgacctggagaacgacatcgacgggctggagcgcgagttctccgacctcaatgaaatctggaagtcggagaaggctgcgctgcagggcgccaccaagatcaaggagcaggtcgagcaggccaagctggaactggaagccgcgcagcgccgccaggatttcgccaagatgagcgagatccagtacggcctgttgccgcagctggaaaagcagctggccgcggcccaggaagccgagcacaaggacttcaagctggtgcaggaccgggtcaccgacgaggagatcgccgaggtcgtgtcgcgctggaccggcattccggtcaacaagatgctcgaaggcgagcgcgacaagctgctgcgcatggaagaggtgctgcacaaccgtgtggtcggccaggaggaagcgatcaaggtcgtctccgacgccgtgcgccgttcgcgtgcaggcctgtccgatccgaaccgtccggccggctcgttcctgttcctcggcccgaccggcgtcggcaagaccgagctgtgcaagtcgctggccgaattcctgttcgacagcgccgacgcgatgatccgcatcgacatgagcgaattcatggagaagcacagcgtcgcccgcctgatcggcgcccccccgggttacgtgggctacgaggaaggcggctacctgaccgaggcggtgcgccgtcgcccgtactcgctgatcctgctcgacgaagtggagaaggcgcatccggatgtgttcaacatcctgctgcaggtgctggacgatggccgcctgaccgatggccagggccgcaccgtggacttccgcaataccgtcatcgtgatgacctcgaacctgggctcgcaccagatccaggacatgagcgccgacgacagcccggaggcctacacgcagatgaaggcagcggtgatgggcgtagtgcaggcgcacttccgtccggagttcatcaaccgcctggacgacatcgtggtgttccacccgctggacaagcagcagatcaagcagatcgcgcgcatccagatgcgcgggcttgagaagcggctggccgagcgcgggttgaagctggcggtctccgatgcggcgttcgacctgctcggcaacgtcggcttcgatccggtgtacggcgcgcgcccgttgaagcgtgcgatccagtcgcagctggaaaacccgctggcgcagcagatcctgtccggcgccttcgtcaacggcgataccatcgaagtcggcaacgacggtggtcgcctggtgttcgccaaggcttga

SEQ ID NO: 496874 - DNA, 822 bp, Stenotrophomonas maltophilia
atgcagagtggaaaggcggtctggccctgggtgttgggtgtggtggtgatcggtggcgcgggcggctggttgttccgcgatcagctgaagagcctggccgacggtgtcccggtgccggtgcaatcaacccctgccagtaccagtgcaccggcacaaccgcaggcggccgcagagcccgcgccagcaccaccatcgatcaggcatccgctggataccgaggccgccgccgacccggcgctgccgaaactggctgacagcgacgccgcggcctggggcgcactgagccagctgttccagggcgagggaccgctgaccctgctgctgcgtgatcacctgatccagcgcctggtcacccaggtcgacaacctggacaagcccagcgtgccgccgaccgcgctggccgcgcggccgctgccgggcaacctgcaagtcgatacgggcgaaggcggcgaacgcatcgccgccagcaatgcggcacgctatgcgccttacgtacaggcgttcactgcgctggacccggcggcaacggctaccgcttacaagcgcttctatccgctgatccagcaggcctatgccgaccttggccggcccgagggctatttcaacgaccgcctggtcatggtgatcgaccacctgctggacaccccggaactggcccagtcgccgctggtgcagcgcgatgaacgcggccgctatcgcttcgtcgatcccaccctgcagtcacgctcgatcgggcagaaggccctgctacgcatggatcctgcacaggcgcgggcgatcaagcagcagctgcgggcgatccgcagcgcgatcacccgctga

SEQ ID NO: 496875 - DNA, 711 bp, Stenotrophomonas maltophilia
atgcagtacgcgctgtactactggaccggcatccagggccgtggcgagttcgtgcgcctggcgctggaagatgccggcgccgactacatcgacatggcgcgggtgcacggcgatgcggtgatgcagccgtttctcgatggcagcagtgaaggtgcgcagcccttcgcgccgccattcctgaaggcgggccgccaggtcattgcacaggtcgccgcgatcctggattttctcggcccgccgcttgacctggtgccgcaggcggcctcgcggcggatgcaggcactgcagttgcagctgaccatcgctgatctggtggccgaggtgcatgacacccaccatccaattgccgcatcgaagtactacgaagagcagaagaccgaagccaaggcacgggccgcctcactgcgtggcgaacggctgccgaagttcctcggctacttcgagcaggtgctggccgccaatggtggccgccacgcactgcgcgagcattcctatgttgatctgtcgctgttccagctgctgagcggactggactacatgttcccgcgccgcatgcaggcactggcgccgaccctgcccctgctgcgtgcgctgcaggagcgggtggcgaagcggccgaacatcgccgcctatctggcctcggagcggcggttgccgttcaacaccaacggcatcttccgccactacccggaactggacgccgaacggtag

SEQ ID NO: 496876 - DNA, 1605 bp, Stenotrophomonas maltophilia
atgtccgctcccgcttccgccgtaccgcgtcgctggttcgtcgccggcgacttcaacggcttcttcggcctggtcgtcgacaacctctccatcctcggcttcatcgccatggccctggtcgggatcttccagtttcccgccgacgtggtgttcggccgcatgttccccggcaccgccttcggcgtgctggtcggcaacctgctgtacaccctgatggcgcgccggctggccgcgcgtaccggccgcgacgatgtcaccgccatgccgctgggcctggatgcaccgaccagcatcggcatggcgctgctggtgctcggcccggccttcatcgcgttcaagcagcagggcatggacccgcacgctgcgggcatcgccacctggcagctgggcatggccgcgctggtcatcatgggcgtgctcaagttcgtgctgtcgttcttcggcgaagcggtcacccgcgcgctgccgcgagccgcgctgctgggttccatcgccggcatcgcgctggtgctgatgggcctgctgccgctgctggaaacgctgcgctcaccgctggtcggcttcaccacgctcggtttgctgctgtacgtgctgatcgccaagggcaagctgccggtgcgtggcccgggcgtgctgctggccttcgtgttcggcaccgtgctgtattacggcctcggcctggccgggctgggcgcacccggcttccatgtaccggagtgggtgccgccgcaggtggtgctgccgctgccgacactgggcttcctcgacggcctgcccaccgcgatgacctacctgccgctgctgctgccgttcggcctgctgatggtggtgggcggcatcaacgtgtctgaaagcgcgcgcgcagccggcgacgactaccgcacccgcgacatcctgctggtggaagcggtggccacgctggtggccggcgtctgcggtggcgtggcgcagaccacgccgtacatcggccagccggcgtacaagcacatgggtgcgcgcagcggctacacgctgctgaccggcctgttcgtcggcatcggcggcatgctcggcatcatttccgggctggtgcagtggctgccgctggcggtgctggcaccgatcatcgtgtacgtggccatcgatatcaccacccaggccttccaggccacgccgcgtcagcacaccggtgcgatggtgttcggcttcctgccgtcagtggcctacctgctggcgatcaaggcacccggctggatcgcgccggaccagctgccgcagctgctggccaaactggatggccacggtctgcccgagctggcggtgatctttaccctcggcaacggcttcatcatcacctcgatgctgtggatttcggcggtggcggcgatggtcgatggccgcctgcgccgtgcctgcggcttcctgctggtggcggcggtgctgaccctgttcggcctgatccattcggtggacccgcgtggcggcatctacctgccgtgggatctggacgggctggcgcgcatcatcagctggcagttcgctggtgcctacgtggcactggcgttgctgctggggttgctttcgctgcagaagcagccggtgcagccgctgggtgaaaacaactga

SEQ ID NO: 496877 - DNA, 1977 bp, Stenotrophomonas maltophilia
atgcacggtctgaatcctccccaagctgccgcggtcctgcacgtcgaaggcccgttgctggtgctcgccggcgccggcagcggcaagacgcgcgtgatcgtggagaagattgcccacctgatcggctgtggccgctacccggcccgccgcatcgctgcgatcaccttcaccaacaagtcggccaaggaaatgcgcgagcgcgtggccaagcgcctgcgcgagcaggacgccgacgaggtgaccatctgtaccttccatgcgctgggcctgaagttcctgcagatcgaacatgccgccgtgggcctgaagcgcggtttctcgatcttcgatgccgatgatgccgccgcgcagatcaaggacctgatgtacggcgccaagcccgatgacatcgaggacatgaagaacctggtgtcgcgcgcgaagaacgctggcctgtcgcccgaacaggcgatggccgccgcgcgcagcaaccgcgagaaggaagcggccagcgtctacgagcgctaccagctgcggctgaccgcgttcaatgcggtcgacttcgacgacctgatccgcctgccggtgcagatcctggaagagaacccggagatcgcgctggcctggcgcgagcgcatcggctacctgctggtggacgaatgccaggacaccaacgacgcgcagtaccggctgctcaagcagctggccggcgagaagggcaacttcacctgcgtcggcgacgatgaccagtcgatctacgcctggcgcggcgccaacccggaaaacctgcagcagatggggcgtgattaccccgcgctggaaatcatcaagctggagcagaactaccgctgctccaaccgcgtgctgcgtgcggccaatgcgctgatcgccaacaacccgcacgagcacctgaagaagctgtggagcgaccaggctgacggcgagcgcatccgcgtgtgggaatgccgcaacagcgaacacgaagcagagaaggtcgctgcggagattgccttcgtggcgcagtcgcgcaacgtgccgtggagcgacttctgcatcctgttccgcggcaacttccagtcgcgcccgctggaaaaagcgctgcagctgctgcgcattccctatcacctgaccggcggcacgatgttcctggagcgccaggaagtgaaggacacgctggcctggctgcgcctgctggtgaacccggacgacgacaccgcgttcatgcgtgcggtgcagtcacccaagcgcgatgtcggtgccggcacgctggccaggctggccgaactggcgcaggagaaagacatgccgatggcgcaggccgccgaggcgatcggcgccctgcagcagttgccgccgcgtgcggccaacagcctggcgcgtttcaccgacatcctgcgcgacctgcgtgcgcagatgcgccaggtcagttccggcgacatgatccgcaaggtggccaaggagtccggcctgctcagcgaacttcgccagcaggccaaggaagaagccagttaccagcgccgtgccaacaacatcgaggaactggcgcagtggttcgagggcggcccgcgcggtgccactgcggctgacctggccggacagctggcactgctgtcgcgcagcgacaaggacgagggcggcaaccaggtgcgcatgatgaccatgcatgcctccaagggcctggagttcccgtacgtgttcatcgtcggctgcgaggacggcgtgctgccgcaccaggtcagcctggacgagggcaacctgcaggaagaacgtcgcctgctgtacgtgggcatcacccgcgccaagatccagctgtggatgagttacagcaagctcacgcgcaagtttggcgagcacgtgcggctgaagccgagccggttctttgatgagatcccggccgaggagatccagcgcgatggtgcggacccggtggccgatgcggcgcggaagaaggagcgggcgagtgccgggttggcggcgatcgaggcgttgttcgactga

SEQ ID NO: 496878 - DNA, 672 bp, Stenotrophomonas maltophilia
atgtccccgactgtcatcgcccgtccgcttgcggccgccctgctcggcctgctggcccagcctgcggccgggtccggcccgccgccgcgcacggatgcctatgaagcgatcgtgctgcagtcgcacgagttcctcatctaccatccggacctgcgcttccgtgggctcggcatgcaggcccgcgaacggggccgccacgaagaagcccgcatcgacttccgcaatgccgcgcgctacggcgacaagctgtcacaggcagcgctggccgacatgctctggaacgggcaaggcggcccggctgaccgcgccctgggctacgcgtggatggacctggcggccgagcgcggcaccgagtggctggtggtgcagcgcgaacgcttctgggaggcgctgtccgccgacgaacgcgagcgcgcggtgcgcgagggccgcgcgctgtacgccgagttcggtgaccccgccgccacaccgcggctggaacgcgaactgcgcgccggcagcatgcagcagaccggcagccgcgccggctggagcggcgccatgcgcagccagggccgcggcgatgccgggccgcgcgtgctgcaaccggagaagcaccagctggcccgttactgggatccggtggcctaccggcaatggcaggacgaggcgttggcgaagtcggggcgatga

SEQ ID NO: 496879 - DNA, 729 bp, Stenotrophomonas maltophilia
atgaaggcgaaacacgctccactctgcctgttgctgcttctgtcgacggccactgccgtcgccgcaaaggaatgcccggttgaggccccgcgacggattccgcccaccgtcctgaccggagggtttttcgattcgcacccggacctcttctggcgaagcatggcccaacgggccgaacaggataaacagcccgccagggccctggtctactacaaacgctcggcacgctacgccgacaagttctcccaggcaatggtggcaaggctgtaccaggagggtatcggcactgcgccggacccggtgatggcctacatctggatggacctggccgccgagcgcatgtaccacgacttcctggtcctgcgggaacactactgggcacgccttgatccgctgcagcaggcacaggcgatcgagcgcggccaacaggtatacgccgactatggcgaccgcgtagccaagccccgcatggaacgggcgctcagcgacgggcgccggcagatcaccggcagccgcgtcggctacgtgagctcggccctggtcgtcgtgcagcgccgcggcgacgagcagggcatcgcaacgccaggcaacatcgtctacgacaacgactactggaaggccgccgactactggtgcctgcaggacaactactggcggccagcgcttgcgcccagcatcgagatcggtgcgccgcagcagatccgcgacggcgggccggggggcgactag

SEQ ID NO: 496880 - DNA, 621 bp, Stenotrophomonas maltophilia
atggccaagctctacttctactactcggcgatgaacgccggcaagaccactaccctgctgcagagcgcacacaactaccgcgagcgcggcatgcgggtggcgatcctgaccccacgcctggacgaccgcgccggcgccggtgtggtcgcctcgcggatcggcctgcgcgccgatggcatggccttcgaccgtgacaccgacctgcagcgctgggtggagcaggatctggcggccaacggcccgatgggctgcgtgctggtggacgaggcgcagttcctgacccgggcccaggtctggcagctcagcgaggtagtcgaccagctgcgcattccggtgctgtgctacggcctgcgtaccgacttccgcggggagctgttcgaaggcagccagtacctgctggcctgggccgacgagatgcaggagatcaagaccatctgccacagcggcaagaaggcgaccatgaccgtgcgcgtggacgagcatggccacgccgtgcaggatggcccgcaggtggagatcggtggcaacgagcgctacgtgtcggtcagccgtgcggagttcaagaagatcacccgcggcgaagggcggatcgatccggcgcaggcacccctgccgctgtaa

SEQ ID NO: 496881 - DNA, 1509 bp, Stenotrophomonas maltophilia
atgggcctgcgccgcctcggccagccgcaaccgttcgacttcgctaccctgaagggccaggcgcgcgcgctggcgcaggcgccctacaagagccacaagcgggtgctgccgggccgtctggaaggactggactgggaccagtaccagtcgatcggctaccgccaggaccatgcgctgtgggccgaccagcccggcaagttccaggccaagttcttccacctgggcctgtacttccattcgccggtgcgcatgttcgacgtggtcgacggcaaggcgcaggagctggcctatgacggcgcggcgttcaactacggcaagagcggcatcaaggatggcgagctgccggccgacctcggcttcgccggcttccgcctgaacacccgcaaggacactgaccgcgacttcgccgccttcctcggcgccagctacttccgcgcggtcggcaaggaaggccagtacggccagtccgcgcgcggcctggcgatcgacaccgggatgggcaagccggaggaattcccggatttcatcgcctactacctggaacagccatcggctgattcggacacgatcgtggtctacggcctgctggattcacccagcgtggctggcgcctatcgcttcgcgatcaccaatggcgacgtgctgctgatggacatcgacagcgcgctgtacccgcgcaagccgatcgagcggctcggcatcgcaccgtgcaccagcatgtaccaggtgggcgagaacgaccgccgcatggcatgggactggcgcccggagatccacgataccgatggcctgtcgctgtggaccggcgctggcgaatggatctggcggccgctgctgaacccgcgcaacctgcgcttcaacatgttcgtggaccgcaacccgcgcggcttcggcctgctgcagcgcgaccgcaacttcgaccattaccaggacgacggcgtgttctacgagaagcgcccgtgcctgtgggtggagccgaagggcgaatggggcgagggctcggtgcagctggtggagattcccaccgtggacgagacgttcgacaacatcgtggcgttctggaacccgaaggataagccgcagccgggccaggagctgctggtcggctaccgcctgtactggggcgccgaaccgccggcgcgcccgccgctggcgcactgcgtggccagccgcaccggcctgggcggtgtggtcggcaagaagcgcgagtacttcagctggcgcttcgcggtggacttcgaagggggcgagctggccagcctgatcgacaagggtgaggtcgaggcggtggtggaagccagccgtggccgggtcgagatcgtgtcggcgcgcccgctgcgcgagatcaacggctatcgcgcgatgttcgacctggtgccgccggaaggcagtaccgagcagatcgacatccgcctgttcctgcgcagtggcggcaagacgcttacggaaacctggctgtaccagtacaccccgccgccggcgggtgcgccggagcgcacgctgtactaa

SEQ ID NO: 496882 - DNA, 813 bp, Stenotrophomonas maltophilia
atgcctgaactgcccgaagtcgaaaccacccgccgcggcctggcgccgcacctgcagggccgccgcgtgcatggcgtgatcctgcgccgcgccgacctgcgctggccgattccaccggaagtggccgagctgctgccggggcagcgcatcgaggacatccgccgccgcgccaagtacctgctgctggataccgccatcggcagcgcggtgctgcacctgggcatgtccggcagcctgcgcgtgctgcccggtgacacaccgctgcgcgcccacgaccatgtggatatcagtctggacaacggccgcctgctgcgcttcaacgacccgcgccgattcggcagcctgctctggcagcccgccggtgagatccacccgctgctgcaggggctgggcccggagccactggacgagggattcgacggcgactacctgtttgcgcgcagccgtggccgtagtgcgccggtgaagaccttcctgatggaccaggcggtggtggtgggcgtgggcaacatctacgccgccgagagcctgttcaaggccggcatcagtccgctgcgcgaggctgggaagatctcgcgcgaacgctaccagcggctggccgacgcggtgaaggagatcctgggctatgccatcacccgtggcggcaccaccctgcgcgatttcatcagccccgatggcgcgccgggctacttcgaacaggaactgctggtgtacggccgtgacgggctgccctgcccgaactgtggccgcgcgctgaagcacgccaccatcggccagcgcgccagcgtctggtgcagccactgccagcgctga

SEQ ID NO: 496883 - DNA, 819 bp, Stenotrophomonas maltophilia
atgaaatcgaacccacccctgctggcagccgcgctgctcggcagcctcgtcatcgcctcgcctgtgctggccaatgagccacccccgaccgccccgtccgacacggcgacggctgcagacgttcccgccgctgatgccggcgttgccgccgccgtggcggagctgcctgcctgggaaagccgggtgccggtgagcgtaaagctgcagatgggcgcggatggccagccagtcggcgacaagacgctgcgcctggtgcagcgttccaccaccggcaagctggtggccgcgcaggttgccgtgtcattgttttccggcacgctcggcggcagctcgttcaagaaggaccagctgaagggaacccgggtggagaccgttccgaacccggccttcggttacctgcaggaccaggtgcgcatgcgcctggccgagtacttcaccgcgcatccgggcgctgtgccggcagaggtacggccggtgcagatcaccgccgatggcttcaccctgatctacaaggaactgggcgatgccgatacccagtacgagctgcgccagacccagcacgtcggcttcccgtatacccgcaagctgttgcgcctggtcggtggcgaaggcgtgcagtgccaggtcgacgcaccggtggccgcacccctggaagcctggcaggccgacgactatgcgttggtcaagcagacggccgagcgctacagcgaccagtgcctggcccggttcgtggaaacgctgccgtcgctgttcccggaccgtcccgccgctgcggcaccggttccggcggagcctgtgcgcgccggccagggcgcctga

SEQ ID NO: 496884 - DNA, 333 bp, Stenotrophomonas maltophilia
gtgagggcagggtacgggcttctgctggtggcgctgctgccgggcgcggcgctggcccaggtcaccgacaccgccagctatctgcagcggatggacagcgatggcgacggcagggtcagcgaggccgagtacgtgcagtggatgctgtatgccttcgaccgcatggaccgcaacggtgatggtgtgctgacggccgaggagctgcccggtggcaagggcagggcgatcagccgcgagcagcagcggcaggtgatcgtgcagcgcttccacaagcaggatgccaacggtgatggtttcctggatgcgcgcgaactggcggcgcctccgcgctaa

SEQ ID NO: 496885 - DNA, 1203 bp, Stenotrophomonas maltophilia
atgcctgatgccctgatgtccctgttgaccggtggtgtgctcggcctggggtggtgggccatgctggcagtgctcctggtcttcacccagatcaccatcttctcggtgaccctgtacctgcaccgcagccaggcccatcgcggggtcgatttccacccggcgctggctcacgtgttccgtttctggctgtggctgaccacctcgatgatcacccgcgagtgggtggccatccatcgcaagcaccacgccaaggtggagaccgaggacgacccgcacagcccggtcacccgcggcatcggcagggtgttctggcacggcgtggagctgtaccgggaggcacgcggcatgcgcgcggacatcgaacagtacgggcgcggtaccccggacgatgcgatcgagcgccacctgtataccccgcacgccacgctgggcccggtgctgctgctggtgatcaacagcgtgctgttcggcctgcccggcgtggccctgtgggcgatccagatggcatggatcccgttctgggcggccggcgtggtcaacggcctgggccactggtggggctaccgcaactacgagtctgccgatacctccaccaatctcacgccgtgggggttctggatcggtggcgaggagctgcacaacaatcatcatgccttccccagctcggcgcgcttcgcgatgcggcgctgggaattcgacatcggctggagtgcgatccgcctgctgcaggcgctgcgcctggccaaggtgctgcgggtggcaccggccatggacgtacgcccgaacatcgccgtgcccgatgccgagacccttaaggcgctgctgtcgcaccgcttccaggcgatgaccgactaccagcgcaatgtgttcatgccggccctgcgcgaggaagccgcccaggccggagccaagctgcgccgcctgctgccgcgccggctgcgccgtggactggtcaacgatggtcgctggctgaagccggacagccgtgcccagctcagcgcatgggtggcacagcgcccgcgcatccgcaccctggtcgagtaccgcgcgcggctggcggcgttgctggaagcccgaggccacgacgccgccgagcgcctgcaccagttgcaggcgtggtgccgcgaggccgaggaaagcggtatcgcggcgttgcaggcctacgccgcacgcttgaagggctacagcctggtgggcgcgtga

SEQ ID NO: 496886 - DNA, 822 bp, Stenotrophomonas maltophilia
atgaccgccgccccgcccgtcgcggagctgccccccttgatcgaactggaccgcgccaccgtggtgcgcggccaggtgaaggtgctgcacgggctcagcctgcgcatcgcgcagggccagcacaccgccctgctcggccccaacggctgcggcaaatccaccttcatcaagctgatcacccgcgaactgtatccactggcgcagggcgacggcacggtggcggtgaaggtgctgggccagaaccgctggcaggtggaccggctgcgctcgcagctgggcatcgtcaccggcgacctcagcagcaacttggccgacatgcccggcctgaccgtggaacaggcggtgctgtccggcttcttcgccagctacgtggtgccggccttccgcgaagtgaccgccgacatgcgtgcacgcgtcggtgaaacgctggcgatgaccggcgccctgacgctgcgcgagcgcgcctatgccgagctgtcggccggcgagacccgccgcgtgctgatcgcccgcgcgctggtcaatcgaccgcaggcactgctgctggacgaaccctccaccgggctggacctggtcgcccgcgagcagctggtggcgaccatgcgggtgctggcgcagcagggcatcaccctggtgctggtgacccaccacatcgaagagatcattccggagatcgagcgcgtggtgctgctgcgcgatggtcgcgtactggccgacggcacccgcgccgagctgctgcgcaacgaaccgctgtcgtcggtgttcggcggcgcgatcaccgtatgcgagcaggaaggccggctgaccgcgtacgcggggtga

SEQ ID NO: 496887 - DNA, 1203 bp, Stenotrophomonas maltophilia
atgacgaaccattccaccctgctggccagtgctttgctggccgtgctgtccctttccgcagcgcaggccgcgcagccgctgcaggccgcccgcgcgggcgatcaggtgcctgccgcactggtggccgcgccgctgcccgccgatgaaagcgagcacgcgccgctgtcctttgcctgggcgctggacccggcacaaccgctgcaggcggccacgccgtatgcctcggtcagccgcagctactggcagcaggtcgatggcacgcagctgcaacgcggcctggacctgccgctgacggcgcccgatgcggtgatccagctgagcccggccgcaggtgcccgcgcgctgcctgccaacaccctgcaggtgcgcgacccggccggccgcagcagcgtggcccgcagtgtcgatgcgcgcgcgctgcaggatgccggcatgccggtgagtgatggcagcagcatgctgcgcaccggcgcgaccagttcggccggtgcgtacacgctgcagagcacgcaggcgcagggccgctatgtggtgcaggtgcttgagccgaacagcccgctgcggctggaagtgcaggccaaccaggcgcaggtgctggctggtggcaacgtgcagctgcaggcacgcctgctggaagacggcgccaccaccgcgcagctggcatcgcgccgtggcggcctgggcggtgaagccctgctggtcgcaccggatggccgcagctggccgcagcgcctgctgcgcaccaccgacggcagcctgcgcgcgcaggtgcgcatccccgccgatctcggcagcgtgcaggggctgtgggaactgcaggtgttcgcccaggccgatggcgtgctgcgcgacggcaaggtggctttcgcggtggcacggccgaccgcgcgcttcagtggccaggcggcaccggacccgtccagccgccaggtggcactgccgctgcaggtggccgccgctggccgctacgaagcacgcggcacgctgtacgccacggcccgcgatggccagttgaagccggtcgcgcaggcacatgcggcggcgtggttcgatggccccggtgcaggccagctggtgctgccgttcgaccaggccgcattgccggccggtttcggtgcgccgtacgaactgcgcgacctgcagctgcaggaccagagccggatggcaccgatcgagtcgcgcgcgctggcgttgcggttctga

SEQ ID NO: 496888 - DNA, 879 bp, Stenotrophomonas maltophilia
atgcgcagcaccgcaacaggaagtaccgtcctggccctgctcctcgggctggcaaccgccccggcgcaggccgccgacgtggtcggcgtggccttcgtgcatggcaccggcgcgcagaccaatgccacccaggactactggcagccggcgatcatcgacaccgtgcgccagggcctgccgaacagcagcaactacgtcgtcatcaactgtgacttcacccagtacatgtggaaaccggaagcggccggttgcctggccaaccagctgaccggcttcatcgacagccgtggcatcacccagctggtggtgatcacccactccaacggcggcaatgtgatgcgctggatcctgtccaacccgacctacgacagccgctatccgaagatcatccgcacggtgcgcaaggtcaatgcgctggctccgtcctcggccggtacaccgctggccgatgcagtgctcaacggcaataccttcgaaacgtcgctgggctggctgctgggctacaagaacgacgcggtacgccagcagcaggtggcaagcatggccacctacaacgcgcagaacctgtacggcacggccggtcgcccggcgctgcccaaaccgttccgtgcggtggtcggcagcgatgtggaatcggcggtgtgggacagcaacagttactgcggtggctacgccgccaatgtcggcctggagttcacccagaactggctgtcgtcctgctccgatggcttcctggagtgcagcagccagaaggctgccggcaccacctggttcaccgacaaggcacgcacccagggcgccgaaccactcagccacaaccagagccggcgcgagtgcttcggcctcggcaccctgctgcgcaacgacctgaaccagtga

SEQ ID NO: 496889 - DNA, 840 bp, Stenotrophomonas maltophilia
atgtcgctgatttcccacaccgcccgcccactgctcggtctcaccgttgtcgcggtcctggctggctgcgcagccaccgccagcaagccgaccgccgtcgaagccaacatcaccaccaaggcggtgggctatctggacacgagcgcggttccggccagcctggacctggtgccggcaccaccggcggccggttcggccgccctcgccctggacgaacaggtcagccgtgaagcccgcgcgctgcgtggcagcccgcgcttcgcccaggccggcgtcgatgcggaactcggcttccccgaaggcgccaaccacttctcctgcgccgccgacatcgacgtcgatgcagtgaagaccccggcgctgtaccgactgctggagcgcagccggatcgacgccagcgccgccaccaaggcggccaagaaccactaccagcgcccgcgcccgttcatggtcaacggtgagccgacctgctcgccgaaggacgaggacggcctgcgcaagaacggttcctatccgtccggccacacctcgatcggctgggcctgggccctgatcctgtcggagatcgcgccggaccgcgccgatgccatccaggcccgcggccgcaactacggcgagagccgcctggtgtgcaacgtgcactggcagagcgacatcctcgaaggccgcttcatgggcgcggccgccgtggcccgcctgcatgacaacgctgccttcaacaaggacctgctggccgcacgcaaggagatcgaggcggcgcgcaaggccggtcggcactccagccgcgactgcgccaccgagaatgcggtgttgaagatccgcccgcagagcgcgctgtaa

SEQ ID NO: 496890 - DNA, 2271 bp, Stenotrophomonas maltophilia
atgtccccgacccgcacttcccgtggccgatttccggtcgcgcgccccctcgttgccgctctttccgccctgctgccgctggtagcagccgcccaggaaacccccgctgccaaggatccggttgccctcgacgccctgcaggtgaccgcgcagcgccgtgtcgagaacgccaaggacgtgccggtcgcgctctccgcgatccagggcgagaagctggatgtgctcggttcggccggcgatgacatccgtttcctggccgcacgcgtgcccagcctcaacatcgagtcgtcctacggtcgtgccttcccgcgcttctacatccgcggcctgggcaacaccgacttcgacctcaatgcgtcgcagccggtttcgctggtgtacgacgacgtggtgcaggaaagcccgctgctgaagggcttcccgctgttcgacctggccaacgtggaagtgctgcgtggtccgcagggcacgctgttcggccgcaacaccccggccggcgtggtcaagttcgattcggcgcgtccgtcgcaggatgccgatggctacatccgcgtcggctacggcagctacaacagctggaacgtacagggcgcctacggcggcccgctgaccgatcgctggtcggcacgcgtctcggcgatctaccagcgccgcgatgactgggtcgacaacacccgcgtcggcgctcccaacagtggcttcgaaggctatgacgaagccgccggccgcgtgcagttcctgtacgaaggcgatgacttcgaagcgctgttcaacctgcacaagcgcaagctcaatggcaccgcccgcctgttccgcgccaacatcatcgagaagggtggcaactcgctggtcgagaacttcgaccgcgacaaggtggccaacgacggcgtcaacttctccgacctgaagacctggggtggcagcgcgcgcctgcagtggaacctcggctcggtgacgctgcactcgatcaccggctacgaaaccgccgaatcgctcaaccggggtgacatcgacggtggctacggcgcggcgttccttggcgccggcaactacggccccggcctgattccgttctcgtcggagtcggctgacggcctgccgcatcaccgccagtggacgcaggaagtccgcatcgagtccaacgagtggggccgcttcgactggcaggccggcgtcttctacttcgatgaagacgtgaccatcaacaacttcaactacgactcgctggccccgggcaatccgcagaccggccacgtggtgcagaaccagcgcaacaaggcctgggcggtgttcgcctcgggtgacttcgatgtcaccgaccgcttcaagctgcgtgccggcgtgcgctacacccaggacaagaaggacttcagcgccagcgtgctgcaggccgttccgttcggcaccccggtcagtggcccgtacctggccaacaccgacgtcaacgacgtcagctgggacctcagcggcgtctacaagctgaccgacgacatcaacgcctatgcccgcgtggccaagggcttccgcgcgccgtcgatccagggccgcctggccttcgcgccaggcctgtcgcaggccgattcggagaaggtgatctcgtacgaggccggcatcaaggccgacctgttcgagcgccgcgcgcgcctgggcctgagcgtgttccgctacaacgtcgatggccagcagctgatcgcggtgggcggcagcaacaacaccgccaccctgctcaacgccgacaagaccatcggccagggcgtcgagctggacctggaggcctacctggccgacaacgtcctgctgaccttcggcagcagctacaatgacaccgagatcaaggacaagaacctggcggtggcgatctgcggcggtggctgcaccatcaccgacccgaccacggtgatcaacggccagacctatgcgctggtgaacggcaacccgctgccgcaggcgccgaagtggatccacaacgcgaccctgcgcgtgggcttcccgctcagcgatggcagcgagctgtacgcctacaccgactgggcctaccgcagtgcggtgaacttcttcatctacgagtcgccggaattccgcggccgcagttcgctggaaggcggcctgcgcctgggctacaactgggattacggccagtacgacgtggcggtgttcggtcgcaacctgaccaaccagacccgcgtggtcggcgcgatcgacttcaacaacctgaccggcttcctcaacgagccgcgtacctggggcgtggagttcaccgcgaagttctga

SEQ ID NO: 496891 - DNA, 1020 bp, Stenotrophomonas maltophilia
atgacccagtggtacttccatgcctccgcccaggccgagcgcatcggcccgcttgatgacggggccgcacgccgctacgcgcaggccaatccacgcgccctggcatggtgccagggcatgagtgggtggacgccgatcgccgaggtggccgagctgcaggctccagccccgggcatgcccaacacaccgccgccggtcccggtccccgccggcgccggcggccgcgccgacgacatcgagttccgcatcgtcggccatgaaatgcagttcgtggagatcgagctcgaccccggcgagagcgccatcgccgaggccggcgccttgatgttcaaggacgccacggtgcagatggacacggtgtttggcgctgccaacggtgaccagggcggcttcatgggcaaggtgatggccgccggccgccgtgtgctgaccggcgagagcctgttcgccaccgtctacacccagagcgggcatggcaagggcaaggtcgccttcgccgcgccctaccccggcacggtgctggcgatgaaactggaccagcacggcggccgcctgatctgccagaaggacagcttcctggccggcgcgcgcggcgtgcagatcggcgtgcagttccagcgcaggatcatgaccggcctgttcggcggcgagggcttcatcatgcagaagctggaaggcgacggctgggtgttcatccacgccggcggctgcgtgatcgagcgcgagctggccgccggcgagcgcctggacgtggataccggctgcgtggtggcctatcactccagcgtggacatggacgtgcgccgggtggccggcatcaagagcatgctgttcggcggcgaaggcgtgttcctggccacgctgaccggccccggcaaggtctggctgcagtcgctgccgttctcgcgcctggccggccgcatgtggatggccgcaccgcagggcggcggccagagccgcggcgaaggctcggtgctgggcggcctgggccggatgctggatggtgacaaccggttctga

SEQ ID NO: 496892 - DNA, 486 bp, Stenotrophomonas maltophilia
atgaaattagtagtatcctatctatctcttatggaccgacccctcgacgagcgcaccgtgctgcagatgcagctcagctccggcctgctgtacgcagggcggcagtggcagcgcctggccgacagccggctcggcagctacggcatctccaccgcctgcaccatgcccctgctgatgatcggccgctccggcggtggcatccgccaggtggcgctggcccagcagctgggcatggagggtccttccctggtgcgcctgctggacaagctgtgcgccagcgacctggtccgccgcgagagcgacgccagcgaccgccgcgccaacctgctgtggctgaccgacgcgggccatgcgctggtcagcgagctggaagaccagttgatcggcctgcgccaggacgtgttcggcgagctttccatggatgaactgcacgccgtgctgaaggcatggcgcctgctggccgaggccgccgaccgcatcacgtaa

SEQ ID NO: 496893 - DNA, 687 bp, Stenotrophomonas maltophilia
atgaaccgtcccaacaggacgacccaccccccggtcgggtacgatgctcgccccccgttcgggacgctgtacgcaatgagcaagaacaacgaaaaggccgccccgcagggcgacgtgacccaggaccaggccgaggatgccgtgcgcaccctgctgcgctgggccggtgaggacccgtcccgcgaaggcctgctggataccccccgccgtgtcgccgaagcctatggcgactggttcagcggttaccgcgacgacccgcgcgcctacatggagcggaccttcgaggaagtggccggctacgacgaactgatcgtcctgcgtgacatcgagtacgaaagccactgcgagcaccacatggcgccgatcatcggccgcgtccacgtcggctacctgccggccggcaaggtggtgggcatcagcaagctggcccgcgtcgtcgaagcctacgcccgccgtttccaggtgcaggagaagatgaccgcgcagatcgcccagtgcatccaggatgtgctgcagccgatcggcgtcggtgtggtcgtcgaaggtgcccacgaatgcatgaccacccgcggcatccacaagcgcggcgtcagcatggtcacctcgaagatgctgggcagcttccgcgacgacgcgcgtacccgcgccgagttcctgcgcttcatcgaagtgggcggcaagcgctga

SEQ ID NO: 496894 - DNA, 1470 bp, Stenotrophomonas maltophilia
atgaagcaccgcgaacgcatctcccgttaccgccatctgcgcgaacagccccagtggaagctgcttgccgccgaccacgccccggaaatcatcggcctgctgcaggggctgctgatggacggcgagcgcacgctgccgtcgtcggtgctcaacgagcgcctgcagcgtgcgctggaccagctcaacggcgacgaactgtcgcgtgagctgccgcgtaccgcgcaggcctacatcgcgcactggctggcccagggctggctggaacgccgcctgcccgaaggcgccgaccaggagcagtacgagctgtcgactgcggcactgcaggccatccgcttcgccgatggtcttgagcaggcccgcgtggccgccaccgaaagccgcctggcgctggtcatcgaacagctctcgcagttggccgcgcagaccgaatcggatccggacgcacgcctgtcggcactgcgcgacgagcgcgaccgcatcgacgccgagatcgcccgcgtcggcgccggccgcgtggtcgcgctggatggcaagcgcgcgctggagcgtgcgcgccagatcatcggcctggccgacgagctgaccgaggatttccgtcgcgtgcgtgacgatttcgagcagctcaaccgcgacttccgcgaacgcatcatcgacgacgagggcgagcgcggcgatgtgctgtcgcagctgttcgaaggcgtggatgtgatcggcgagagcgatgccggtcgcagcttccaggccttctggcgcctgctcaacgacgccgaacagagcgcccagctcgatgccgcgctggaagcggtgctggcgcgtggcttcgcccgccgcctggaccgtaacgaacgcaacttcctgcgcggcttcaccagcaccatgctcgagcgcggtggccaggtgcacgacgtgctgcagaatttcgcgcgcagcctgcgtggcttcgtgcagagccgtggctatctggaacagcgccgcctcaaccagctgctgaagcaggcgcagtccgaagcgctggccctgcgcgacgaattccccgcacaacgcggcatcggccgcgacctgcagctgaccaccagccgcctgcgctcgtggtcgcagtggaagctgcacgatccgcgcagcgcccaggtcgatggcaacgtcgagtacaacgacgccgcagccatcagcctggagagcgtcggtgatctggtcgcttcgtctgaaatcgacttccgcaccctgcgccgcgacctgcacgacctgctcgatgcacagccgcggctcagcatcgcccaggcactgtcgcagcgcgaagcaccgcagggtcttggcagcgtcatcggctacctgtcgctgggcacccgcttcggcaacgtgatcgctggtgagcaggagcttgccgaatggcgtggtggcgacggccaggtccgtcgcgcccgcatcccgctggtttggttcacccaggagagacgccatgagctggcatga

SEQ ID NO: 496895 - DNA, 702 bp, Stenotrophomonas maltophilia
atgagctggcatgaagatcccatcgacgcaccgcaggccgacgtggcggaagacgcctacgaagccgaaccggtggcggccgtggcgcagccccgccgtggcaatgacgtgtattatctcggcgacaccgggcgcctgccgctggatgcacgccgcgcgctgtgccagctgctgatcggccccagcatcgaccagttgcgccacgccaagctgtggccggcactgatccgcagcgaggcggccatccgctcctcgctggcggacctgttcctggaactggtgctcgaccgtgacagcggcgtggccttcacccgccaggccgacaccgaagacgttgatgcgccggtgttgctgcgcacctcgccgctgaccttcatcgactcggtgctgctgctgtacctgcgccagcagctggccgaggccgatgcgcgcggcaaccgcgcggtggtcgccgacgccgagatggccgaagcgctggccatctacgagaagaacctgtccaccgaccgcgccggcttcaatcgccgcgtcgcttcggcggtgcagaagatgaaggacaaccacatcctgacccgcctcagcggccaggaagaccgccacgaagtctcgccggcgctgaagctgctgttctccgccgaagacgtatcccagctttcggcggtctaccgccagctgcgtgaaaccccggccgccgaggcctga

SEQ ID NO: 496896 - DNA, 3381 bp, Stenotrophomonas maltophilia
atggctatctccaagcacactcccgccctgttcaacgaaggcctgccggacccgcgcctgcagcagttccgcatgcgtcgcctgcaggtacacaactggggcacgttcaacggactgaccgaagtaccgatcgccgagcgtggcttcctgttcgtcggccgttccggctcgggcaagtcgaccctgctcgatgccatgtccgcgctgctgacgccgccggccatcgtcgatttcaacgccgccgcgcgtgaagccgagcgaagtggccgcgaccgcaacctggtgtcctacgtgcgtggcgcgtgggccgaccagcaggacagcggcaccggcgaaatcgccacccagtaccttcgcaagggcgcgacctggactgcgctggtgctggagtaccgcgccggcgatggccgcgtggtcagcctggtgcgcctgctgtggatctccggcaacggcacctcggccggcgatgtgcgcaagcactacatgatcgccgagcgtccgttcgacatcgccaaggatcttggcggctttgacctggacctgcgcaagctcaagcagaagctgcctgacctgcaccacttcgacaccttctccggctacgccgagcgcttccgcgacctgctcggcatcgacaacgagatggcgctgcgcctgctgcacaagacgcagtcggcgaagaacctgggcgacctcaacgtcttcctgcgcgacttcatgctcgacacgccgaagaccttcgacgccgccgagcgcctggtcagcgacttcgccgaactcgatggcgcgcaccaggccgttgtcaccgcccgccgccaggtggagaccctgctgccggcacgcgcctactacaacgacctgaaggaaatgcaccgccggcgcggcgacgacgaagccctcaagcttggcgtcgacagcttccgtgaaagccgccgccaggcgctgatcgaggcgcgcctgcgcgagatggacgtgcgtgaccgtggcctgctcggggaagaagcccagcgccgtgccgcactggacaaccacaccgagcgcctggccgaactggaactgcagcgtcgccagcagggcggtgagcgcatcgaggaactggaacgcgagcagggccgcgccgaagccgagcgtgaccgccgccaagccaagcgcgagcaggcaagcctggccgcgcagcagctgggggctgaacttccggacgacgcacacggcttcgccgagctggtcgagcgtgcgcagaacgaactgcaggaccgccagcgtgcctcttcggcgctggacgatgcgatcagcgatcgcctgggtggcaagcgcgatgacgagcgccgtttcggcgaagtccgtgcggaactcgaagcgatgcagcgcacgccctccaacatccctgcgccgatgcagaagctgcgcgcgcgcctggccgaggaaaccggcattgccgaggcggcgctgccgtttgtcggcgagctgatccaggtccgctcggaagagcagggctggcagggtgccatcgagcgtgtgctgggtggcttcgcgctgtcgctgctggtcgatgacaagcactacaacgacgtcgccgagtgggtgaatcgcactcacctgggcatgcgcttcacctactaccgtgtgcgccgcaacgatgatgcgttcgcgcgcgagccgtcggcgaagtcgctgctgcacaagctggagctgcgcgagcacgtattcgaaagctggctgcgccgtgagctcggcaagcgcttcgactacgagtgcgtggatgccaagcagctgcgcaacgtcgaccgcggcatcacccgagaaggccaggtcaagcatcccggcgaccgcttcgagaaggacgaccgcagtgcggtgggcgaccgccgtcgctggatcctcggcttcaacaaccacgacaaggtgggcgccttcgagcgcgaagcccaggaactggccaagcgcatcgccagctgcgagaccgacatcgcgcgcctgcgtgggcagcgtgaccgcgacaacgagcgccggctggcctgccacgagctggtcagcatcagctggaacgagatcgacatcgccgccccgcagcagcgcctgaccgatatcgaggccaccctgcgcgacctgcgcgaaggcaatgccgacctggccaagctggccaagcagatcgacgccgtgcgcgccgacatcgagcaggcccgccgcacctatgaagacgtccgcgtcgagcgcggccagctggtcaaggaacgcgatcgcctcgaccgcgctcgccagcagagccgtgcgctggtgctgccgagcctggcccaggagcaggaagccgggctcgccgagcgcctgcaggagcagggcccgctcagcctggaaacgctggaggcgcacatgcgccaggtcagcaacgcgctgaacgagcagctgtcgacctcgcagcaggacctcaaccgcatcgagaaccagctgatcggttgcttccgtcgcttcatccagcagtggccggaggaatcgggcgacttcaccgtatcggtggcctcggccgaggatttccttgcccgcctcgagcgcctggagcgcgacggcctgccgcagcacgaagagcgcttcttcgatctgctgcagaaccagagcaagaacaacctgctggccctgcagcgccacagcgccgaggcccgcaagtcgattggccagcgcctggacgaagtgaacgccagcctggagcaggtgccgttcaaccgtggcacgctgctgaccatcgaactgagcgaccgccgcctgccggaagtcggcgagttccacctgcagctgcgcgaggtgctggcgcagcagcagaccgagcagcgcgagctggccgaatcgcagttcaccgtgctgcgccagctggtcaaccgcctgggttcgcaggaaggcgaggacaagcgctggcgcgagctggtgctggacgtacgcatgcacgtggagttcatcggcgtcgagctggatgcggaaacgcgccagcaggtcgagatctaccgtagtggcgcgggcaagtccggtggccagcgccagaaactggccaccacctgcctggctgcggcactgcgctaccagctcggcggcgccgacagccagctgcccagctacgccgccgtcgtgctcgacgaagccttcgacaaggccgacaacgagttcaccgcgctggcgatgaacatcttcgacaacttcggtttccagatggtggtcgccaccccgctgaagtcggtgatgacgctggagccgttcatcggtggcgcctgcttcgtcgagatcagcggccgccacgactccggcgtgctgctgatcgagtacgacgaagaaggcaagcgcctgaagctgcccgagcgcagccgccagcaggccaacgaaccggaagaagccgaagcctga

SEQ ID NO: 496897 - DNA, 780 bp, Stenotrophomonas maltophilia
gtgctggaactggttccccctgagttgtggtggctggtggtgatcgccttcatcgccggccttgtggatgccgctgtcggtggcggtggcctggtgcagctgcccggcctgttcacggtgctgccgcagcagacgccggcgatgctgttcggtaccaacaagttcagttcgatgttcggtaccggtgcggccgcctggcgctatgcgcgcaacgtgcgcttcccgtggaagccggtactgttcgcggccggtaccgccttcatcttctccttcgccggggccaccgcggtgagcctgctgcccaaggacgcggtgcgcccactggtgctggtgctgctgatcgcgatgctggcctacacgttgtggaagaaggacttcggcgcgttgcaccggccgcaggagatcggccgccgcgaactggcgatcgcgctggcgatcggtgcggcgatcggcttctacgacggcttcttcgggccgggcaccggcagcttcctgatcttcctgttcgtgcgcttcttcggcctggatttcctgcgtgcgtcagcggcgtcgaaggtggtgaacctggcgaccaatgtggcggcaatctcgttcttcgtaccgaccggcaacatcctgtggctgttcgcgctgccgatggcggcggccaacatcatcggctcggtggtgggcacgcgcctggcgttgaagggcggcacgccgttcatccgcaagttgttcgtggggctggtggtggtactgatcgcgcggatggcgtgggataccttccgcggtgcgtga

SEQ ID NO: 496898 - DNA, 285 bp, Stenotrophomonas maltophilia
atgcgttcgcgctacagcgcctatgtgcgtggcctggctgactacctgcgccagtcctggcatccggacacgcgtccggccgagctgtcgctggacgatgcccccggccagcgcacccattggctgggcctgaccgtgcacgagcacaccgtcactggcgctgacagcgccgaagtccgcttcaccgcgcgctaccgcatcggcggcggcagcgcggtgaggatgaccgagcacagccgcttccaacgcatcgacggccgctggtactacctcgacgcggtctga

SEQ ID NO: 496899 - DNA, 1281 bp, Stenotrophomonas maltophilia
gtgcccctgcatccgctccgccagcctgcgcattacctgttcgtgctgcccgccgtgctggtcgtcctggtgctgtggatggcgctgggcaccgaggatgtcgccagcccggcgcagcgcatcctgccctggctgctggcctgtctcggtgcaggcctggccctgctctaccaccagatgcgcacgttgtgcctgctgctgctggtggcggtggtattcgccctgctgcactgggacgtcggtggctacctgcgcagcggccatgtcgacgccctgaccccgctgcgcttccacgcgatctcggcgtgggtgccgctgctgttcgccggactggcactatggccggaacgcggccgccgacgccaggacctgctgctgcgcggcgtagtgtgcggcgcggcgctgatgatcttcctgctgctggcggcacagcagccgcagggcatgcacgatctgctgtcgaaccgtcactgggcctggattcccgccaactggaacgcgttggcgcagttgccggcgctgctgttcctgctggcgaccgcagcattgggctggcaggcctggcggcatccgcggccactgcacacggcaatgctgctggccctgctgtgcctgtggtggatgctgccgcggatcttcctgcagccggtgctgctgccggcgctgagcagtgccgccctgctgctgatgctgggcgcgatgctgcaggaatccttccacatggccttccgcgatgagctgaccggcctgccggggcgacgggcgttcaacgagaccctgcagcgggcacgcggtacctacagcatcgcgatggtggacgttgaccacttcaagtcattcaacgacacccatggtcacgacaccggcgacgatgtgctgcgcctggtggcgtcgcggctggcgcgggtgggcgacggtggccgtgcgttccgctatggcggcgaggagttcgcggtggtgttcctggaccggccggcggcagcctgtgtcgatgccgtggaagcattgcggcagagcatcgaggacacccgcatgcagcttcgcgaccgcagcacccgcagccgtgacgacgaagccggccgccagcggcggggacgcggtggcagcggccaggtggtacaggtgacggtgagcatcgggctggccgacagccgcgtggatccgcggccgatggccgtggtcaaggccgccgaccaggccctgtatgtggccaaggacgggggccgcaaccaggtgcgcgcgcacggcggccagcgcgttctggcagcgcacagcgcgtag

SEQ ID NO: 496900 - DNA, 1272 bp, Stenotrophomonas maltophilia
atggacagcgtacccaccgccgtcgctgccccgcagcgcgatctcgcccgccgctttgcacaggtgcgggcgcgcagcctgcagctggccgcgccgctcagtgccgaggacgccatgctgcagagcatggccgacgccagtcccagcaagtggcacctggcccataccacctggtttttcgaacgcttcgtgctggccggtttcgccaccacgcccgcgcatgacccggcctgggactatctgttcaacagctattacaagagcatcggcccggcgcatgcgcggccgcagcgcgggctgctgtcgcggccctcgctgcagcaggtgcgcgactaccggcaacaggtcgacatgcaggtgcagtcacggctggcagccggtgacctcgacgcgcaggcgctgcaccacctgcagttgggtctgcagcacgaacaacagcaccaggaactgctgttgaccgacatcaagcatgcgttctggtgcaatccactgcagccaccgtatcgcgacgacctgcggcccgttgccagcatcgccgcgacgcagggctggatcgaatcgcccgaacgcatcgtcaccgtcggtgctgcggcatggccccggcacgccgccttcgcctacgacaacgaatcgccgccgcaccgcgtgctgctgcccgcgcatgccctggccgagcgtcccgtcagcaatgccgagtaccgcaccttcatcgaggcaggggggtaccgcgaaccgcgctggtggctcagcgaaggctgggcgctgcgagaagccgaaggctggcagcaccccctgtactgggatgatgccctgcagcgcgagtacaccctgggtggttggcgcgagctggacccgcacgcgccggtctgccacctcagttactacgaggccgatgcctgcgcccgctgggccggtgcgcgcctgcccagcgagttcgagtgggaagcggccgccgcgtcgcagcccctgcgcggtcatttcgccgatgacgatcacctgcacccgcaggcagccgggggcagtgggctgcggcagctgttcggtgatgtctgggaatggaccgccagcgcctatggtgcctacccgggcttccgctcttttgacggcaacctcggcgaatacaacggcaagttcatgtgcgggcaatgggtgctgcgcggcggcagctgtgccacgccccgtggccatgtgcgcgccagctaccgcaatttcttcatgccgccggcgcgctggcagttctccggactgcgcctggccagggacctcatatga

SEQ ID NO: 496901 - DNA, 975 bp, Stenotrophomonas maltophilia
atgagcacggtgcatgacgcgctgcaggcgctgaccgacctgacccccagccgccagcagatcctggccgatgcgctggccggtctgtcatgcgcatcgcggcagctgccttccaagtacttctacgatgcccgcggctcgcgtctgtttgaacagatcacccagacccgcgagtactaccccacgcgcaccgagctggcgctgctggcccgggtgctgcccgatatcgcgcgcgtggtcggcccgcgcctgcatgtggtcgagctgggcagcggcagtggccgcaagaccgcgttgctgctggccgcgctgcaggatccggtggcctatacgccgatcgagatctcgcgggccgcactgctgtccagcatcgaccacctggcgccggcgctgcccgaggtcgagatgctgccggtctgcgcggacttcacccgcgccgtcgccgtgcccatgcccgaacgcgaacccgcgcgacggctgctgttcttccccggttccacattgggcaatttcgccgaagcggaggccgtcgccctgctgcgggcgatgcgccagacgatgggccgcgacggcctggccctgatcggcatcgacctgcacaaggacacggcgctgatcgaagcggcctacaacgatgcgcagggcgtcactgcggcattcaccctcaatctgctggcccgcctcaaccgcgagatcggaagcgatttcgatctcgatggattccgccaccgcgcccgttacagcaccgcgcggctgcgcatcgaaaccgacctggtcagccagtggccgcaggacgtccacctcggtggccgcaccttccactttgctgccggtgaacccatccgcgtcgagtacagccacaagtacaccgatgacagcttcgaggcgctgttgcagcaggcgggcctgcaggtcgcacagcgttgggatgccgaaagtcccgcctatggcctgcgcctgctgcgcgctgcctag

SEQ ID NO: 496902 - DNA, 1248 bp, Stenotrophomonas maltophilia
atgcccattctgaccacgctcggcctggcggccgccctcgcgtcgaccccgacgctgcctgcggcccctgccgccagcaacgatccggtgttcagccgctgcctggcgggcctgcaggccaccgccgcaacccagggcatcggcgccgaccgtttcaacgagatcaccaccggactcacgccggacccgagcgtgctcggactgctggacgcacagccggaattcaccacgccgatctgggattacctggccgcgctggtcgaccgccagcgcgtcgatgatggccgcaccctgctgcagcaacatcgcgatctgctcgatcgcgtctccgcgcagtatggcgtcgacccggccaccatcgtcgcggtctggggggtggagagcgactatggccgcgtcttcggcaagcgcccgctgctgcagtcgctggccacgctgtcctgcgccggccgccgccaggccttcttccgcggcgaactgctggcgctgctcaagctgatcgaccgcggcgacctgcaggcccaggggctcaccggttcctgggccggtgccttcgggcatacgcagttcatgcccagcacctacacacgtatcgcggtcgatggtgatggcgatggccgccgcgatctggtcggcagcattcccgacgcgctggcgtccaccgccaactacctcaagcgtgcgggttggcgcagtggcgaaccgtggggcatggaggtccgtgttccccccggtttcaatgccagccaggcgggccgcacccaacgtagagccctcgccgattggcgcgtgcagggcgtgaccgcgctggatggcagcgcgctggtgccgcccaatctgccggccgacgcgcgcgccgccctgctgctgccggccggcatcaagggcccggcgctgctggtgttccgcaactacgatgcgatctacagctacaacgccgccgaaagctatgcactggccatcgccacgctggccgaccagctgcgtggcggcaccggcctggccaccgcctggccgaccgatgatcctggcatcggccgcgatgaacgccgccagctgcagaccctgctgctggcccgcggccacgacatcggcagcgcggacggcatgatcggcaccgccacgcgccgcgcgatccaggtcgagcagcagcgcctgggctgggccaatgcggatgggcgcgccggccagcgcatcctgcgcgcgttgcagcaggaggcagccgcaggggcgcctgccacccgctag

SEQ ID NO: 496903 - DNA, 891 bp, Stenotrophomonas maltophilia
atgcagtcgaacccggacatcagcaccggcctgtaccacgggctcgaggcctggcagatacgcacgcccagcgccaccgcggccatcagcgtgttcggtggacagctgctgtcgttcatcccggaggggcagccggacctgctgtggctgtcgccgaaacgggccgggctgcccacgccgatccggggtggcgttccagtgtgctggccgtggttcggtcgccagggccagagtgatgacgtgccggcacacggcctggtacgcaccgcgcgctgggagctgctgcaggcccgccaggacgatgacggtgaactggagctgcagctggcgcccctgtcgattgccgagtgtggcctgcgcctgcagatgcagctgcgcatcggtcgccagttgcgccagcagttgaccaccgagaacaccggcccgtccccgatgaccttcacccaggccctgcacagctacttccgggtgggcgatgcccgtcgtgtcgaggttgatggcctcgatggcctgcactatctggacaagtacgaggattacacgcagctgcgccggcagcaggggccctggtcgctgcgtgacccgcgcgatccggggcgcagcgaccgcatctataccggtgccggtggccactacgtgcttcgcgatcccgtcctgcagcggcggatcgagatccgcagcgaaggcagccagaccctggtggcgtggaatccgggcgcggaggcggcggcgaagatggccgatgtcggcgacggttggcacgattacgtgtgcctggaagtagccaatgccgggccggagcagattgcccttgcacccggcgcgcgccaccagctggtgcaggtactggccagtgaaccgctgcaggccgtggcggggtgttcggagtaa

SEQ ID NO: 496904 - DNA, 807 bp, Stenotrophomonas maltophilia
atgggatcgacaggaatggatggcatgcaggacgcacagtggtggtacgccaacagcaagcagagcgaagggccggtggacctggccgggctgcgccgtctgcagcaggacggcacggtaaccgcccgtacgctgatgtggcgggaaggaatggcatcgtggcggccgctggccgagctggatccttcggtggcgccgatggatccgaccccgccgtcgattgaaccggcgcaggccgtcagcgccagcggcgcatcgaccgctgatccgtccgacccctatcgtgcgccggcagcttcgccggtggccgcgaccgcgccgcagctggaaggcgacatcgccttgtacgccgccgtggtcggcggcaacttcccgatctatcgacagcgctggcggctcgaccagggcattgccgacggcaacggcaacggcaacggcacctggcactggccggcgttcctgatcggcgtgatctggatggtgtaccgcaggatgtaccggctggcggcgatctgggccggcgtgctggtgttcttcagcatcgccgaggcgttgctgggcgttccggaaggcgtgtcgacggtcatcaccctcgtcatcaacatcaccgccgcggtgtatgccaaccgctggtacctggcgcattgccagcgtgagatcgcccgcgcgcgcgcgttggtgggagatgacggggcgcgcctgcgcagcgagctggccagacggggtgacaccaatgcactggcagcggcggtggtggccatcgccgtcgttgcggtgatgctggtggggcaggcgctggcaggctga

SEQ ID NO: 496905 - DNA, 546 bp, Stenotrophomonas maltophilia
atgaatcatctggatactccgccggtttccccggcggatgacaatccctatcttgcgcccgccacagaggtggacgacgcgccccctccgtccgacgcggactacctgaacctcctcgtcggccccaacgcggcgctctatcgccagcgctggcacctgggcagcccggtgccgaagccgccgcgaccgtggcactggcccgccttcctggtgccgacgtactggctgctgcaccggaagatgtacctggcagccatcctcttcgagctggtcctgatcggcatcgcgctgctggcggcccgcgccaacccgctgctcacggtggcgttgctggcggtgcctcggttcgccatcgcggtgaccgccaataccctgtacctgcgctactgcacgcgactgctgggcaaagtgaaggctgcccacgccgggcagcacaaccgcatccgtgccgaactgcagcgtcgtggcggcacctgcgtgtgggcggtggtgatcggcatggcggccaacgcggtgatcaataccgtcgcccgcatggcggcctga

SEQ ID NO: 496906 - DNA, 1188 bp, Stenotrophomonas maltophilia
atgagcatgcaggtgcggcgcgcgtggtggcgcgatctttcgatgccggcaatcgtcgctggcttcattacggtactggtgggcttcgccagctcggccgtgatcgtgttccaggcggcacaggccatcggtgccgaccaggcgcagatcgcctcctggatgtgggcgctggggctgggcatgggcgtgacctgcattggcctgtcgctgcgctatcgggtgccggtggtgacagcgtggtcgaccccgggtgcagcgatgctggtggtgggtgccggcggtgcttcgctctccgaggccacgggcgcattcctgctggccgccgtgctgggcctgcttgcgggtttctcgggggtcttcgcgcgactgatgcaacgggtaccgatggcgctggccgccggcatgctggccggtgtgctgctgcgcttcgggctggatgtgttcgtcgccatgaacacccagctggtgctcgcgctggcaatgttcgccacctggctggccgggcgccggctgttcccgcgctatgcggtgatcgccacgttgctggtcggcatcgccgtcgccgcgagccgtggcctgctgcacgcccagcaggtgcatctgcaactggcgatcccgcagtgggtgacgccctcgctgtcgtggacggccgtggccggcattgccctgcccctgttcgtggtcaccatggcctcgcagaacattcccggtgtggcggtgatgcgcgcgtccggctatgacgccccggtgtcgccgttgatcggctggatcggtgtagtcaatacgctgctggcgccgttcggtgcgtatgcactgaacctggcggcgatcaccgccgccatctgcatgggccgcgatgcgcacgaggatccggcgcgccgctacaccgcagcgatggcggccggcgccttctacattgtcatcgggctgttcggcgccacggtggccgcactgttcgcggccttccccagggagctggtggcctgcgtggccggtatcgcgctgttcggcaccatcggcaacagcctggccagcgccctggcggtggagcgtgaccgcgaggctgcactcgtcaccttcctggtcaccgcctcgggggtctccctggccgggatcggttcggcgttctggggactgctggccggtgcactgtgcctgctggtgttgcgggcacggacagcggcctga

SEQ ID NO: 496907 - DNA, 1719 bp, Stenotrophomonas maltophilia
atgagcaagcgcgttgccgagatcgttgtcgataccctgcagcaggcgggcgtccgccgctgttacggcatcgttggcgataccttgaatcacgtcaccgatgccctgcaccgcagtgaaatcgactgggtacatgtacgccacgaagaagtggccggcttcgctgccggcgccgattcgctggtgagcggcgagttgaccgcctgtgcgggttcttgtggtcccggtggcctgcacttcatcaacggcgtcttcgagagcaatcgcaaccgtgcaccgatggtactgatcgccagccaggtggtgaccagtgagctgggcatggaatttccgcaggaagtggacttcaaggcggtgtatgccagttgttcggtgttctgcgagcaggtgcacagcccggagcaggcgcggcgcgtcgtggccctggcctgccaggccgcgatcagccgccgtggcgtggcggtggtgatcctgccggccgacatcagccaggccgaggtgaagcacgatgtgccgttctcggttcactacacccagccggtgctgcgcccgtccgatgccgagctgcagcgcatcaccgaactgctggggcagggcaagcgcatcggcatctatgccggtgccggttgccaaggcgcgcacgcgcagctgctggagctggcccggcgcctgcaggcgcccatcgcgcatacctcgcgcgccaaggatttcgtcgagccggacaacccgtacaacatgggcatgaccggcatcttcggcatcgaatccggcttccacacgctgatggagtgcgacacgctgctgctgctcggcgccgatttcgcttggggccagttctacccggacaaggccacgatcatccaggtcgaccgcgatggcagtcacctcggccgccgccacccggtgagccttggcgtggtcggtgacatcgcaccgacgctggacgcgctgctgccgatgctgccgccgcgcgaggacagcagtttcctggacgagtgcatcgggcgtcgcgacaaggcgctgaagaagcgcgaacaggaagaacagccgggcgagggtgaattgatccatccgcagcacctgacggcattgctgtcgaggcatgccagcgacgatgcgctgttcaccgccgacggcggttcgccgatggtgtgggtgctgcgccatatccgcgtcaacggccgccgccgcacgctgaccagcctgctgcacggcacgatggccaacgcgatgccgcaggcgctgggcctgcagaaggccttccccggccggcaggtgatctcgctgtccggtgatggtggcctggcgatgctgctgggcgatctgttgacggccgtgcaggagaacctgccgatcaaggtggtggtgttcaacaatggttcgctgaacttcgtcgagctggagcagaaggtggagggcctgctggacaactacaccgacctgaagaacccggacttcggccgcttggccgaggtcatcggcttccacggccgcacggtgacccgcagcgaggatctggaagaggcggtgctggatttcctgtcccagcgcggcccggcgctgctggacgtgcataccagccgcgcggagctggtgatgccgccgcagatcgaggccaagcaggtggccggtacggcgttgtacgccgccaaggcagtgttgaacggccgcttcgacgacgtgaagcatctgctggtggacaacttcctgaagaagtaa

SEQ ID NO: 496908 - DNA, 573 bp, Stenotrophomonas maltophilia
atggtcaacgaagcggtgacggtgtaccgcttcgatccggccagtgccgggttccgcgcgctgcaggccgacacccacggcaaggacagttgcggtgacctgatggggctggcggtcgaccgtccgagccgcacgctgaccagcagctgccgcagcggcccgatgtggtacaccgaccagtaccggtttgcaggcgcgaagctctatctgtaccgcgccgagagcgtgctgatgctgggcgatacgttgaacgccgcgctgcagtgggaacagaccggcgagcagggcccgctggcggtctggcgcacctatgatgccgccggccgggtgctggaaagtgccatcgccgatggcctgggtgcaccgccggatggaccgttgcgtggccagcaggccaccgtggtacccgcgcggctgttcctgttcgatcgacccggcgcatccagcaccaggcgttacctggtgcagggagaccgcgtggagatgctggatgaacaggatggctgggtgaagctgcgctaccgcaacccgaagcagggcgcggtggagggctggatcaacgtcaacgattga

SEQ ID NO: 496909 - DNA, 255 bp, Stenotrophomonas maltophilia
atgaactacagggaatgcctgctgggcctggcattggcaggcgtactggcaccgacggcgcaggcgggtggggacgacggagaaacgctgcgcttccaggtggccgcgcatgtgcaggcgcatgccgatccgcagcaggacggcagcatcgcggtgcagctgtcaccgtcaggcaagcgccagacgcttgagggcgcggccgatgccgacggcaattcgcgatggtcgctcgaagatgtcgatttcgatggctag

SEQ ID NO: 496910 - DNA, 483 bp, Stenotrophomonas maltophilia
atgaaacaccttggcctcgtcttcgccgtgctgctggccaccagtggctgcgccagcctgtcttcgcaggcgcccagcgcctatgccacggccaccaccgccgaactgaagggcgatgccgcccgcccttccgccggccacggctgggtgcgcagcgagctgtacttcggcgtaggcgaggagcagggggccggcaaccgcccgcaggccgacaccatcagcgacgcgcagtggcgcgccttccttgacaaggaagtaacgccgcgcttcccggacggcctgaccgtgtttgatgcctacggccagtggctgttccgcggcgatgccgcgcccaaccgcctgcgcaccaaggtgctggtggtgctgcacgaggacaccccgcagcgccgcgccgacatcgaggcgatccgcctggcgtggaagcagcagaccaggcatcagtcggtgctgtggtcgcggcagccggtcgaggtatcgttctga

SEQ ID NO: 496911 - DNA, 2436 bp, Stenotrophomonas maltophilia
atgtccgcccgcctgcccgcgtcgccgctcggcctcgccatcgccctcgcgctttcctccgctgccatcccggccctggcccaggacgccaccaacctggacaccgtgatcgtcaccggcacccgtgccgcagaccgcaccgtgctcgaatccacctcgccggtggatgtgctcaccgccgaggacatccgcaaggccggcgtggtcaacggcgaactgggcagcgcgctgcaggcgctgctgccgtcgttcaacttcccgcgccaatccaactccggtggcgccgaccacgtgcgcgcggcgcagttgcgtggcctgtcgccggaccaggtgctggtgctggtcaacggcaagcgccgccaccacaccgcactggtcaacaccgacagcaagatcggcaagggcaccaccccggtcgatttcaattcgatcccggtcagcgcgatcaagcgcatcgaagtgctgcgcgatggtgccggtgcgctttacggatcggacgccgtggccggcgtgatcaacgtgatcctcgacaacggcggcgacggtggcgagatcgaggccagctacggtgccaaccacaccgacctcaagccgatcggccgcaccctcaccgacggccagaccggcaacgtcagcgccaaggtcggtacttcgctgggcgaggacggcggcttcctgcgcgtcggcctggaatacaagcaccgcaacggcaccaaccgcgctggctttgaccagattccgccgtgggaccagacgccggacaacctggcgctgcagggcaagcgcaactacgtgctgggcgatggcaagagcaaggacatcaacctgtggctgaacaccgagattccggtaggccagacctcgacgttctacgcgttcggcaccttcaaccagcgcgataccgaaggcgccaactacttccgctatcccgatggcgatgccaactggaagcaggtctatccgaacggctaccgaccgatctccgaaggcgagaaccgcgacgtacaggccgtggccggcgtgcgcgggcagtggggcgaatggagctacgacagcagcctggattacggccagaacgacttcacctaccgcctgcgtgattcgctcaacgcatcgctgggcccgaccagcccgacccgcttcaagaccgccgactacgagtacgcgcagaccgtgggcaacctcgatctgagccgcgtgttcacccagagcgacagcatcagccacacgctgggcctgggcgtggaagcgcgccatgagcgctaccagacccgccccggcgacccggccagctatgcggcgggcccgtacaccgaccgcccgaccggctcgcaggccggtggcggcctgaccccacaggacgccgccaccctgtcgcgcgacgtggccagcgcctatgccagcctgtccagccagttcggcgagaagttctccaccgacctggccgcgcgctacgagcacaacgacgactttggcggcgaactgaccggcaagctcggcctgcgctacgaattcaccccggcgttcgcactgcgcggtgccatctccaacaatttccgcgctccgtcgctggcgcagatcggctacgaatccacctccaccggctacaacgccggcggccagctggtgcagggccggctgctgtcggtcaacaatccgatcgcgcgtggcctgggtgcgcagaacctgaagccggagaagtcgatcaacacctcgctgggcttcaccagccgcatcggcgagcatttcgacctgtcgctggacttcttccagatcgatatcgacgaccgcatcgcgctgtcggagagcatcaccggcgatgcgctgaccgattacgtggccgccagctacggcgtcagtggcctgcagagcgccagcttcttcgtcaatgccgccgatacccgcacccgtggcgccgagctggtaagcaactggcggcagtcgctgggcgatggccagctgctgctgaccggcacctacgcctacaccaagaccacgctgaagaatgtgctggccacgccggcgcagctgcgcgcgctgaacccggactacgtactgttcggcatcgaggagaccaacaccctgaccgatgccaccccgcgcacgcgtggcagcttctcggccgcctggagcaacgaccactggtcgctgagcacccgcgtgaaccgttacggcagcgccacccgggtgttcaacttcggtgatggctatatcccgcgccagacctaccaggccgaatggcagctggatgccgaagtcgagtaccgcatcaccccgcaatggagcgtggcgatcggtggccagaacctgaccgacaactacccggatcgatccaacagcgatatccactacttcggcaacctgccgtacgacgtgctgtcgccgatcggcagcaacggcgcgtactactacggccgcgtccgctatacgttctga

SEQ ID NO: 496912 - DNA, 759 bp, Stenotrophomonas maltophilia
atggctgaaccgctccccctgcgtccgccaccgccattgctggacgacgcctgtgcgttgttcctcgatgtcgatggcaccctcatcgaattcgctgcacgaccggatgccgtgcagctcctgccggatgtgcgcgaagccatcggccgcatcagtgaccgcctggaaggcgccgtggcactggtcagtggccgaccgcttgaacagctggaccagctgtttgctcccctccagctgcctgccgccggcctgcatgggcacgaactgcgcggcgaggacggtcgtgtgctgcgcgacgagcacgacgacgacaccgccgagtggctgcacgcgctgcaccagcaggcgatgcgctttgcccacggccatcccggcgtgctggtggaagacaagggcgtcggcctggccctgcattggcgcggtgcgccgcacgcggcaagtgatgtgcgcgccttcgccgatcgccacgtgcggggccgcgccagttaccgcctgcaacccggcgaccatgtggtcgagttcgtgcccgtcggcaccgacaagggccgtgccgtgcgccggatgatgcagtacctgcccttccgcggccgcctgccggtgtttctcggtgacgacctcaccgatgaattcggcttcgatgccgccaacagccagcatggctggagcgtgctggtgggtgaacgtgaacccagcgcggcggtgttcgcgctgcccgacatacgcagcgtgcacgcctggctgcgtgagaatgcctattga

SEQ ID NO: 496913 - DNA, 1782 bp, Stenotrophomonas maltophilia
atgacccaacccgatcttgatctgggcgtggtcggcaacggcagcttcggcgccctggtcgacaaacgtgcccgcgttgtctggagctgcctgccgaccttcgacggcgaccctaccttctgtgcgctgctgggccccaaccagcagaccggtggcgacttcgccatcgagctggaagacttcgccagcagcgagcaggaatacctcaccaacacggcgatcctgcgcacggtgctccgcgacgcgcacggcggcgaactggaaatcctggatttcgccccccgctggcggcagaacgaccgcttctaccggccggtcagcctgatccgccaggtgcgtccgctggccggcagcccgcgcatcaccgtgcgtgcgcgcccgctggccgactggggcgcacgcgtgccagagtcgacctggggcagcaaccatgtgcgctggatcctgccggagcacgtgctgcggctgaccaccgatgtgccggtgcgcttcgtgcgcgatggcctgccgttcgtgctcaaccatcccatccacctgatcctgggcgtggatgagtcgctcaaccggtcgatcagcggctacgtgcaggaagccttccagcgcacccgcgactactggcgcgaatgggtgcgctacctgtccattccactggagtggcaggacgcggtcatccgcagtgcgatcacgttgaagctgtgccagtacgaggacagcggcgcgatcatcgcggcgatgaccacttccattccagaagcacccggcagcgtgcgcaactgggactaccgctactgctggctgcgcgacgcggctttcgtggtgcgggcactgaaccgtctcggcgcaacgcgcacgatggaacagttcctcggctacatcttcaacctggccaccaccgacggcacgctgcagccgctgtatggcatcggctttgaagccaagctggacgaagacgaagtgcccagcctgtccggctaccgcggcatgggcccggtgcgtcgtggcaacctggcctgggtgcagcgccagcacgatgtctacggcagcgtggtgctggcctccacgcagctgttcttcgaccgccgcctgcaggatcccggcgacgcgcacacattcgcccgcctcgaaccgctgggcgaacaggccttcgccctgcatgacgtgcccgatgcgggcctgtgggagttccgtggccgcaccgaggtacacacctacaccagcgcgatgtgctgggccgcctgcgaccgcctgtgcaagatcgccgtgcgcctgaagcgcgatgaccgtgcacactactggcgcgagcgcgccgacaccatccatgcgcgcatcatggccgagtcctggaatgaggaactgggccacttcaccgataccttcggcggccatcgcctggacgcctcgctcctgctgctggccgacatcggcttcatcgatgcgatggacgcccgcttcatcgccaccgtcgatgcgatcggccgcgacctcaagcatggcaattcgctgtaccgctatgtcgcgccagatgacttcggtgagccggaaaccagcttcaccatctgcacgttctggtacatcgatgcgctggcggcgatcgggcgcatggacgaggcgcgcgagatgttcgagctgctgctgaagcagcgcaaccacctgggcctgctgtcggaggatctggccttcgacagcggcgaggcctggggcaatttcccgcagacctattcgcacgtcggcctgatcactgccgcgatgcgcctgtcgcggtcctggcaggaggcatcgtga

SEQ ID NO: 496914 - DNA, 1365 bp, Stenotrophomonas maltophilia
gtgagtcgtctggtggtggtttcaaatcgtgtggccgtacccggcgagaaccgcgccggcggcctggctgtcggcctgctggccgccctgaaggaacgcggcggcctgtggttcggctggagcggcaagacggtaaaggacggcagcggcacgctgcaccggcagaaagacggtgacatcgactacgtcaccatagacctgagcaagcgcgaggtggacggttactacaacggctttgccaaccgcacgctgtggccgctgctgcacttccgcctggatctggtcgactacgaccgtgccacccgcgagacctaccacaaggtcaacgcactgttcgccgacaagctcgcgcccttgctgcgcgaggatgacatcgtctggatccacgactatcacctgatcccgcttggcgcactgctgcgcgagcgtggcatcggctgccgcatcggcttcttcctgcacatcccgatgccgtcggccgacctgctgcaggcgatgcccgaccacctgcggctgttctccgcgctctacgcgtatgacctggtgggcttccagacccagcgcgatgccgatcgcttccagacctacctgcgcctgttcggcggcggtcgggtactcgccaacggcgagctggaggcaccgggcgggcgtcgtttccgcgcggcggcgttcccgatcggcatcgacaccgagctgatcgcgcgccaggccggtaccgccgccaccaaggccgccgtaaagaacctgcgcgccagcctgcgtgatcgccaactggcgatcggcgttgatcgcctggattattccaagggcctgcccgagcgcttcctcggcttcgaacggtaccttgagcgccatcccgaccagcgcgggtcgctgacctacctgcagatcgcccccgtctcgcgcggtgatgtcaccgagtaccggcagctgcgcagccagctggagcagatcgccggccacatcaacggtggccacgccgagccggactggacaccgctgcgctacgtcaaccagaacttcacccatgccaccctcaccggtttctaccgtgcagcggcggtggggctggtcacgcccctgcgtgatggcatgaacctggtggccaaggaatacgtggcctcgcaggacccggaggacccgggcgtgctggtgctgtcgctgctggccggcgccgccgatgaactcaagcaagcactgctggtgaacccgcacgacctggatggcgttgccgacgccatcgccaccgcggcgacgatgtcgctgcgcaagcgcaaggagcgctggcacgccatgatggagcacctgcgcacctacgacatcaaccactggcggcgcagctacctggacgcactggaaggctga

SEQ ID NO: 496915 - DNA, 438 bp, Stenotrophomonas maltophilia
atgaaggctggctcgaaccacagtgacggcgccgccgacactggcagcgcggtgatcgtgttcgacggcgtgtgcgccctgtgcaaccgctgggtgcgcttcctgctgcgtttcgaccgcaaggggcgctaccgttttgcggcgatgcaggggcagcagggcagcgcgatgttgcgcgcgcacgggctggacccgcaggacccgatgtcgttcctgctgctggacgcgcagggcgcctggaccgataccgatgccatcctgcgtgtactggccgggctggacggcgtctggcgcctgaccggcgtgctgcggatggtgccgcgcggctggagggatgccgcgtatcgcgcgctggcgcgcaaccgctaccgctggttcgggcggaacgacgcctgtcatctgcccgcaccggagcaggcagcgcggttcctggattga

SEQ ID NO: 496916 - DNA, 507 bp, Stenotrophomonas maltophilia
gtgctggggccggccttcgccaccctggcagcgccggtgcaggcgctgcatgccgcgccgttgccctgccgctacgtggggcaggcgcgcatcgtgcgagggcggcactggctggtgccgctgttggccgcgttggcgcggctgccgaaggacggcgacgcgctgcccaccgaagtggcgttcagtgcacgcgggcagggtgagcagtgggcgcgacggttcggccgctggccgatggtgtcgcggctgtgggcgcacgaagggcttctgcgcgagcagctgggcgcggtgcgcttcgagttcgcgttgcaggcccgcgagggcggcatcgactggtcggtgcggcgggtctgggcgttcgggctgctgccgctgccgacgcgttggttcggcggtgtgcgctgccgtgaagcctggcgcggcgagcgttacactttcctggtcgatgtgacgctgccctgggccggagccctgatccgctatgaaggctggctcgaaccacagtga

SEQ ID NO: 496917 - DNA, 771 bp, Stenotrophomonas maltophilia
atggccgccgcgctgccgttgctgcaggcggactggccggcgccggcaggcgtccatgcgctgaccacgcgccggcatggcgcgggcatttcgccggcgccgttcgcgcagttcaacctcggcaaccggcacgcggccgatggtgataccccggccaacgtggagcacaaccgcaagctgctgcaggaggggctggcactgccctcggcaccgcactggctgcgccaggtgcacagcagcaccgtgctgcgcttcaccgcgccaccggtgcccggcaccagcgaaccggtggccgacgccgcagtgacttcggtgccgggcgtggtgctggcgatcctgaccgccgactgcctgccggtggtgtttgccgcggccgatggcagcgaggtgggtgcggcccatgccggctggcgtgggctggctgacggcatgctggaggccacggtggccgccctgcagacgccgccggcgcagctgcgggcttggctgggcccggcggccgggccggccgactacgagatcggcgaagaggtctaccacgccttcgtcggccatgatccggccgccggggcggcgttcgtggccacccgcgcaggccactggaaagtggacctgttcgcgctggcgcggcagcggttgcaggcggcggggatggacccggcgcaggtgtatggcggcacggtgtcgaccatggccgatcctgacctgtattcgcaccggcgcgaccgtcgtaccgggcgcatggcgaccctggcctggatcgcgccctga

SEQ ID NO: 496918 - DNA, 990 bp, Stenotrophomonas maltophilia
atgtctgaacaaccctctgaatcggcccgccaggccatcgtccccgacaccgccgccggccgtcgtttcgatgccgtcgtggccgaactgttccccgaatattcgcgttcgcgcctgaccgagtggatcaagtccggtgacgtcctgctggacggcgcccaggtgcgcccgcgcgatccgctgcgcggcggcgaggtggtgaccctccacgtggtgctggaaacccagaccgacgcccagccggaggacatcccgctggacgtgctgttcgaggacgagcatgtgctggtgatcaacaagccggtcggcctggtggtccaccccggcgccggcaaccacagcggcaccctggtcaacgcgctgctgttccgcgacccctcggtggcggtgctgccgcgcgcgggcatcgtgcaccgcctggacaaggacaccagcggcgtgatggtggtggccaagaccctggaagcgcagactgcattggtcgagcaactggcggcccgtgacgtgcaccgccagtacctggccatcgtgatgggcgcgctggtggcaggcggtaccgccgatgccccgatcgaccgccacccgcgcgaccggctgaagatggcggtgcgcgaagacggcaaggaagcggtgacccactaccgcctgcgcgagcgcttccgtgcgcacaccgcgctggagtgccgcctggaaaccggccgtacccaccagatccgcgtgcacatggcacacgtgcgccatccgatcatcggcgacccgctgtacggcggtgcgctgaagctgcccaagggtgccagcgacgagctggtggccgcgctgcgcggcttcaagcgccaggccttgcacgccgagaccctggagttcatgcatccgatcaccggtgagccggtgcgcaataccgcgccggtgccggaggacatgctgcacctgatgaaggtgctgcgcgaagacagcgaagccttcgccgcccgcgagcgggatcgctggtga

SEQ ID NO: 496919 - DNA, 888 bp, Stenotrophomonas maltophilia
atgatccgacgctccgccatgctctccgcgcccgtccgcctcaccgccctgctgctggtgctggtcatcgccgcaaccggctgccaccgcggcgccaagaagggtgatcgccccgacgaaggcgtgccggtcgaacagctgtacgagaaaagccacaagctgatgcagggcggcaactggagcggcgccgaagccagcttccgccgcctggtggcccagtatccgtacggcccgtacaccgagcaggcgatgatcgaaaccgcctacgcccagtacaaggccggcaagcacgatgacgccgtctccagcatcgaccgcttcatccggacctacccgacccaccgcaacattgcgtatctgtactacctgcgcggcctggccaattccaaccgcagtacggttttcctgcgccgcgtatggtcgctggatgccagccgccgcgacctgtccacgccgcaccaggcgtactcggacttcaacatcgtggttgatcgttacccgaacagccgctacgccgccgatgcgcgccagcgcatgctggagctgcgtgacgtgttcgcccagcacgagctggacaacgccctgtactacatgcgccgcggcgcctgggtctcggccgtgggccgcgccaactacctgctggaaacctacccgcagagcgccttccagtacgacgccgtggccgtgctggccgattcctacacccacctgggcaacaagaccctggccgacgacgcccgtcgcgtcctgcagctgaaccagccggatcacccgtggctggaaggcaagtggccgaagtacccgtggatgatccgcaagctgaacccgttcgccggcgagaagtccgccagcaccggccagcgcaacgcgcgactggaaaagaaataa

SEQ ID NO: 496920 - DNA, 1203 bp, Stenotrophomonas maltophilia
atgccgacacggccctgtagtttccgtttcctgttctgccttctcgccagcgccctgctggcgctgaccctggcgcccgcggccgccgcgcgggacgcaccgggcgatctgctgtctgccgccccctatcgcgcgccctgggtgccgtccagggccgcccaggcgtacaagctgcactatcgcaccccggaccaccgcggccagttggccgaaggcactggcctgctgtacctgcccgccggcgcagcgcctgcgggcgggtggccggtggtgtcctgggcacatggcacccagggcatcgcggatcgctgtgcgccgtcggtctccggccccacccatgccgaacgcgacgggcgcttcctggacgtgttcctggcccagggctatgccgtcgcagccgccgactaccagggcctgggcagcccaggcaatcatgcctacctgcacgtgcgtaccgcggcgcgcaacgccatcgacatggtcaaggccagccggcagtacctgggcaccgcagcgttgtcgccgcgctgggtctcggtaggctattcgcaggggggcgcggccgcgctggtcgccggccacctggcggcgtcccatggcgggccctcactgcagtaccgcggcagtttcaccgccggaacgccgaccgcagtcgaactgaccgcgctggtgatgaagcccgacaaccgcaccgccaattccggcgcgctcaacgcatatcacgcgtacctgctcgacggcctgctgcaggttgcgccgcaggtcgacggcgtgctgagcgaggccgggcgcgcccgcattgctctggcacgcgagcagtgcctgggtgatctggccaccacgctggacggcatggataccggcagcatgttcactgcaccgctgacccgcgtgccgggcatctggacggtgctgcatgactacctgggcgtaccgcgccgcggcttcagccagccgctgatgctggcccatggcagcgaggaccgcgatgtgccctatctgaccaccctgctgtacgccgcaggcctggccgtgcgaggcgagccggtcgcgttccggcgctacccggtcgatcaccgcggtacgctggacgcagcggcggccgatggcctggcgttcgtgcgtgcgcggctggaggacgaccacttcaacgacgctgcggagatcgcaggcctcgaacaacggctcgacgaagcccggtag

SEQ ID NO: 496921 - DNA, 534 bp, Stenotrophomonas maltophilia
atgccgatgaacatgcgatccctgctgcagcccctggccctgaccggcctcagcctggccctggccgcctgcgtgagcagcgcaccaccggtggtcaagccggtcgataccaccacgccggcgcagcgcctggctgcggtggatgctgcagcgggtccggacgacaaggaattgtcggtacagccgctgcgtgattcgcaggtggaagatctgcgggtaaccgcactggcacaacgccaggcgaacgacctggccggcgcggccagcagcctggaccacgcgctggagatcgtggcgggtgacccggcagtgctgcaggaacgtgccgaactggcgctgctgcagggccagtgggcgcaggcggagacgttcgcgcgcaaggcggtggatctgggctcgaagaccgggccgctgtgccgccggcattgggcgacgatcgagcagtcgcgcctggcgcggggcgagaaggagaatgcggtgtcggcgcatgcgcagattgagggctgcacggtgccggggatcaagcggtactga

SEQ ID NO: 496922 - DNA, 2439 bp, Stenotrophomonas maltophilia
gtgccccgacgctacgattccgacgacatcgacgattccgacgacgaccagcaggacaacggtccgctgtggcggcgccggctgatcacctggagcatggctgcggtcgcgttgggattgggtttcctcattccctatacgctgtacctgaaccaacaggtgacccagcgtttcggtgaactgcgctggcagatcccgacgcgcgtgtacgcgcgcccgctggtgctcacccccggcaaggcgatggatgcgtctacgctgaagaccgagctggccgcctctgcttaccgcgatgacgggcagggcaaggagccggccacctatgcggtgaacggcgggcgcttcgtcatctccagccgcggcttcaacgacgttgacggccgggtggccccgcgccgggtggagctgtcgctggccgatggcggcgtggcctcgctgcgcgacgccgacaaccgcaaggcgctgaaggccgcgcggctggatccggcgcgcatcgccaccctgtacggccagaagcaggaagagcgccgcctgatccgcatggacgaggcgccggacctgctggtgactggcctgcaggcggtggaggacaaggacttcaaccgccaccacggcatcgacctgtccggcatcgcgcgcgcggtgtgggtgacgatccgttccggtggccagagccgccagggcgcttcgacgctgacccagcagctggcccgcagcggcctgctcggcatcggcaaggagcagacggtcacccgcaagttcaatgaggtgctgtacgcactgatcatggaagcgcgttatgacaagcgcaccatcttcgaggcctatctcaaccaggtgtacctgggccagcgcggcagccaggcgatccatggcatgtcctccggcgccgagttctggttcggccgtgacctgcagtcgctggagaccgagcagatcgcactgctgatcggcctggtcaaggggccgtccttctacgacccgcggcgcaacccggagcgcgcgctggatcgccgcaacttcgtgctgggcaagctgcacgaggccacgctgatcgacgatgccgagtaccagcgcgcgctgaaggcaccgctgggcgtgcccaagacgccgggcctggtggcagccaaccgcttcccggcctacgttgacctggtccgccgccagctcggccatgactatccggaatcggcgctgcagggcgcgggcctgagcgtgatgaccggcatgtcgccgtccgcgcaggcctatgccgaaggcgcggtgacccgcaccatcaagtcgctggaaagcaagcgccgccccgagctgcaggccggcatggtgctgaccgacgtgcacaacggcgacgtgctggcggtgatcggcagccgcgaggtgtccgaggtcggcttcaaccgcgcgatcgaggcgcagcgtccggtcggttcgctgctcaagccgttcgtctacctgctggccctggcgcagccggaccgttactcgctggccagctgggtggatgattcgccggtgacggtgcagctcggccgcggccgcaactggagtcccggcaacgcggacaaccgcagccacggcacggtgcgcctgatcgacgcactggcgcattcctacaaccaggccacggtgcgcgtgggcatgcaggtcggcccggagcgcgtgacccagctgatccatgtcctggccggcatcaaggctgacgccaacccggcggtgatcctcggctcgaccgaccagagcccgtacgcgatggcgcagctgtatcagttcctggcgtccggcggcgagatccagccgctgcacgcggtgcgtggcgtgctcgatccgcagggcaagctgctcaagcggtacgacaagaccccggcaccggcgcaggaaggcgactcgattgccgccaacctgatcagtgtcggcctgcagcaggtggtcgccagcggtaccgcgcagcggctcaatgccgatggcctcggccgcctgcagcccgccggcaagaccggcaccaccaacgatggccgtgacagctggtatgccggctacaccggtgatcacctggcagtgatctggatcggcaacgaccagaacgcgcaggccggcctgtatggcgccaccggcgcgatgcgggtctggtcgggcatcttccagcgcctgccgagcgcgccgctgcgggtcagcaacaagggcctggactggcagtcggtggctcccaccggcctcaacagcaccgatgaaggctgccccggcgcgcgtcgtttcccgttcgtggtgggctatgcgcctgcctatgcgccgtgcgcgccggccgcgtcgccggaggggcagggcgaggccgacggcgagggcggtggctggcgcagctggttcggcctggaccgcaagccggaagcgcctgccgaacctgccgcggcacctgccgccgccactcctcccccgagccgatga

SEQ ID NO: 496923 - DNA, 2100 bp, Stenotrophomonas maltophilia
atggcgatgtccctggccgagatccgatacctgatcaaccgcctgtcgggcctggcccgccggagcctggcaagcctgcgcacccgtggctggcgtgccacctggcaacgcatccgcgtgcatgcccagcgcgccgtccccgccccgcgcacgccactgttcctgccgccagcgcaggatttcgcccccttcacggtgccgttcagcgagtcgccggaggtgagcatcgtcatcccggtctacaaccacgtcgcccacaccgtggcctgcctgcgcgccctggcggcgcacccgccggccgccgcgtgcgagatcctggtagtggatgacggcagcagcgatgccaccgtgcagtggatgccgcaggtggccgggctgcgctatgaagtgcgtgcgcacaacggcggcttcattgaagcctgcaatgacggtgtatcgcgcgcacgcggccgctacgtggtactgctgaacaacgatacggtgccgcagccgggctggctcgacgccctgctggacaccttcggcagcgtgcccgacgccggcctggtcggcagccagctgctgtacccggatggccgcctgcaggagtcgggcggggtgatcttcgccgatggcagtggctggagctacggccgcttcgaggccgccgatgatccgcgctttgccagcctgcgcgacgtcgactactgctcgggcgcggcgctgatgctgccacgcgccctctggcagcagctggacggcttcgacacccgctacaagccggcctactacgaggacaccgacctggccttccgcgtgcgtgcacacggcctgcgcgtgctggtgcagccggccagccgggtgatccacgacgaaggcaccagcaacggtaccgacaccggcagcggggtgaaggcctaccaggtacgcaaccaggccatcttcgccgcccgctgggccaccgaactgggccgtcatccggcggtcggcgaagtgccgtctccggcgctgctgctgcgcggccggcgccaggtgctgatcctggacgaggaagtaccgcaaccggatcgcgattccgggtcactgcgccaggtcaatctgatccgcctgctgctgcagggcggcgcccacgttgtgttcgtaccgacccggcgcgagcacgccggtgcggccaccgaagcgctgcaacggatgggcgtggaagtctggtacgcgcccttcctggacagcgtagccggctggctgcgcagccacggatcgcgtttcgacgtggcaatgctggtgcgtcaccacgtcgcccacgaatgcctgccgctgctcaagcgctatgcaccgcaggcacggaccgtgttcgacaccgtcgacctgcactacctgcgcgaacgccgcggtgccgaagtggccggcgacgcaaccctgctgcgtgcagcggaacgtacccgcagcagcgaactggccgtgatggagcagtgcgacatcaccgtgctggtcagtgcggccgaacgggagcagctgcagtccgatgcgccgcaggtacgggtggagctgatctccaacctgcatgaggtcgttggtgccggcgccgtattcgagcagcggcgcgacctggtgtttgtcggcggcttccgtcatccgccgaacctggacggcatggaatggttcatcggcgaggtctttgcccgcatccgcgcccggttgccggaagtgcgcctgcactgcatcggcgccgcggcgccggagtcgttgctggcactggccgcacgccagcccggtgtgcagatgcacgggttcgtcgaagacatcacgccctacatggacggcgcgcgcatcgccattgcgccgctgcggttcggcgccggcgtgaagggcaagatcaacctgagcatggcccatggccagccggtggtcggtaccacctgcgccgtggaaggcatgcacctgcatcccggccaggacgtgctggtggccgatgacgctgtcggtttcgccgatgcggtgatccgcctgtaccaggatccacagctgtggcagcagttgtccgatgccggcctggccaacgtcgcccagcatttctcacttgatgccgcccgcgcgaccgtgcagcgggtgttcttcgcctag

SEQ ID NO: 496924 - DNA, 1566 bp, Stenotrophomonas maltophilia
atggaacgcgagcccccgcatcgcccgcatggcgctgaacatcctgcgctggaccgcgtccgtcgcgagggtcgctggtggtggctgcaggcacgccatgcgcgccgggtctggcgctgggcgctgcttgcggcgctggccgtgttcgtgctgctggtcctgctgcgcaagccgctggccgactggttctgggatgagccgcagatcgaacagctgctggccgagggggatcgtgcgctggccgccggtcgtttgagcgatgccgatggcagtggtgcgcgcgagcgctaccaggcggtgctggcgctggacggtgatcgcccgcaggcgcgccagggcctggccaataccggcgcggcagcgctgcaacaggcgcgcgatcgcctgcacgccggtgacctggacggcagcgcgcaggcactggcactggcccgtgagctgcaggtgccgcagggcgaagccgatgcggtcgcccgccagctgcaggcgcgacgcagtgccggagccggtattggtgcgttgttggcccaggcgcgcaacgcgttcgcggccggacgcctggatgatggcgacagcagtgcgttgcccttgttccagcgcatccttgccctgcagccggacaacctgccggcgctggaaggtcgcgaagatgcgctgagcgacctgctgctgcaggcgcgcacgctggcagggcgcggagagctggccgaggcggccgcgatcctgcgtcgtgcccgccagttcgatgccggtcatgccgatctgccggtcagcgaggaagccctggcgcgcgcggtggaccagcgcctgcggcaggcgcagcgggcactgcaacgacagcagctggacgccgcagcccagggtttcctggcagtgcttgcggtggcggccgatgatcccaatgcccagcgggggcgtgagcaggcgctgcaggcggtggtggcgcgcagccagacatccgccgacgacttccagttcgatgcggcgcaacgcgatgcagccctggcggcggagctgggcgcttcgcaggcaatccggcaacaactggcacagcgcctgcagcgtgcgcgccaggcgcaacaggccctgcagcagcccgcgatcagtacggcgcagcgcgaacgccagctgcgcgaccacctgcgcaagatcgagcgtgccgaacgtgcagggcagtggatcagcccaccggggcacagcgcgttcgacgcactgcgcgaagcccagtcactggccccccgcgacacgcgggtcaaggctgccgcagcacgcctgctgcccgccagtcgccgctgcttcgacgacaatctgcggcagaaccgggtacaggcggcgggtgcctgcctgcaggcctggcagacgctgtcaccgaccgcagcgggcctgccctcggcgcggctgcggttggcccagcgctggctggcgatcggcagcgaacggctcggcaatggcgacctggcctttgccgcgcacgcttccgaacaggcgcggttgctgcaaccggacctggccgaactgccggcgttcgaagaccgcctgcgtcgcgccggtggacgggcggactag

SEQ ID NO: 496925 - DNA, 2121 bp, Stenotrophomonas maltophilia
ttgaaccgtccctcggcagcggtgctgcctgctccgctgcgccaggccctgcgcgagcattgggaagcgcccgattgcgaccaccagatgcgtgccacctggtcggtgctgggcgataccctcgatgcgctggcgatgctctcggccgacgaaggcgcggtggtggcagcattgctgttcgacctgccgggcctgcgcgccagcctggaccagctgccgctgggcagccaccaggcggcggtgatcggcctgctcgacggccaggatgcggccgacccggtgtgggcgctgcacgccggccgtgaggccggacgcaacagcgagggcctgcgccggctgctgctggcgatcatccgcgacctgcgcgtggtgccgatcctgctggcgcgccagctggcgcggatgcgcgcggccgacaagctggacgacgagcaacgccgcgcgctggcccagctgacccgcgacatccacgcgcccctggccaaccgcctgggcatctggcagctgaagtgggagctggaggacctggcgttccgccacctggaaccggaaacctaccgccgcatcgcccgcgaggtggacgaaacccgcatcgcccgcgagcgttacgtcgagaacgtcaagaaggtgctgtcgcgcgagctggtcgcccagggcatcaaggccgaagtcagcggccgcccgaagcacatctacagcatctggcggaagatgcagaagaagcggctggccttcgaccagctgtatgacatccgtgcggtgcgcgtgatggtcgacgacgtcgccgcctgctacgccgcgctgggcgtggtgcacgcgctgtgggcgccggtaccaagcgagttcgatgattacatcgcacgcccgaaggccaacgactatcgctcgctgcataccgccgtggtcggcccggaagggcgcaccatcgaagtgcagatccgtacccatgaaatgcactcgcaggccgagctgggcgtggccgcgcactggaagtacaaggaaggcggcaagggcgcggagaagtccttcgatcgcaagatcacctggatgcgccagctgctggagcaggcgcaggacgggcagggcaatgaactggccggggcgctcgatgccgagctgaccgaggaccgggtctatgcgctgagcccgaaggacgaggtgctggacctgccgcagggcgctacgccgctcgatttcgcctaccaggtgcacaccatggtcgggcaccgctgccgcggcgccaaggtcaacggccgtatcgtgccgctgacctatcgcctgcgcagtggcgaccgcgtcgagatcctgaccggcaaggaggccgacccgcgccgcgactggctgatgccggccaatggcttcctggccagcaaccgctcgcgcgagaaggtgcgcagctggttccacaagctggaccgcgcgcgcaacgtgcaggccggtcgcgagctgctcgagcgcgagctgaagcggctgggcctgcagcactcggacctggccgtcgcggccaagaagttccatgccgacagcgtcgatgacctgtacatccaggtggcgctgggcgataccggcccgaaccaggtcagccggacgttgctggaggcggaacgtgccgccagccagcccgcgcccgcgccgacgctgccgcggccgaccgcgcgccgcgagaacctgggcaagtccaagttcaccgtgcagggcgtgggcaacctgctggtgcagctggcacgctgctgccagccggtggccggcgagccgatcgtcggctacctgacccgtagccgtggtgtcactgtgcatcgtgcagactgtgccgcgctggcccggctggccgccgccagcccgcagcgcatcctgccggtggagtggggccaggccggtggcggctacgaagtggacgtggtggtcgacgcggtcgaccgccgctggctgctgaaggacatcaccaacctgatcgcccaggaagacgcctacgtgctcgacatccacagtgacaacgtgcgcaacagtggccgtgcccatctgcggctgcggctgaaggtcagcgactacgggcagttgtcgacgctgctgggcaagcttgatgcgctgccgggcgtgagcgaggcacgtcgcctcggctga

SEQ ID NO: 496926 - DNA, 525 bp, Stenotrophomonas maltophilia
atgccttcgattgccctgcgcgtccgtccacggctgctggcctgtgccgccgtgttgctgtccctgtccgcgcctgcgctggcccagcgcgtggtggagggcgacctgcagcagcagatgtcgcccaccgagttcaaggccgccggcctggacaagctcagcgccgctgaactggccacgctcaaccgctggctgcagggcaaggtcgaggcggccaccacccaggccgtcgccgcagcgcgcgaagaaggccgccaggaagtgatcaagaagaaccgcggcttcctggacttcggcagcagcgaaccgatcgaaagcaccctgcagggcgaattccgtggcttcggccagggccgccgctacgtgctgcagaacggccaggagtgggagcagatagacgccacgcactattccggtggccgcaaggaagcgccgaacgtcagcatgcgcccaggcgtgatgggcgcctggtacatgaaggtggacggggtgaacgtgcaaccgaaggttcgtcgcaccaagtaa

SEQ ID NO: 496927 - DNA, 4083 bp, Stenotrophomonas maltophilia
atgaactctatcgataaaaatccatcgtcccgcctgcgccaacagcgcgccgccatcgacggcgccatgagccgcgaccggggccgtttgctggggatgctctcgcgttgccaagccaagccacaggatgcggcgttggccgctaccttcgagcaggccttgcaggcgtcggtgcagcgccggcaggtccgggcgcagcagcagccgtccattactctggacccgcagctgccgattgcgcgtgaagccgacgccatcatcgggctgatccgcgaccatcaggtggtggtgatcgctggtgaaaccggctcgggcaagaccacccagctgccgaaactgtgcctggccgcaggccgtggccaggccggcatgatcggctgcacccagccgcgacggattgccgcacgtgcggtggcaagccgcgtggcgcaggaactgcagagcgaactgggccagttggtcggctaccaggtgcgcttcaacgacaaggtcagcgacgacagccgcatcaagttcatgaccgacggcatcctgctggcggagatcgccagtgaccgctggttgtcgaactacgacacgatcatcgtcgacgaggcgcacgaacgcagcctcaacatcgatttcctgctgggctacctgaagcagctgctgcgcaagcgcccggacctgaaactgatcgtcacctcggccaccatcgataccgaacgcttcgcccagcatttcgacaatgcgccggtgatcagcgtcgaaggccgcacctacccggtggaagtgcgctatcgcgcgctggaaggcgagggcgaagaccagggcgaacgcaccgtcaacgacgccatcgtgtcggccatcgacgagatcacccgcctggatgcgcgcggcgacgtgctgatcttcctgccgggcgaacgcgagatccgcgatgcgcaccagtcgctggagcgccgcaagtaccgcaacaccgaggtgctgccgctctatgcgcggctgtccaaccaggaccaggaccgggtgttcaatcccgggccgaaccggcgcatcgtgctggccaccaacgtcgcggagacctcgctgacggtgccgcgcatccgctacgtggtcgatccgggctttgcccgcgtcaagcgctacagtccgcgcaacaagctggaccgcctgcacatcgagccgatctcgcaggccagcgccaaccagcgcaagggccgctgcggccgtatcgccgagggcatctgttaccgcctgtacgccgaagccgatttccaggcgcggccggagttcaccgatccggagatccgccgctccagcctggccggggtgatcctgcgcatgctgcagctgggcctgggccgcatcgaggagtttccgttcctggaagcgccggacgagcgtgcggtggccgatggctggcagcagctgaccgaactgggtgcgatcgacgccgagcggcgcatgaccaccatcggcaagcagatggcacgcctgccggtggacgtgaagctggcgcgcatgctggtcgccgcgcaggccgccggctgcctgcggccgatgctggtgatcgcctcgttcctgggcatccaggacccgcgcgaacgtccgcccgaagcacgcggtgccgccgacagcgcgcatgcgcagttcgccgatggtcgttccgagttcgttggcgtgctgcgcctgtgggatgcctaccggcaggcccatgaagacctgacccagtccaagctgcgcgactggtgcggccgtcatttcctcggcttcctgcgcatgcgcgagtggcgcgagctgcaccgccagctgcggctgctgtgcgaggaactgggctggaaggaagaggccgacgaggcgtcgatggcgccgttgctggccggcagcagtgcgccggcggcagcgcgtgatgatgccgccgcagtgaaggccacccgtggccagctgcaccgcgctgcacgcctggcccgcgaaggcaaggccgaagcggcgccgacgccggtggccgtacgtgcacagaaggagcaggcaccggcgggcggcggcttcagcgaacgcgtgcgcgcggctgcctaccagaccctgcaccgggcgttggtggcgggcctgccgacgcagatcgggcaccgcaccgagaagggcgatttccaggcgccacgccagcgccgtttcctgccgttccccggttcggcgctgtccaagcgcccgccgccgtggttgctggtggccaacctgctggacacgcagaaggtctggggcatgaccctggccgcgatcgagccggactgggtcatcgccgaactgccgcacctgctgctgcgcaagcacttcgacccgcactggtcgcgcgcgcagggccaggtgctggcctccgagcagatcagcctgttcggcctggtgctggcaccgaagaagccggtgcactacggccgcatcgcaccgggcgaggcgcacgacatcttcgtgcgccaggcgctggtgaccggcgagatcaacacccgcgccagcttcgtggccgacaaccagaaagtgctggaggtcgcccgcgaggaggaagcgaagctgcgccgcgccggcatcgtggccgacgaggactggcaggcgcgctggtacctggaccgggtgccgccgcagatccattcggcggcagggctggatgcctggtggaaggggctggcgccggaacagcgcaagaccctgcactggtcactggtcgacctgttgccgggtgagggcagcgaacaggagcgctacccgaagtacctgccgctgggccaggcgcgcctgccactgcactaccgcttcgagccgggtgccgatgatgacggcgtgaccctggacgtgccgctgcacctgctcaacgcgctggacccggtgcagctgggctggctggcgcctggcttcgtcgccgacaaggcctcggcactcatccgcagcctgcccaaggcgatgcgccgcaactacgtgccggcgccggacttcggtcgtgcgttcttcgaggcattcccgcagcccagcgccgatgccatcactggcgaactggcgcgctttttgtcacgtgccaccggcgcgacggtgacggcgctcgatttcgaacccgcttcgatcgaaccgcacctgcacatgaacctgcgcctgcgcgacgagcacggcaaggtgctggcgacctcgcgtgatctcgatgcgttgcgcgcgaaattcggcggccgtgccggcgatgccttcgctgcacgcgcggggcgcgagatggcggccgatggcctgcgcacgttcccggccgcgccgattccgctgcaggtgcccggtgaagccggcgttccggcctatccggcgctgctggacgagggcgacagcgtggcgctgcgcatcttcgccgatcgccagcaggcgcaggaggcccacccgctgggtgtgcgccggctgctggagattgccctggccgagaaggtcaagcaggcgcgcaagcagctgccggtgggtgccaagaccggcctgctgtatgccgcgatcgaatcgcaggaacgcctgcgtggagacctggtggatgcggcgatgaacgcggtgctggccgaaggcctggaagacatccgcgatgcggcagccttcgagcaacgccgcgagcatgcggccaaggccctgttcggcgaggcgatgtcgcggctgaaactggccgagtccatcctggcgctggtggcggaactgaagccgttgctggaggcgccgttgatgggctgggcgcgtggcaacctggacgacatggaagcgcagctggccgggctgatccaccccggcttcctgcgcgacacgccggccgacgcgctggcgcagtacccgcgctacctgaaggcgatgatcctgcgcaccgagcgtgccaagcgtgatccgccgcgtgaccaggcgcgcatgctggaattgcacccgttcctggaggcgctggaagcgggcgagcagcagggcctgcgtgatcgcccgcaatggcaggcgctgcgttgggatctggaagagctgcgggtgtcgttgttcgcgcaggagctgggggcacgcaccggcatttcggcgaagaagctggcgcagcgggtggctgcacttcgccacgcgtga

SEQ ID NO: 496928 - DNA, 549 bp, Stenotrophomonas maltophilia
atggcgaagaccaagagcacgaccaaggccaagaccggcaagcagaagcttgcagcggcggcaccgtcggcgccgaacatcgatatcgggatcacccagggcgaccgcaagaagatcgccgacggtctgtcgcgcttccaggccgatgcgttcacgctctacctgaagacgcacaacttccactggaacgtgaccgggtcgatgttcaactcgctgcacaccatgttcgagacgcagtacaccgagcagtgggcggcactggacgacgtggccgagcgcatccgcgcgctgggcttcaatgccccgggctcctaccgggaattcgctgcgctgacctcgatcgccgaggaaccgggcctgaccgacagcgcggactggcgtgaaatggtacgccagttggtggtcgccaacgaagcagtctgccgtacggcacgtgaagtgctggaggtggcggccaagggggatgacgccccgaccgaggatctgatgacccagcggctgcagacccacgagaagtacgcctggatgctgcgctcgctgctgcagtaa

SEQ ID NO: 496929 - DNA, 279 bp, Stenotrophomonas maltophilia
atggacgaaaccacccagcagaatgctgcgctggtggaagaagccactgctgcggcacgcgcaatggaggaccaggccggccagctggctgacgccgtggcgatcttccgcctcgacaaccaggtgtccgccgcagtgaaggccgtggccgcgcgcgcggagccggcccgtgtcaccaccgtggcacgcccgcagccgaccagcacgcccgctccggtccgccgcagcagcaacgccagcaccttcgccgccagcgacagcgactggcaggaattctga

SEQ ID NO: 496930 - DNA, 870 bp, Stenotrophomonas maltophilia
atggacacgtcccccgtgcaaagtcctacccccatcgtcaccggcccgcgcgaattcgagttcgccgaccgcgatttccgccgcgtctgcgacctgatctaccagcgcgtgggcatcgccctcgcgccggcaaagcgcgacatggtctatggccgcctgtcgcgccgcctgcgcacgctgggcatgcgcagcttccagcagtacctggaccacctggagcaggaagatggtgacgaatggcaggcgttcaccaacgcgctgaccaccaacctgacctcgttcttccgcgaaccgcatcacttcgacaagctgcgcgaggaactccaacagcgctccagccgcgccccactgctgctgtggtcgtgcgcggcgtccaccggcgaagagccctactcgatggcgatcaccgcctgcgaggccttcggcacgttgaagccgccggtacgcatcattgccaccgacgtcgatacccaggtgctggccactgccggccgcggcgtctacaacatcgatcgcgtcgccagcctcgatccggacctgcgccgccgctacttccagcgcggcagcggccccaacgagggccagtgccgcgtgctgccggcgctgcgcgaactgatcgagttccgcccattgaacctgctcgccccgcgctacgacgtcggcggcccgttcgacgcgctgttctgccgcaacgtgatgatctacttcgacaagccgacccagcgcgccatccttggtcgcctggttcagcacctggccgatgacggcctgctctacaccggccactcggagaactacctgcacgccgccgacctgatccagccctgcggccgcaccctgtaccgccgtgcggcaaaggccggcgcatga

SEQ ID NO: 496931 - DNA, 597 bp, Stenotrophomonas maltophilia
atgaatgcctcgctgcgtaccgacgatgtgatgcgctaccaggatgcgcgcttccagaccatcgccgccaagctgctgccgacccagtacctggtggtcgatgacaccactgcgctgaccaccacgctgggctcctgcgtggcggcgtgcctgcgcgacccggtgctgaagatcggcggcatgaaccacttcctgctgccggagggcaacgccggtgacggcgcacccgcacgctacggcagctatgcgatggaactgctgatcaacgacatgctcaagcggggcgcccaccgcaagcgcatcgaagccaaggtgttcggcggcgccaacgtgctcaagggcttcaccagcaatccagtgggcacccgcaacgccgagttcgtgcgccagtacctgcaggccgagcacatcccgatcatcgccgaggacctgtgcggcatccatccgcgcaagatctggttcttcgccgataccggccgcgtggttgtgcagcgcctgccgcatgcccatgaggcagaagtggctgcgaccgaatcggcggtgcgtgcgcgcctgtccaaggccccggtcaccggcggcgtggagctgttcgaatga

SEQ ID NO: 496932 - DNA, 1074 bp, Stenotrophomonas maltophilia
atgaccttgaccggcaacgccccctgtcgggtcctgatcgtcgacgactccgccgtcgtgcggcagatgctcacggaaatcctgtccagcgatccggccatcgacgtggtcggcaccgccgccgacccgctgctggcgcgcgagaagatcaagcgcctggccccggacgtgatcaccctggacgtggaaatgccgcgcatggacgggctggcgttcctggaaaacctgatgcgcctgcacccactgccggtagtgatgatctcctcgctgaccgagcgcggcgccgacaccaccctgcaggcactggcgttgggcgcggtggatttcgtctccaagccgaagctggacgtggcgcgcggcctgcaggcctacgccgacgagatcatcgccaaggtcaagatggcagcgcgctcgcgggtacgtccgctggtgcgcgctgccgcaccgaagctcctgctggaagccgctcctgcgatgcgccccgccgcgccgcagttccgtaccaccgaccgcctgatcgcgatcggctcgtcagccggtggcaccgaagccctgcgcgtggtgctggaaggcatgcccgccgatggcccagccgtggtgatgacccagcacctgccggccagcttcagcagcgccttcgccgaacgcctggaccgccactcggccatggccgtacgcgaggccagcgacggcgaggcagtgctgcctggccatgcctacctgccaccaggcggcaagcatctgcgcatcatccgcgacggtgcccgctggcgctgccgcgtcgacgacggcccggcggtgaaccggcacaagccggcagtggacgtgctgttccgttcggtcgcgcagaacgccggtggcaatgcgatcggtgccatcctcaccggcatgggtgatgatggcgcacgtggcctgctggagatgcgccaggccggcgccccgaccctggtacaggatgaggccaccagcgtggtctggggcatgcccggtgccgcctgcaagctcggcgccgccgaggaacaggtgccgctggaacggattgccgagcggttgctggcgctcgcccgcggctga

SEQ ID NO: 496933 - DNA, 246 bp, Stenotrophomonas maltophilia; identical to SEQ ID NO: 117525

SEQ ID NO: 496934 - DNA, 1284 bp, Stenotrophomonas maltophilia; identical to SEQ ID NO: 117524

SEQ ID NO: 496935 - DNA, 993 bp, Stenotrophomonas maltophilia; identical to SEQ ID NO: 117523

SEQ ID NO: 496936 - DNA, 705 bp, Stenotrophomonas maltophilia
atgcgattcaaacgaccgcaggtgcgctacgccgatacgccgcagcctgccaccccgtatcaagccgccgcccaggtgtgggacgaccgtatcggctccgcccgcgtgcaggcgaagaattggcgcctgatggccttcggctgcctagtgctcgcgctgttgatggccggcggcctggtgtggcgctcggcgcagtccatcgtgacgccctatgtcatcgaggtcgatcaggccgggcaggtgcgcgctgtaggtaaggccgctacgccgtatcggcccggcgacgcgcagatcgcgcaccacctggcgcgcttcgtgacgctggttcgctcgctgtccatcgaccccatcgtggtgcggcagaactggctcgatgcctacgactacaccaccgacaagggcgcggcggtgctcaacgactacgcccgcaccaatgacccattcgcccgcatcggcaaggaatcggtaacggtgcaaatcaccagcgtggttcgcgccagcgacacgtctttcaacgtgcgctggacagagcagcgctatgtcaacggtgcgcccgccggcaccgaacgctggaacgccgtgctttcgaccgtcctgcaaaccccgcgtactgaacagcgcttgcgcaagaacccattgggtatctacgtcaacggcctgtcatggagccgcgaactggattcttccgaaggagccaaaccatga

SEQ ID NO: 496937 - DNA, 1368 bp, Stenotrophomonas maltophilia; identical to SEQ ID NO: 117521

SEQ ID NO: 496938 - DNA, 327 bp, Stenotrophomonas maltophilia; identical to SEQ ID NO: 117520

SEQ ID NO: 496939 - DNA, 744 bp, Stenotrophomonas maltophilia; identical to SEQ ID NO: 117519

SEQ ID NO: 496940 - DNA, 2451 bp, Stenotrophomonas maltophilia; identical to SEQ ID NO: 430727

SEQ ID NO: 496941 - DNA, 270 bp, Stenotrophomonas maltophilia; identical to SEQ ID NO: 430728

SEQ ID NO: 496942 - DNA, 387 bp, Stenotrophomonas maltophilia; identical to SEQ ID NO: 430729

SEQ ID NO: 496943 - DNA, 699 bp, Stenotrophomonas maltophilia
gtgagcatcatcggcctggatcgctacgtggccgacggcatcctgaccgccgggcaggccgagttcctgcgccgcgccgtgcgcgagcggcagaacatcctaatcgccggcggcaccagcaccggcaagaccacgctggcgaacgcgctgctggccgagatcgccgccacaggcgaccgcgtgctggtgctcgaagacaccatcgagctgcaatgcgcggcccgcgaccatgtgccgctgcgcacccgcgccggcgtcgtcaccatgaccgagctggtgcgggccacgatgcgcctgcggcctgaccgcgtgatcgtcggcgaggtgcgcggcggcgaagccctcgacctcatcaaagtgtggggcaccggccaccccggcggcattgcgaccatccatgccggctccgcgctgggcgcgttgctgcgcctcgaacagttgattctcgaagtcgctgtgaatccgccgcgggcgctgatcgccgaggcggtcaacgtcgtcatcaacatcgccggacgcggccgcaagcgccacgtcgaaaccatcgcccgtgtcgtcggcttcgacggcaccggctatcgcctggcggacgcactggaaacgccgtttcccgagctgacgccggttcctctcgcagccgacgccgctgcacattcccgtcccccaaccaacttggagaactgccatgacgcacgttga

SEQ ID NO: 496944 - DNA, 2298 bp, Stenotrophomonas maltophilia
atgcagacccgacacctgacgatcgccgtagcgatcgtgctctccgccgctgccagcgcccatgccgccaccaccgccgataccggcgccagcaccgatgccgcgctgagcgcgcagacgctggataccgtctctgtgatcggccagggcgagacccgccaggtgcagcgcatcactgccgtggacaagcaggtgctgccgccgggcaccagtggccagaagatcctcgatcgccttccgggcgtgtcggtgcagtccaacgatgcctttggcgccaacgaggaatcgcagaccatcagcctgcgcggcttcgacaagagccgcctgggctacacgctggacggcatcccgctgggcgacaacagctacggcaattacaacggcctgagcatcgcccgcgcgatcatcgccgagaacctggccggcgccgaactgtcgcagggcattggttcgctgggcgtggcctcgaccagcaacctgggcggcaccatccagtatttctcgatggatccatccaccgaattcggtggccgcgccagcgtcaccgtcggcgacaaccaccagcgccgcggctacctgcgcgtggacaccggcgacctcaacggcttctcggcctatgtgtccggcgtgcaccaggaccaggacatgtgggccgcgccgtaccagaaccagaccacccgccagttcaatgccaaggcagtgtggaacgttggcgaccaccgtttcggtgcgttcgtggcgacctcgcgcgccagccaggccaactatgcctacctgtccaaggacatgctggcacgcggactggggtatgactggaacatctacgcgccggactgggatcgcgccgtcgccgccgcgtactgcgcgcctggcacctacaacaaggcgcgctgcaagttcagcggcggcgtcaacagcatcgacgatgcgtactatcagagccgtgcgctgcgcgacgacaacctgtactcggtcgatgccgacctgcgcctgggcgagcagggccgcctgaagctgctggcctaccaccacgacaaccgtggccagggccactggtgggcaccgggccagccgtcctacccgggtaccgacaggatgctgccgatctcgatccgcagcaccaactacacgatcaaccgcgatggcctgaccgccgcgctgtcgtggacggtgggcatccacgagctggaagccggcctgtggtacgagcagaacgaccataacgtgtcgcgcaacttctactacatcagcggcccgttcctggacgacctgtacctgaagaaccccgaccgcttgctgttcaaccaggacttcgacatccgcacgcgccagttatacgtgcaggaccgcatgcgcttcctggaccagcgcctgaccgtggacgtgggcatcaagagccccaacacccgcatgcgcgccaccgcgcagcccggcgttgaaacccgcattgcgtcgggcacactgaccgccaaggaatcggtgctgccgcaggtaggcctgggcttcaagctcaacgccaacaacgagctgttcgcctcctacgccgagaacatcgccgccttcgtcggcggtggcagcggcggcccgctgcaggtgtcgccggaatcgttcgcggccagcgccgggctggaaccggagaagtccaagagcctggaagccggcttccgtaccttcggcgagaagtaccaggcgtcgatcgctgcatacaacgtcaagttcgacaaccgcctgctgtcgctgaacccgtgttcgagcatcgaagtcggcacgcgcccggagtgcgtgacgcgcttcatcaacgtcggttcggtgaagagccatggcgcggaactgactttcatcctcaagccgattgatggcctgcagtggtacaacgcgctgtcctggaacaagaccacctacgaggatgactacacctcgggcggtgcgatcgttccggtggccggcaagatcacggtggatacgccgcagcgcatggcctccagcgagatcagctggaaccgcgacggcttcttcgccagcctgcgtgcgaagtacaccggcaagcgctactacacctacaccaacgaccagtcggtgccgggcgtgaccaccttcgacgccggtgcgggctacgatttcggcccgggcctgggcctgcgcaacgtgcgggtgtcgttgaacgcgaccaacctgaccaacaagcgctacgccggccagctgagttcgttcgcaccgactgatccgaagggcacgcgctatgcgatccatgcgagcgcaccgcggcagctgttcatgacggtggcggcggagttctaa

SEQ ID NO: 496945 - DNA, 741 bp, Stenotrophomonas maltophilia
atgacgcttcgaatcgcttacgtcaccagtggaatgggcagtgtcggcactgccatctgccagagcctggcccgcagcggccacaccgtggttgccggctgcgcgccgaactcgccgcgcaaggccaactggctgcgcgagcagcgcgaacagggcttcgacttcatcgcctccgaaggcaacgcgaccgactgggcctcgaccagcgccgcgttcgccaaggtccgcgccgaagtgggtgaggtcgatgtactggtcaacaactccggcggcagccgcgacctgctgttccggcagatgacggtggaggactggaacgcggtgatcgcttccaacctcaacgcgctgttcaacctgaccaagcaggtggtcgacggcatggccacgcggggctggggccgcatcatcaacatcggctcggtcagcgcccacaagggccagatcggccaggtgaactacgccaccgccaaggccgcgatgcatggcttcagccgtgcgctggccgccgaagtggcttcgcgcggcgtcaccgtcaacacgctgtcgccgggctacatcgccagccaggcgatcagcagcttcccgccggatgtactggaccggctggcggcctcggtgccggtgcgccgcctgggtcgccccgaagaagtggccggcctgtgcgcgtggctggcctcggatgaagcctcgtacgtgaccggcgccgactatccggtcaacggtggcctgtacatgggttga

SEQ ID NO: 496946 - DNA, 1332 bp, Stenotrophomonas maltophilia
atgatgctgagcatcctcggctttggcatggtcattacgttcatgtacttgatcatgagcaagcgcctgtcgccgctcgtcgccctgatcaccattcccatcctgttcgcgctgatcggtggcttcggtgccggcatcgacgagatgatgctggagggcatcaagaagatcgcgccgaccggcgtgatgctgatgttcgccatcctctacttcggggtgatgatcgacgccggcctgttcgatccgctggtgcgggtgatcctgcgcttcgtcaagggcgatccgatgaagatcgtgcttggcaccgcggtgctggcgatgctgatctcgctcgacggcgatggctcgaccacctacatgatcaccgtctcggcgatgctgccgctgtaccagcggctgggcatgaacgcgctgaacatgacctgcgtgaccatccttgccggcggcgtgatgaacctgaccccgtggggcggcccgaccgcacgcgcggccaccgcgctgcacgtggacccggccgacgtgttcgtgccgctgatcccgtcgatggtgatcgcctgtgccggcgtgctgctgctggcctggtacctgggcctgaaggaacgccgtcgcctcggcgtggtgaccctgcccaagggcggcagctggatggacaacagcgtgtccgatgacagcaacccgctgccgaccgtggaagacgccgaagacatcaagcgcccgaagctgctgtgggtgaacctggcgctgaccgtggcactgatgaccgcgctgatcatcggcgtgctgccgatgccagtgctgttcatggtcggcttcgccatcgccctggtgatcaactatccgaacctggccgagcagcgccgccgtgtggtcaaccatgccggcaacgtgctgtcggtggtgtcgctgatcttcgccgcaggcatcttcaccggcatcctcaacaacaccggcatggtcgaagcgatgtcgcacagcttcctggcggtgattccggaatcgtggggcccgtacctggcggtgatcaccgcggtggcatcgatgccgttcaccttcttcatgtccaacgacgcattctacttcggcgtgctgccgatcctgtccgaggccgccggcaactacggcatcactccggtggaaatggcgcgcgcctcgctggctggccagccggtgcacctgctcagcccgctggtgccgtccacctacctgctggtgggcttggccaaggtcgaattcgccgaccaccagaagttcaccctgaagtgggccatcgccatctcgatgctgctgatgatcggcagcctgctgttcggcctgtatcccctcgccgcctga

SEQ ID NO: 496947 - DNA, 1140 bp, Stenotrophomonas maltophilia
atgatggcgctggctgtcctgtcggtgccggccttcgccgccgaagacgaccgtccggtcaccgccaccctggggggccgcctgcacctggacttcgccaccttcgacaacgacaaccgcggaacgccgaacaaggatgacaccgagatccgccgtgcatgggtcgatgtgtccggcaagttcttcgtggtcgactacaagctggaagccgacttctccggcgaccgcgtcgaggccaaggatgtctacctggcacgcagcttcggcaaggccggcaagctgaccgtgggccagttcaagcagtacttctcgctggatgaccgtaccagctccaactacggcagcttcctggagcgcggcaacgccggcaccaccctggcgccgctgtaccgcctgggtgcgtcctggcaggccaaccccggtgacttcacctgggcggccagcctctacagcctggagagcatcgacgcctggcaggtgaaggggcgcgctgccggtggccgcgtcacctgggcgccctcgcccagcgatggcgacgtgctgcacctgggcctgtcgctggcccgcgaggcctacgacaaccccggcgccaacggcgtgcccggcctgcgcatccgcccgcgcccggccggccatctgtcggacgagagccgcctgaccctggtcgacttctccgccggccgcgataccgacgtcaacaagtggtcgctggaatacgcgcaggtgcgcggcccgctgtcgtggcagggcgagttcagtggcgccaccttcgatgacggcgcccagcgcggcgatgtgatggctgcctacggcatgctcagctggttcgtcaccggcgaaagccgcgcctatgaccgcaagaccgggcgcttcgcgcgggtgaaggacatccgccacaaggccggtgcattcgaagtggcgctgcgctacgaccagatgtggggcgcgcagcacctcgacggcgcgccggacctgcgccgtggcagcaccgaagcctggacgctgggcggcaactggtacctgcgcgacaacctgcgcttcatgctcaacgtgatcgaaagccgcaaccgcgaccgcctggccggggtgacggtggaccgcacgcgcgcggtcaccggccgcctgcagtacgacttctag

SEQ ID NO: 496948 - DNA, 690 bp, Stenotrophomonas maltophilia
atgcgcctgctgctggtcgaagacaatccggatctggccgatgcgatcatccgccggatgcgccgcagcgggcacgccgtggactggcaggccgatgggctggccgctgccagcgtgctgcgctaccagagcttcgacctggtggtgctggacatcggcctgcccaagctcgatggcctgcgcgtgctggccggcatgcgcgagcgcggtgacagcacgccggtgctgatgctgaccgcgcgtgacggcatcgaagatcgcgtgcaggcgctggatgtgggggccgacgactacctgggcaagccgtttgatttccgcgagttcgaagcgcgctgccgcgtgctgctgcggcgtgcgcgcggccaggccagcgaagtggtgcagatcggcggcttccagttcgacaacgcggcgcaccgggtcagcctcgacggggagccgatcgaactgcccaatcgcgagtaccgcctgctggagatcctggtcggccgtcttggccaggtggtcggcaaggacgagatcggcaacggcctgtttggtttcgatgacgaagcgggcccgaatgccatcgagttgtacgttggtcgcctgagaaagaagctggcgggcgcgccgctgcgcatcaccacggtgcgtggcgtcggttacctgctggaagccagcgatacccatgccgacgccgatggctga

SEQ ID NO: 496949 - DNA, 1404 bp, Stenotrophomonas maltophilia
atgccgacgccgatggctgacacgcgtgctgcgactgcggcgccgggttcgctgcggcgcacgctgctgctctacctcggcgtgctgctggcggtgttcgcggtggccctgctgttcgccgcacgcgattacggccagcgcgccgccaaccgatcctacgatcacctgctggtgtcctcggcgctgtccatcgccgattcggtggccctggtcgacggccagtggcaggtcgatctgccctatgcggcgctggacctgctggcgatggcgccggaggaccgcgtgttctaccgggtggccgacagccgcggcacgctgatcaccggctacggtgatctgccgacaccgccgcgcaggcccggtacccagccgcagctgttcgacgccccctacagcggcgaaaccgtgcgcttcgtggtggtcggccgcagtttcgccgcggcctcggcacagggcgaggtgcaggtgcaggtgggccagacccggcgcgcgcgcgaagccgttgcgcaggacatggtcaatcgtgcattgctggcgatcggtgtgttgtccgggctgctgctggcgctggtggcgttcggcgtgcatcgtgcgttccggccgctggtgcgggtggagcgcgagctgtcgcgccgcgagccgtccgacctgaagccgctcgatgcccgcgtgccacgcgagatggaccagatggtggccgcgttgaaccgcttcatggagcgcctgtccagcagcaacgagacactgcgcgcgttcatggccgaggccgcacaccagatgcgcacgccactggcggcattgcgagctcaggcgcagttggcgctggatgatgacgatccggaggacatgcgacgcagcctgcaggcgatcgagcgcaacgccacgcatatgagccggctgctcaaccagctgctcagcgatgccagcgtgatccatcgttcgcacctgcagcgctttgcggcggtggatctggccgagaccgtgcaccaggcgttgcatgaagcactgccgcaggcaagcccggcaccgcgcgtgcaactggcgatgactgccgagccggtgcaggtgcatggcgacgcgctgctgctgcgcgaggcaatcaagaacctggtcgacaacgcgttgaagtacggcggcgacggcccgttgcagatcgcgctgaccgtggaaagcgggcaggccgtgctgaccatcgccgaccatggcgccggcatcgcggctgccgatgccgaacgcgtattcgagcgcttcgcgcgtggcgaaggcgcgccatccggcggtgccgggctgggcctggccatcgtcaagcgggtggtcgacagccacggcggccgcatcgacctcagcaaccgcccgcagggcgggctgatcgccaccatccgcctgccacggagcagtccatga

SEQ ID NO: 496950 - DNA, 1056 bp, Stenotrophomonas maltophilia
atgatccgcctgtttgccacggccgttgccctgctgctggccctgccggtgctggccgcgcccggcgatgtgcgtcgttttcccgcacagggggcggccaccgcgcagctgcgcattcacggcactaccgacatcgaagtgttcgcggtggtgattgccgattaccagcggctgcacccgggcaccgaggtggtgtacgaggacatcatcacccaggacctgtacgcgcgttacctgcacgaccgcggtggaccggcatcgccggacctgctgatctccagcggcatggacctgcagaccaagctggtcaacgatggccacgcgctgccacatcgctcggcgctgaccgctgcgctgccagcctgggcgcagtggcgcaacgaggccttcggcatcagctacgagccggtggtgatggtctacaacacccgcgcaatgccttcggcaaaggtgccgcacacgcgccgccagctgctggaccggctgcgtgccgaaggtgcaccgctgcgcggcagggtcggcacctatgacatcgagcgcagcagtgtcggctacctgctggcaacccaggatgcgcagcgcggcagcatcgccggcgcgctgctgggggcgctcggcgacaacgacgtggtgcgcgaagagcgcaccggcgtgctgctggacaaggtggccagcggcgagctgtcgctggtctacaacgtgcttggttcctacgcgcaggcacgggtcgatgccggcgcgccactggccatcgtcgagcctgaggactacacgctggtggtgctgcgcaccgcggtgattccgcgtaccggcccacacccggaagaagcgcggcgcttcctcgactacctgctgtcgccccgtggccagcaggtgctgtcgcgcgaggcgcggctgatgccgatcgtgaccggcaacgcacgtggcgacgatgcgcccggccgcagccggcgtccgatccagctcggcccgggcctgctggtgtacctggatgcgctcaagcgccgccagttcctcgatgcctggcgcagcagcgtcgagccggcggggcgctga

SEQ ID NO: 496951 - DNA, 651 bp, Stenotrophomonas maltophilia
atgagcgaatacaccatcctgatcgccgacgaccacccgctgctgcgttcggcggtggtgcagtccttgcggcagagcctgccgctggcgcaggtgcgcgaggtggccagtgccgatgcgctggccgaggcgctcgacgcacagccggacgtggacctggtgctgctcgacctgaccatgcccggcgcgcacggtttttccgcgctgctgcacgtgcgcggctcgcatccggacatcccggtggtgatcctttcctccaacgaccatccgcgggtgatccgccgtgcccagcagttcggcgccgccggtttcatcccgaagtccgcgccggccgagaccatcggcgaggccgtgcaggcagtactcgatggcggcctgtggttcccggcgatggccgccgagcgttccgaggccgatgcactactggccagccgcctggcccagctgaccccgcagcagttccgcgtgctgctctgcctggccgatggcctgctcaacaagcagattgcctacaccctggggctggccgagaacacggtgaaggtgcacgtcaccgccatcctgaagaagctcgagtgccacagccgcacacaggcggcggtgctggtgaaggcgctggagcccgagggcgacgccggcatcgggctgtag

SEQ ID NO: 496952 - DNA, 1566 bp, Stenotrophomonas maltophilia
atggataccgacactccccgtttcgacaaccgcctgctgcacaccctgccgggcgaccccgaatccagcccgcgcaggcgcgaagtgctgggcgctgcctggtcgcccgtgatgccgaccccggtgacggcgcccacgctgttggcctgggcgccggacgtcgccgaaatgcttggcttcgataccgctgaagtcgaaagcgaaggtttcgcgcaggtattcggcggcaacgcgctgtacgccggcatgcaaccgtgggcagccaactacggtggccatcagtttggccactgggccggccagctcggcgacgggcgtgcgatttcgctgggtgagctggttgcgccgggtggccagcactgggagctgcagttgaagggggccgggccaacgccgtactcgcggggggccgatggacgggcagtgctgcgctcatcgatccgcgaattcctgtgcagcgaggcgatgcatcaccttggcgtgccgactacgcgcgcgttgtcactggtcggcaccggtgaggacgtggtgcgcgacatgttctatgacggccatccgcgtgccgagccaggcgccatcgtatgccgggtctcgccgtcgttcctgcgcttcggttcgttcgaactgccggcctcgcgcggtgaaaccgccctgctgcagcagctggtggatgcctgcatcgcccgcgacttccccgaactgcaagggcagggcgaggcgctgtacggcgactggttcgcgcagatcgcggtgcgcacggccgagatgatcgcgcactggatgcgtgtcggcttcgtgcacggcgtgatgaacaccgacaacctgtccgtgctcggtgtgacgctggattacggcccctatggctgggtcgaggacttcgatccggactggacgccgaacaccaccgacgcccaggggcgccgctaccgcttcggcacccagccgcaggtggcgtactggaacctgggccgattggcgcaggcgctgtcgccgctgttcgccgatgtcgcaccgctgcaggcaggcctggcggcttaccagtccacgttcgtggcctgcacgcgtcgcgatgctgcagcgaagctggggctggctgctgccgacggtgatgacctgcagctctaccagcgctggcaacagctgatgcaggagggcgcaatggacatgaccctggcatggcgcgcactgatgcgcatcgacccggcggcagcagatgcgacggttctggacgcggtgtactacgacgaggcgcggcgacaggcagtgcaggcaccgctgcagcactggctgcaggactacgcagcgcgcctgcgccgcgatccgctggcggccagcgaacgccaggcgaagatggcagcggccaacccgctgtacgtgctgcgcaactggctggcccaggaagcgatcgaccgcgcagagcagggggatctcggcggcgtccatgcactgcaggacgtgctgcgcgacccgtacaccgagcgtgccggcctggaacacttcgctggcaagcgcccggcgtgggccgacaatcgcgccggttgctcgatgctgtcctgcagttcctga

SEQ ID NO: 496953 - DNA, 690 bp, Stenotrophomonas maltophilia
atgcgcatcgtccaccatctggaaaactcccgttcgctgcgcgtgctgtggatgctggaggagctggggttggactacgaactgcgccgctatccgcgcgatccgaagacgctgctggcgccgccggaactgcgcaacgtgcatccgctcggcaagtctccggtactgcaggatggtgagctggtactggccgagtccggcgcgatcctcgactacctcgctgaccgttacgacacgcaacgccagctgtcgccgtcaccaatgccggccgacggggccgaacgcatcgcttaccgctactggctgcactacgccgaaggctcggcgatgccaccgttgctgctgaccctggtgatgggccgcatacgcaacgcgccgatgccgttcttcgcgcgcccgatcgcacgcagcattgccgacaaggccgagcgcggcttcatcggcccgcagcggcgcctgcacctggactggatggagcgccgcctggccgaaagcccgtggtttgccggcgagcgtttcagtgcggccgacatccagatgagcttcccgatccaggccgctgccgcgcgcggtggtggcctggacgacaaaccggcactgcgtggcttcctcaagcgtatcggtgaacgcccggcctaccagcgtgccgaggcccacggcggccacctgcaggcgctcggcggcaattga

SEQ ID NO: 496954 - DNA, 210 bp, Stenotrophomonas maltophilia
atgtctgaacgtcagaccggtaccgtcaagtggttcaacgacgccaagggcttcggcttcatcaccccggaaagcggcccggacctgttcgtgcacttccgcgcgatccagggcaccggcttcaagaccctgcaggaaggccagaaggttaccttcatcgccgtccagggtcagaagggcatgcaggctgaccaggtgcaggcggtctaa

SEQ ID NO: 496955 - DNA, 489 bp, Stenotrophomonas maltophilia
atgactgaagctgaaatccccgctgaacacgcctctccccgcatctgggtggatgcggacgcctgtccgaccgtcatccgcgacatcctgttccgtgcggctgaacgggtcgggatcgaactgaccctggtcgccaaccagtggatccgcaccccgccctcgcgctggctgcgctcgatccaggtgccgcaggggctggacgtggccgacagcgccatcgtcgagcgggtcgccgcgggggacctggtggtcacccaggacatcccgctggccgcgctggtgctggagaagcaggccgtcgcgctgaacccgcgcggccagttgtacacaccgaacaacatggccgagcgactgtcgatgcgcaatttcatggaggaactgcgcggcgccggggtccagaccggcggaccgccgcccctgggcccccgcgaccggcagctgttcgccgccgagctggaccgctggctggcgcgacgcccggcccgctga

SEQ ID NO: 496956 - DNA, 870 bp, Stenotrophomonas maltophilia
atgagcttgcccagccggttgcagctgccgcccggcccctgggccaccctgctggatggcctgtgtgcacgttttccgcgcatcgcgcgcgcgcaatggcaggatcgcttcgcgcgcggccgcgtgctggacgcacagggcagggcgctcaccgcggacatgccctggcaggtcgggctggacatccagtacttccgcgaggtggccgacgaaccggtgatccccttcaccgaaaccatcgtccatctggatgcgcacctgctggtggccgacaagccgcatttcctgccggtgacaccggcgggcgggcatgtacgcgagacgctgctggcgcggctggtcgcccgcaccggcaatgccgatctggtgccgctgcaccggctggatcggctgacggccgggttggtgctgttctcgacccagcgtgcgtcgcgcgatgcttaccagcgcctgttccgtgagcggcgcatcgaaaagacctatgaggccttggcaccggcgctgcctgggcgggagtttccgctgcagcgggacagccgcctggtgccgggcgagccgttcttccgcatggccgaagtccccggcgaggccaatgcgcgcagccggatcgagctgatcgaggccgaagggccgatctggcgctaccggctgctgccggaaaccggccgcaagcatcagctgcgcgtgcacatggccatgctgggggcgccgatcatgggtgacgacctgtacccgcagcttcggcaacgggcaccggacgtagccgaggcgccgctgcagctgctggcgcgggccctggctttcgatgacccgttgagtggtgcacgacggatgttcagcagcggccgcagcctgagccttccggcttag

SEQ ID NO: 496957 - DNA, 549 bp, Stenotrophomonas maltophilia
atggctcttaccgccaccatccgcaaggccgaactgcagatcagcgacatggatcgcggctactacgcgacccacaacctgaccctggcccagcatccgtccgagaccgacgagcgcctgatggtgcgcctgctcgccttcgcgctgaacgccggcgatcgcctggagttcggccgcggcctgagtaccgatgacgagcccgatctgtgggaacacgactacaccggcgacatcctgcagtggatcgacctgggccatccggacgaatcgcgcatccgcaaggccagcaatcgcagccgccaggtgcaggtggtcaactacggcggcaacgcctcggagatctggtggagcaagcagggcaagggcctggcgcgcttcgacaatctttcggtggtcgctctggacggcgaattcgtcgagcgctggggccagcagatccagcgtgccatgcgttggagcgtgctgatccaggacggcgaagtgcagctgctcaacgaccagatccagctcgacgtgatcccggactggcgcaagcgcgccaaggcatga

SEQ ID NO: 496958 - DNA, 1185 bp, Stenotrophomonas maltophilia
atgagcaccatccgttgcgatgtggtggtcatcggtgccggcgcagccgggctgatgaccgcgatcattgccggccagcgcggccgccaggtgcaggtgatcgaccatgccaacaaggtcggcaagaagatcctgatgtccggcggtggccgctgcaacttcaccaacaccggcaccaccccggccaacttcctgtcggccaacccgcacttctgcaagtcggcgctggcccgctacacgccctggcatttcatcgagctggtgcacaagcacggcatcgcctatcacgaaaaggaactggggcagctgttctgcgatatctcgtccaagcagatcgtgaagatgctggtggacgagtgccaggcggccggcgtacagatccgtaccgactgcagcgtgcagcgcatcgagcacggcagcgatggtttccgcgtgcacaccacccagggcctgttccattgcgcctcgctggtggttgccaccggtggcctgtcgattcccagcatgggggccagcggttttggctatgaggtggcccgccagttcggccaccaggtactgccgacccgcgccgggctggtgccgttgaccctcagcggcaagcaccaggagcggctggccgacctcagcggcgtcgcactgccgatcgaggcgcgctgcaacggaaagagtttccagaacttcatgctgctgacccaccgtggcgtaagcggcccggccatcctgcagatttcgtcgttctggcagcccggcgatgcgctggagctggacctgttgccgggccaggatgccggcgagtggttgcgccagatgaagcgcgaccgcccggccgccgagctgcgcacggtgctgggcgaggtactgccgaagcggctggcgcaacgcctgtgcgagcactggctgcccgaccggcccgtgcgccagctggacgagccggtgctgcgccaggtcgcgcagctgctgggcgcattcccgctggtggccagcggcaccgaaggctaccgcaccgccgaggtcaccctgggcggcgtggacaccgccgaagtgtcatcctcgacgatggaatccaagcgcgtgcccggcctgcacttcgttggcgaggtgctggacgtgaccggctggctgggcggctacaacttccaatgggcctgggccagcggccacgcagcgggcggcgtggtgtga

SEQ ID NO: 496959 - DNA, 2124 bp, Stenotrophomonas maltophilia
atggacggttcgccgcgcatcgtgtatctagattcgcagattggggagcagtgcatgcagaacgcgaacgacatcaccatccgcctgctgatcgtcgatgacagcggcgagaatgccgaagccatcgtcagcaccctgcgcaacagcggcatcgcggtacgtccgtggcgcccgcaggatgcggccgagctggcccaggtgctggccagccaggccatcgacctggtgctggcctcgccttcgcagggcatcccgctgcagctggcggcccagcacatcgccgccagcggcaaggacatcccgctggtgctgctggccgagcgcatcgacgaggacgaactggtgcaggccagcagccatggcatccgcgccctcgccctgcgccagcgccccgagcatctgctcgccgtggtccgcgaccagtgggtcgacctgcaggcgcgtcgcggcctgcgccggatcgaggcgcagatgcgcgagaccgagcgccgctgcgacgcgctgatcgcctcctcgcgcgaccccatcgcctatgtgcatgaaggcatgcacatccgcgccaacgacgcctatctggagatgttcggctacgagcatttcgaggacatcgaaggcatttcgctgctggacatggtcgccgcccagcacgtggagggcttcaaacagctgctcaaaggcctcagccgtggcgaggtgccgccgccgcagtaccagctcgacgcgcgccacgaggacggcagttccttcccggcgacgatggaatttgccgcggccacctacgagggcgagtcctgcctgcaggtggtgctccgccgccgcatggagttcgaccccgagctggcacgcgaggtcgaggacctgcgccagcgcgaccaggtcaccggcctgctcaatcgcccgaccttcatgctgcagctggaaagcgcggtggcccaggccgggcgcagcgagggtcagttcggcctgctgctgatcgagcctgaccactacgcgcgcctgctgccggatatcggcctggcatcggccgacatcctgatcggcgctctcgccgccctgctggccgaggtggtcggcgaggacgcgcaactggcccgcttcggcgaacacaatttcgccgtgctgcaggccgggccctacgcgcagaccgtggcgctggccgagcgcatccgcgaagcctatgccgcacatgtcttcagcatcggcgcacgctcggccacggtgacggtcagcatcggtggcgtgcaggtgggcgagaagatcgccagcatcggccaggtgctggcgcgcgccagcgactgcacccaggccgccgccgaactgggcaacacctgccgcatcttcgacccggctgccgccgaccgtgtcgaggaagaacgcgtacagcgctgggttgcgcgcatccgcgaggcgctgtctggcgacggcttccagctgcactaccagccggtgctgaacctgcagggcgagccactggagctgtacgaggcctacctgcgcctggagaacaatggcgagctgctgagcccgaccgcgttcctgggcatcgccgaggaacacggcctgctggccgacatcaaccgctgggtggtctcgcaggccatcgcggtgctcggccagcgggcacgcgaaggcaacgccacccaggtgctggtgaaggtgacgccggaatcgttcgaggacccgcagatgatcgccacgctgcgccgcgaactgcaggcacagggcgtgcccggcgaacggctgtggctgcatgcgccggaagcgaaggttttcacccacctgcgcagtgcgcagcagttcctagccgaagtggcgccgctgggctgccgcatcggcctggagcagttcggttcggggctggattcattccagctgctggcccacttccagccgcagttcctcaagctggaccggggcttcaccagcgacctggccgccacgcgcgagaacatcgaccgcatcagccagatcaccgcgcgcgcacaggaagcgggtatccgcaccattgccgagttcgtcagcgatgccaactcgatgacgctgctgttcagtgccggcgtggattacgtgcagggcgacttcgtcggcccggcgctgccggagatgggcttcgagttcgggtga

SEQ ID NO: 496960 - DNA, 1260 bp, Stenotrophomonas maltophilia
atggtcatcaaaccgcgcgtccgcggcttcatctgcgtcaccacccacccgaccggctgcgaggccgcggtcaagcagcagatcgactacatccgcgcgcgcccaccgatccagaacggtcccaagcgggtgctggtgatcggtgcgtcgaccggctacggcctggccgcgcgcatcaccgctgcctttggcagtggcgccgccaccctcggcatcttcttcgaacggccgggcagcgagaccaagccgggcacggcgggctggtacaactcggctgcgttccacaagtacgccgacgaagccggcctgtatgccaagagcatcaatggcgatgccttctccgatgaagtgaaggcgaagaccatcgaaatgatcaaggccgatctcggccaggtcgaccaggttgtctacagcctggcggcgccgcgccgcaagcatccgaagaccggcgagatcatcagctcctcgctgaagccgatcggcgagccgatcaccctgcgtggcctggataccgacaaggaagtgctgaccgagacccacctgcagccggctaccccggaagagatcgccggtaccgtcgcggtgatgggcggtgaagactggcagatgtggatcgacgcgctcgccgatgccggcgtgctggccaacggctgcaccaccaccgccttcacctacgtgggcgaagagatcacccaggcaatctactggaatggctcgatcggtgcggccaagaaggacctggacaccaaggtgctgggcctgcgcgagaagctggccaagatcggtggcgatgcacgcgtatcggtgctgaaggcggtggtgacccaggccagctcggccattccgaccatgccgctgtacctgtcgctgctgttcaaggcgatgaaggaaaagggcacccacgaaggctgcatcgaacagctggacgtgctgtacgacatcctctacggcggcaaggccgacggcgtggcgatcgatcgcctgcgccacgacctggtcgatggcgatggccgcaccgttgcgctgatcgatgaggaaggccgcctgcgcgccgattacaaggaaatggccgcagatgtgcagggcagggtggtcgcgctgtggccgcaggtgaccaacgagaacctgtacgagatcagcgacctggccggctacaaggccgacttcctgcgcctgttcggcttcggcgtggagggcgtggactacgaggccgacgtcaatccggacgtgaagatcgaaaatctggtcgacatgacctga

SEQ ID NO: 496961 - DNA, 702 bp, Stenotrophomonas maltophilia
atgcgattcaaacgaccgcaggtgcgctatgccgacacgccgcagcctgccacgccgtatcaatctgccgcgcaggtgtgggacgagcgtatcggcgcgccccgcgtgcaggccaagaactggcgcctcatggccttcggcctgctggtgctgacgctgctgatggccggcggcctggtctggcgctcggcgcagtccatcgtcacgccctacgtggtggaggtggacaaggagcacgtgcgcgccgtaggcgaggcggccacgccgtacaagcccacggatgcgcagatcgcgcatcacctggcgcgcttcgtgacgttggtgcgctcgctgtccatcgacccgatcgtggtccggcagaactggctggacgcctacgactacgcgaccgaccgaggcgccgccatgctcaacgactacgccagcaagaacgatcccttcgcgcgcgtcggcaaggagtcggtcacggtgcagatcaccagcgtcgtgcgcgccagcgacacgtcgttcaacgtgcgctggaccgagcaacgcttctccaacggcgcgccggccggcaccgagcgctggaacgccgtcatctccatcgtcctgcaaaccccacgcaccgaggagcgcctgcgcaagaacccgctgggcatctacgtcaacggcctgtcgtggagccgcgaacttgatccctcggaaggaacgaaaccatga

SEQ ID NO: 496962 - DNA, 1374 bp, Stenotrophomonas maltophilia
atgaacgacgtgacgatcatcgaccgctttctggatacgttctcgcgctacatcgactccgggttcgggctgttgcagggcgaggtggcgttcctgacggccacgctgatcgtcatcgacatgaccatcgccggcctctactgggccatgagccacgccaccggccaaggcgaggacgtgatcgccaagctgctgcgcaaggtgctctacgtcggtgccttcgcctacatcatcggcaacttcaactggctggcaggcatcgtcttccggtccttcgccggcctgggcctgacggccaccggctcgaccttgagcatggagaacttcctgcaaccgggccggctggcgaagaccggcatcgacgcaggcacgccgatcctggagcaggtcggcgagatggctggtttccccgaggtgttcgtgaaccttgacgccatcacggtgatgttcctggcctggctggtggtggtcctgtgcttcttcgtgctggcgatccagcttttcatcacgctgatcgagttcaagctgaccacgctcgccggcttcgtgctggtgccgttcgccttgtggaacaagaccagctttctcgccgagaaggtgctgggcaacgtggtgtcggccggcatcaaggtgctggtgctagccgtgatcgtcggcatcggctcgggcctgttcgccgagttccaggtgcatcccgacgagccatccatcgaccacgcgctggtcatcatgctggcctcgctgacgctgctggcgctgggcatcttcggccccggcatcgccaccggcctggtgtccggtgcaccgcagctcggtgcgggggcgatggccggtgccgctgtcggcgctgccggcacggccgtcgccatcggtgctgccgcaaccggcgtgggcggggcggtggccgccggggcgcgcatggcgcctgctgccgccaagctggccggcagcggtgcgcgcgccgcgacatcaacggccggtggtgcccggtcagcgttccgggccgggtccgccgctgccggcggcggggccaagggcgctgcggccggcctgggcaacgtcgccaagacgggcgcgcaggcggccgggcgcggtgccgcatcccgcgcttccgccatcgggcaacgcatggctgcgcctttccgcgccggctggaacgggccgccggccgatgaaggcgcaggcgccgcgtccggcggcggccagtccggcggcgaagccacgtccaacaccgggcagcaaccggcctgggccaagcggctgcaccgccgccagcagctcacccacgccgcgaccaccgccgcccatgcgctgcgcggcggcgacggcggcggctccgggcaaggcccgagcctgcgcgattccgattcctga

SEQ ID NO: 496963 - DNA, 291 bp, Stenotrophomonas maltophilia
atgcgatgcgcttgcctcctgctggccgtgctgctgacagcctgcggccagcactcggccgacaaccgcgccgatgccctggccgccgatcccgtgcggctcaaggcactgcgcgcgcaatgcgcggccgaccggcaggccgtcggcgaggacgcttgcctggccgccgcagaagccttccgccggcgcttcttcgccggccaaaccgggccggacgagtaccgaacgctggaggagctgccgcccattcccccaaccttcgatgagccgattggagatgaaacgccatga

SEQ ID NO: 496964 - DNA, 285 bp, Stenotrophomonas maltophilia
atgagtgccgccgatgaaggcacgccgggcttcgcgctcggcttcgaggtgccgctgcatcgctcgctgaccgagccgatcctgctgggcggcgcaccgcgcaccgtggcgatcgccaacggcacgctggccgctgccgtcgggctgggcctgcaactgtggattcccggcgtcgtgctctggatcgtcggccactcgctggccgtgtggggcgcgcgcgtcgatccgcagttcatgcaggtcttcgcccggcacatcaagcaccgcccgctgctggacgtgtga

SEQ ID NO: 496965 - DNA, 384 bp, Stenotrophomonas maltophilia
atgacgcagatgcacgttcctgctttccgcctttccgtaaatccggttcccatccttgcacgcctccggcgcctggcccggccggcccatcgcggcctgctgctggccgccatcatgctgatgacggccggcaccgcgcaggctgccggttcctcgatgccctgggaagggccgctgcaatccatcctggagtcgatccaggggccggtcgcgcgcatcgtggccgtcatcatcatcatcgcgaccggcctcgcgctggccttcggcgacacgtcgggcggcttccgcaagctgatccagatcgtgttcggcctgtccatcgcgttcgccgcatcctcgttcttcctgtccttcttttcgttctccggcggggccgtcgtatga

SEQ ID NO: 496966 - DNA, 690 bp, Stenotrophomonas maltophilia
gtgagcatcatcggcctggatcgctacgtggtcgacggcatcctgtccgcgccacaggccgagttcctacggcgggcggtacgcgaacggcagaacgtgctgatcgcgggcggcaccagtacgggcaagaccacgctcgccaatgccttgttggccgagatcgccgccaccggcgaccgcgtgctggtgctcgaagacaccatcgaactgcaatgcgcggcccgcgaccacgtgccgctgcgcacccgcgccggcgtcgtgtcgatgcaggaattggtgcgcgccacgatgcgcctgcgccccgaccgcgtaatcgtcggcgaggtgcgcggcggcgaagccctggacttggtgaaggtgtggggcaccggccaccccggcggtatcgccaccatccacgccggttccgcgctgggcgcgctgctgcgcctggaacaactgattctcgaagtggcggtgaacccgccgcgtgcgctgatcgccgaggcggtcaacgtcgtgatccacatcgccgggcgtggccgcaagcgccacgtcgaaagcatcgcccgcgtcgtcggcttcgacgccgccggctaccaactggcggacgcgctggaaacgccgtttcccgagctgccgccggtttccctcgcagccgccgccgctgcgccttccccgtccctcgacccacttggagaactgccatga

SEQ ID NO: 496967 - DNA, 624 bp, Stenotrophomonas maltophilia
atgtccaatcgctcctacctgtgctgcagcccctcgccgggcatctatcccagttttgccgaggactacgattccgacgtgcagacgctggcaaatgatgtctactgcataccgctgctgtggcctgcgcttttcacgcccgaggatttccagcgggctgatttcgaagtcgatggcgaagttgtgatcggacaggcaccttcggcacccaaacagaaagtgctcgaaacccttcggcgccgccgcacaggcgtcatccaggcattcaagggtatcggtgatcttgctccgtacgtgaacatgctcgagcgggtgattgaagacgcaccgtatgagttcatttcaatcgaaatggacgaaattgccgccctgaacgatcccgaggaagagttctatgaagcattcaagcgcttgttgtccggattggatgcaccggacgaagacgtttgcgaacagctgatcgcgctggctgcaatggaacacagctggcctatcccatccgtccgcctgcatctcgacagccttgagggctcggaagatgactactggaatcactgtcgggtgctcggagcgggcagcgatgtgtcgggaatggggcgcccggttccctgggaaaccgcttaa

SEQ ID NO: 496968 - DNA, 645 bp, Stenotrophomonas maltophilia
atgcgcatcctgcttgcccgccacggcgaaacgccgtggaacgccgaaggccgctaccagggccagatcgacatcccgctttcgccgatcggtgaagcccaggcccaggccctcggcgcccgcctggcctcggtggacatcacccgtgccgtcgcctcgccgctgtcgcgcgcgcagcgcaccgcgcagctggcactcggtgccgcccgtgccgacatgttgctgaccgagccggagctgcaggaaatcgcccacggcgagtgggaaggcctgctggccagcgaaatcaacgaaaaggacccgtcgcgcctgaaggcgtggcgcgaggagccggacaccgtgctgatgcccggcggtgaatcgctgcgcctggtgctggagcgcagttggcgcggcctggcccgcgccaccgaaggcctcggcgagcacgacaccctgctggtggtcgcccatgacgcggtcaaccgcgtgatcctgtgcaaggtgctgggcctgccgatctcccgcctgtggaccttccgccaggcgccgaccacgctcaacctgctcgaaggcgccgacctggacagcctggaagtggtgcgcctgaacgactgtgcccaccacacgccgttctttggcgaagccaagcaccgcgcactctga

SEQ ID NO: 496969 - DNA, 1272 bp, Stenotrophomonas maltophilia
gtgacgaacaccccgaccaccctggccgactggctggactacattgaacgccagcacccggcgaccatcgacatgggcctggagcgtgtgcgcgccgtggccacggcgatgggcctgggggcgccggcccagcgcaccatcgtggtcggtggcaccaacggcaagggctccaccgtggccttcatcgaagccatcgcgcgtgctgccggctggaaggtcggcgcgtacacctcgccgcacctgctgcgctacaacgagcgcgtgcgcatcgacggccacgatgtggaggatgcggcgctggtcgccgccttcaacaccatcgaggccgcgcgtggcgatatcacgctgacctatttcgagtacggcacgctggccgcgctgcagctgttcgccgacgccgggctggacctggcggtgctggaagtgggcctgggcggtcgcctggatgcggtcaacatcgtcgacgctgacgtggcggtgatcaccaccgtggacatcgaccatgccgaatggctgggcggggaccgcgaagcgatcggcaccgagaaggccggcatcatccgtggctggaagccggtgatcctgggcgagaccgacccgccgtcgagcgtgctcgcacgtgcctacctggtcggcgccaacgcgatccgcggcggcagcgattatttctacgaaccaatcgatgcccagcgctggcgctggcgcgatgtcggcctgcgcatggaactgccgaccccggcgctggccggcccgatccagctggccaacgcgggtgccgccatcgctgcgctgcgcgcgctggacaagccggtgccgcgtgcggcgtgggctgctggtgtcgcggcggcgcgcatctctggccgcctgcaggcgttcgagcgtgacggcgtgcaggtccgtgtcgatgtcgggcacaacccgcaggcggcgggccagctggcgcgcgcgctgaaggccgaagcgtcggccgggcgcaccctggcggtgtacgccgcgctgcaggacaaggacgcggtgggcgttgtgcaggcgctgcaggacgtggtcggcgagtggaccctggccggactggacggcccgcgcgcgcagagtgctgcccagttgcaggcccgcctggccggtacggcggcggccaaggcccagcgcgctgatactgtcgagcgggcgctggcacaggtactggcccaggccgggcgcggtgaccgcgtactggtgttcggctccttccataccgccgctgccgcgctgcaatggttgcagggcgccgcctga

SEQ ID NO: 496970 - DNA, 1029 bp, Stenotrophomonas maltophilia
gtggatacgcctctgaaacagcgtctgattggtgccatcgtgctggtggcgctggccgtgattttcctgccgatgctggtcaagggaccggcgccggacagcggtgtggcctcggtgccgatcgccgcgccggacgcaccggccgatggccagttcgaaacccgtgagctgccgctggttgctccggccggtggagccaccggcctgcagaccgggcaggccaagccgctgcaggagacggccgcgccggctacgccgccgaccgtggacacgtctccggcggttgccgccggcaacttcgccgtcacgtttggcgcctacggcagcaaggccgacgccgatgcggtgatcgcctacctgcagcgctcgcagctgccaggcttcgccgaaaccaccaccatcagcgggcgccaggcgtggcgtgtgcgtgtcgggccgtatgccgaccgtgcccaggccgaagccgcgcgcctgcaggcggtcaagatccgcgccgatgtgaaggcagaagtcatcaccctggatgcggcggcaggcagcagtgcgacggttgccgccacgccggcgccgaccaccagcaccccggccgcggccaccgcgccgtcggccaccagcaacccggtgcgcagcgaaagcctgccgccaagcacgccgacggcgaccaccaaaccagagccgcccaagccggcaccgaagcccgaggctccgaagccggacgccaagcccgagccgaagccggaggccgccgccaacaagccggcgcctgccacgccgacagcaccggcggccagtggcgtcggcttcgccgtgcagttgggcgcgttcggccaggccaacgatgccaacgcgctgcgcgacaaggtccgcgccgccggcttcagtgctttcgtcgagcaggtacgcactgaaaagggcacgctgcatcgcgtccgcgtcggaccggtggccaaccgcgctgacgccgagcagctgaaggcgcaggtcgccgccaaggtcggcgtggccggcatggtccgaccgcacccatga

SEQ ID NO: 496971 - DNA, 780 bp, Stenotrophomonas maltophilia
atgatcgacgtggtgctgctgatcgtgatcgccgcctcgaccctgctcgggatgctgcgtggctttgttggaatcgtcatcggcacgctgtcgtggctgctggccgcgtgggcggccttcgccttcggcaacgatgcggcacgctggtgggcggccccggccgcacccggcggcgagcatttcgttggcggctacctgggcgtgggcattggcgtgatgatcgtggtcgcggtgatcggcatggtcatcaaggcgatgatccatcgcagcatgctgaccagcctggaccggttgctgggcggcgtgctgggcgccgtgcgtggcggcctgatcgcggcgatcctggtgctgctggccggcttcaccccgctgaccgccgaaccctcctggaagcgctcggcggtccgcccggtgctgaacccggccgtggcctggatgaacgggaagctgccgcactggcaggtgcccggcgccgatctgctgcccaagaccttgccgaccgacatgctgtccccatctgcattgatggagctggggaagagcgcaggcgccgatctgggaaagccgggcgcagcaggcgataatggcatcctcaaccaggtagtggcgggcagcggatggctgcggcccgcgaaagcggaacagggcgacgcatacgatccggccgaagtgcgcccggacgccccagcactgccagacagtatcgagccgggcgatccggccaatgtcgaccgcaggcgcggcgaccaccgcggccaggtacggccaccttccttgtaa

SEQ ID NO: 496972 - DNA, 1467 bp, Stenotrophomonas maltophilia
atgtgtggcatcgtcggaatcgtcggcaaccagaacgtcgccgggcagttgtatgacggcttgaccgttctccagcatcgcggccaggatgccgcgggcatcgccacggccaatggcagccgcctgcgggtgcagaaggccaccggcctggtccgcgatgtgttcgatgcacgcaccatgtccaccctggaaggcagcgtcggcatcgcccatgtgcgctacccgacggccggctcggaaggcatggacgaggcgcagccgttctatgtcaactcgccgtacggcatcgcgctggcccacaacggcaacctgatcaacaccgaggcgctgcgccagcaggtgttcgagcaggaccgccgcaacgtcaacaccgattcggacagcgaagtgctgttgaacgtgttcgcctatgagctggaacagcagcgccagctgagcccggaagccgcgatccgcgcggtggctggcgtgcaccgccgctgcaagggcggctatgcggtggtcagcgtggtgctgggcctgggcctggtggccttccgtgacccgcacggcatccgtccgctggtgctgggcaagcgcagccatgccgagggcgacgagtacatcgtggcctccgagtcggccgcgctggacgtgctgggcttccagcgcgtgcgcgatgtgcagccgggcgaagccctggtgatcaccgcccgcggcgagctgttctcggaaatctgcgccgagccggccgagcacaccccgtgcatcttcgagtacgtgtacttcgcgcgtccggattcgatgatcgacaacgtctcggtgcacaaggcgcgcatgcgcatgggcatcaagctgggcgagaagatcctgcgcctgcgcccggaccacgatatcgacaccatcatcccgatcccggatacctcgcgtgatgccgcgctggagatctccaacgtgctcggggtgaagtaccgcgaaggcttcatcaagaaccgctacatcggccgcaccttcatcatgccgggccagggcgaacgcgtgaagtcggtgcgccgcaagctcaacccgatccacctggagttccgcaaccgcgtggtgctgctggtggacgactcgatcgtgcgtggcaccaccagccagcagatcgtgcagatggcccgtgatgcgggcgcgcgcaaggtctacctggccagcgcggcaccgccggtgcgctacccgaacatctacggcatcgacatgccggcggccgaagagctggtcgcgcacaaccgcaccgtggaagagatcgaggcccacctgggctgcgactggctgatctaccaggatctggaggacatggaagcggcggtgagcgagggcaacccggcgctgcgcaacttcgattcgtcctgcttcaacggccactacccgacgggtatcgagccgggctacttcgagcgcatccagcagctgcgttcggacgacgccaagcacaagcgccgcgcctga

SEQ ID NO: 496973 - DNA, 825 bp, Stenotrophomonas maltophilia
gtggtcgatgtacccgacgttggtggcgacctgctgcgcgcggcgcagcggtgcctggccgaagccgacccgctgcgcaaggtcgcgttgacccaggcgtatgccgccgcgttccgtgccggccgcctgaaggtggctgccgatgcgccgccgccggaaccgatccgcatgcctggccggccggcacggctggtgctggtgcatccgcgcgaagtgccccggcgcgggctgggcggcgtggaaggacgcgccgccttcatccacgccatcgcccacatcgaactcaacgcgatcgacctggcctgggatgcggtgtaccgcttccgcggcctcccgccagcgttccatgccgactgggtcagttgtgccgacgacgaatcgcggcacttcatgctgctgcgcgagcgcctgcaggcgcatggtcacgactacgccgatttccccgcgcacaacggcctgtgggaaatgtgcgaaaagaccgcgcatgacggcctggcgcgcatggccctggtaccgcgcgtgctggaagcgcgcggcctggacgtgacaccgggcatgatcgagaagctgcgcaatgtcggtgatggtgaaaccgccgacgtactggaagtgatcctgcgcgaggaagtggcgcacgttgccgccggttcgcgctggtaccgctggtactgcgatcgcgccggcgtcgagccgcgtgcgcgcttcaaggcgctgctggtggaatacgccggcggctacctgcacgggccgttcaacatcgaagcgcgcctgctggccggcttcgacgccgacgagctcgccaacctggtcgaacaggccggttga

SEQ ID NO: 496974 - DNA, 1047 bp, Stenotrophomonas maltophilia
atgttcaagaaactccgtggcatgttctccaacgacctgtccatcgacctgggcacggccaacaccctcatctacgtgcgcgggcaggggatcgtgctgaacgagccgtcggtcgtggccgtgcgccaggaccgtgccatcggtggcacccgctcggtggcagccgtgggcgccgaagccaagcagatgctgggccgtaccccgggtcacatcaccaccatccgcccgatgaaggacggcgtcatcgccgacttcacctacaccgaggcgatgctcaagcacttcatcaagaaggtgcacaaatcgcgcgtgctgcgcccgagcccgcgcgtgctggtctgcgtgccggccggctcgacccaggtcgagcgccgcgcgatcaaggaatcggccgaggaagccggtgcccgtgacgtgttcctgatcgaagaaccgatggcggccgcgatcggcgccggcatgccggtcaccgaggcccgtggctcgatggtcatcgacatcggcggcggcaccaccgaagtggcggtgatctcgctcaacggcatcgtctattcggcctcggtccgcatcggcggcgaccgcttcgacgagtcgatcaccaactacgtgcgccgcaaccacggcatgctgatcggtgaagccaccgccgagcgcatcaaggtcgagctgggctgcgcctacccgcaggcggaagtgatcgagatggaaatctccggccgcaacctcgccgagggcgtgccgaagatgatcaagatcagctccaacgaggtgctcgaggccctgcacgagccgctgtcgggcatcgtcagcgcggtcaagctggcgctggagcagaccccgccggaactgtgcgccgacgtcgccgagcgcggcatcgtgctgaccggtggtggcgccctgctgcgcgacctggaccgcctgatctccgaggaaaccggcctgcacgtgcaggtggccgacgatccgctgacctgcgtggcccgcggtggcggccgtgcgctggagctggtggacatgcacggcaacgagttctttgcgccggaataa

SEQ ID NO: 496975 - DNA, 939 bp, Stenotrophomonas maltophilia
atgtccgctctgatctgtggttctcttgccttcgacaccatcatggtgtttccggaccagttcaagaatcacatcctgccggacaaggtgcacatcctgaacgtgtccttcctggtgccgcgcatgcgccgcgagttcggcggctgcgccgggaacatcgcctacaacctgcacctgctgggcggccagccgatcccgatgggcaccgtgggttcggacttcggcccgtaccgcgagtatttcgaaggcctgggcatcgacctgtcgcgcgtgcgcgtgatcgatgagctgttcaccccgcaggcgttcatcaccaccgaccacgacaacaaccagatcaccgccttccacccgggcgcgatgatgcgttcctacgagaaccatgtgcgcggcgtgccgggcgtgaccctgggcctggtcggcccggacggccgcgaaggcatgatccagaacgcgcaggaattccacgaggacggcatcccgttcatcttcgacccgggccaggccatgccgctgttcaacggcccggaactgcgcgccttcatcgaccaggccgactacgtggtggtcaacgactacgagtcgaacctgctgcaggagcgcaccgggtgggacgaaaaggagatcgtcagccgggtcaaggcctacatcaccacccgcggcccgaagggcgcggtcatccacaccccggaaaagagctacgacatcccgccggcgcacgagcgccgcgtggtcgacccgaccggctgtggcgacgccttccgcgccggcctgatctacggcatccagaagggctacgactggctgaccatcggccgcatgggcaacctgatgggcgcactgaaggtcgagcacccgggcacgcagaaccagcgcttcaccttcgacgagttcaacgagcagttcaagcagcagttcggttacgcgctgggcgcgtaa

SEQ ID NO: 496976 - DNA, 624 bp, Stenotrophomonas maltophilia
atgatcgcgacgggcagcgcagtgcacgcgttgtccgcgatccggcactgggtcttcgacatggatggcacgctgaccgtcgccgtgcatgatttcgccgcgatccgccgtgcgctgcagatcgcggccgaggaggacatcctggaccatatcgcagcgttgccggatgcgccggcgcaggccaagcgtgagtggctgctggatcacgaacgtgtgctggccgaggaggcgctgccggcgccgggtgcggtgacgctgctgcgtgcgctggcagccgacggttgccggctgggcatcctgacccgcaacgatcatgcgctggcgaagctgacgctggacgcgatcggggtcggggaactgttcgatgatgccgacatcgtcggccgtgatgaagcggtgcccaagccctcgccggatggcctgcagcagcacctgcggcgctggggcattgcagcgagggaggcggtgatggtcggcgaccacgcctacgacctggagtgcggccgcgccgcgggcgcccataccgtgctggtcaacctgccggaaaacccgtggcccggccgtgccgactggcatttcgccgattgccgcgcgctgttggcggcctggcagcagaaggggtag

SEQ ID NO: 496977 - DNA, 732 bp, Stenotrophomonas maltophilia
atgaaacgactgatcctgctcaccgcctgcaccctggccctggccgcctgcagcaaccccgaggaagagcgcaaggcgcaggaagccgccgcggccgccgtgcaggcgcagaaggaagccaaggccgaggacgtggccaagcagtacgacatggccgtggccgcgcaggactgggaacgcgcgcgcctgcatggcgcctcgctgctggaccagtacaaggacaccgccgccgccgagcgcatcgccgcgggcttcgacgaggtcaaggccaagggcgatgccgcgcgcgacctgcgccgcatgcaggcgctgtggcagtacaaccagatcccggtgggcaacaagggcaaccaggtttcggcgcagatctacagcaaggaacgggtggacgtggatggcagcggcgccaagccggtgcagctggtgttccgcgatcacccggagtggaagcggcacgcttacctggtgctgcaggccggcgatttccgctgcccgcagtgcacggtgaaggtgaccgtggacgatggcaagccggtgtcgatggcggcctggcgcccgaagaccgatgaagccatcgccctgttcatcaccgaccagaaggcgttgtggaagctggcgcgcaagggcaagtcgatcagcatcgagttcccggtcaaggctggcggcacgcgtacggccgtgttcgagaccggcggtgtcgacgccagtcgcatgccgcagtggtggcagtga

SEQ ID NO: 496978 - DNA, 1815 bp, Stenotrophomonas maltophilia
gtgaacgccgagaaccgcagccacgacgaaagctcgtatgccgagccggacaaggtcgtcatcaaggacatcgcgctggatctgaagctggacttcgaccagaagcagatcggcggcaccgccacctacaccctggaatggaagcagaaggacgccaggcagctggtgctcgacacccgcgagctgaccgtgtccaaggtcgaggccgtcgccgccgatggcgcgcgcagcccgctgcagttcgcgctggccccggtcgacaaggtgttcggcagcaagctgaccatcgagaccccggaacagccggccaaggtggaagtgacctaccacaccgcaccgaccgcctcgggcctgcagtggctggcgccgtcgatgaccgaaggcaagaagctgcccttcatgttcagccagtcgcaggccatccacgcccgctcctgggtgccgctgcaggacaccccgagcgtgcgtttcacctacagcgcgcacgtggtctcgcgcccggacgtgatggtgctgatgagtgccgacaacgatccgaaggccgcgcgtgacggtgactacaccttcaagatgccgcagccgattccgtcctacctgctggccatcgccgccggcgacctggtgttcgagccgatctccggccgctccggtgtctgggccgagccgaccatggtcaacaaggcggccaaggaattcgaagacaccgagaagatgatcggtgccgccgagaagctgtacggcgaataccgctggggccgctacgacatgctggtgctgccgccgtcgttcccgttcggcggcatggagaatccgcgcctgaccttcgccaccccgaccgtgatcgtcggtgacaagtcgctggtctcgctggtcgcccatgaactggcgcacagctggtcgggcaacctggtgaccaacgccagctggaaggacatctggctcaatgaaggcttcaccacctacgtccagggccgcatcaccgaagccctgtacggcaaggagatggccgagatggagaagcagatcgaccagaccgacctgctggccgaagtgaaggacatgagcccggccgaccaggcgctggcgctgccgccgctgaacgagcgtgaccccgacgaagccctcagccaggtcgcctacgtcaagggttcgtggttcctggaattcctggagcagcgcttcggccgcgagaccttcgatccgttcctgcgcggctggttcgatgaccatgccttccagagcgcgaacaccgaccagttcgtcgcgtacatgaagaagaacctgctgccgaagaatccctcggcagtgaccgaggccgaactgaaggcgtggctggacgagccgggcattccggcgttcgcggccaaggcgcagtcgcgcaacttcagcagcgtcgataccgcgcgcattgccttcgccagcgccggcaccgtgccgagcagccaggtcatcgccgactggagcacgcaggaatgggtgcgcttcatcgacggcctgggtgcgacccagccgctggacaagctggccacgctggacaaggcgttccacttcaccggcaccccgaatggtgagatcgccatgcgctggtacccgctggcgatccgcagcggctacgagcaggccaatgaaggtgctgccgcgttcatcgagcgcgtcggccgtcgcaagctgatcctgccgatctacgccgaactggtgaagaccccgaaggggctggagctggccaagcaggccttcgagaaggccaagccgggctaccacccgatcaccacggcctcggtccaggacatgctggccaaggctgaagccaagtaa

SEQ ID NO: 496979 - DNA, 1326 bp, Stenotrophomonas maltophilia
atgtcggtgccggttccggatctgcctgatcgcacgcccagcacctggacccaggtgccgcagggccaaggcgtggcggtggacgccaaacagtggtggaaagtgttgtccgatccagcgctggatggactggtcgatcaggccatcgccggcaacctcgacctgcagcaggccacgctgcgcctgcaggccgtgcggattgtcgccggcacgtccgactcgcgtttcctgccggaaatctccgccagcgccaagcaggtgcaggacgccgccgctgtcgatacctacttccatgccggcattgaagcgatctgggacctgggcctgttcggcgccgccgagagtgcgcagctgagcgcgcaggcctcggctggcaatgccgaggcgctgcgcaatgccgcgcaggtcgcggtgatcgccgacgtggtgcgcagctatctggatctgaccgtggcgcaggcccagcaggacctgctgggccggcagcagaccgtggatgaccgcggcgaacagttggccctggtgcgccagcgcctgcgcctggatgagcccggcgaacttgatcgcctgcgtgcacgccaggccgccacccgcgccgccatcgcacaggcgcgggagaacggggacaacgcggcccgcgcgctggcattgttgctgggtcgcgatggcccggacccggcctggcgcgcgtaccgaacgccgccgaagctgggcacgttctcgctgcagcaggtacccgccgatctgctgcgccaccgtccgcagatcctgctggccgaatcggaggtgatgcaggccgccgccagcaagggcgcggcgcgcgctgcgatgtatccgcggatcagcctgggtggttcgatcctgtacgcctacaacctcacccagaacgcccgctccaactccgattccagtccctcgatcggcccgtacgtcgatattccgctgtgggactggggccaacgccgtgcgcgtttccatgccgatgagaagcaactggacgccgcgctgctcgggtatcgcaaggccgtgctggaaggcgtgagcgaagtggaaggcgcgctgggcagccttgcacgccaagacagcagcatccagtccctgcgtgcggccaacgatgccgccaaccagcaggtcaagcgccaggcgaggcaggtgcagctgggcctgtccagcgagttcgatgggctggatacgcagcgtgccgcattggcctcgcaggccgacctgatcggtgcgcagggcgcgcgcgtgctggcgtttgcttcgctgtaccgcgcccttggcggcgcaccgctgccggtcgaggctgagggcgaaccgcaatga

SEQ ID NO: 496980 - DNA, 1140 bp, Stenotrophomonas maltophilia
atgatcgcgctggcccgcaagaccctggcctatgagtggcgccggttcctgccggtggtgctggcgatgtgcttcgccggtgtgctgttgatcgtgcaggcggcactggtgctgggcatcttcggtaccgctgcgatctacgtgaaagcgtcctcggccgacatctgggccggtttccccggcacccagagcgtcaattacggccatgcgatcagcgcggacgtcgaaagccacctgcgcatggacccggatgtcacccgcgtcgagccctacgagtgggtcgatggcgaatggcgctcgggtgcgcagggtaccggcaacgtgtcggtgtacctgtccggaatctccaccggcgatgacgcaatgatgttcgcgcgcatcctgcctgccgacctgcgcgcgcagctgcgcgagccgggggcggtgatcgtcgacagcgccgacctggatacgctcggcgtggacctgcagagcaaccgtgcatggatcaatggcaaggcggtgcgtgtggtcgccgcgcaaccgggcctgcgtggcctcggtggcgtcaacgtgctggcctcgctggataccgcgcgtgccatcgccggtaccgatccgcacgagggcagcacctatttcgtggcgggcctgcgctcgccggacctggccgaccgcgtgcgcgaccgcctcgctgcgtcgatgggccaggccacgccggtcgagttctggaccgcgccggcgttcgccagccgttcgcagcagtactggttgttcgacaccggcgccggcatcgcggtgctgttcatggcggtcatcgtctgcttcgtcggcgcggtgatcaccaaccagtcgttcgcctcggtggtggctggttcggtgcgcgagtacgccacgctcaacgcgctcggcgcaggtcgttacgcgctggcacgggtggtattcgagcaggcattgctgatcggtggcgtgggcatgttgctggcagcggcgttcagtaccgtcgtgctgttgatcgcacagtcccagcgcgtgccggtgcagctgacgccgatggtcatcatcggctgcgtggcgctggtcgcggtgatggccatgctgtcgagcatcatggcggtacgcagtgtcgtccgctccgatccatcgttgctgctgcgttga

SEQ ID NO: 496981 - DNA, 729 bp, Stenotrophomonas maltophilia
atgacctccaaacatgccgtcgcccccacgttgcaggccgacgcactggaaaaaggcttcatgtccggcgatgtacaggtgccggtgctgcgcggcctgtcgctggacatctatccgggcgagttgactctggtctcgggcccttcggggtgcggcaagagcacgctgctgtcgctgctgtccggcctctccgcgccggatggcggtcgcgtgcacgcactcggccaggacgtgggccacctgacccgcggcgaggtggagcgcttccgcctgcaccatgtcggcttcgtgttccagggcttcaacctgttcccggcactgactgcgctggagcaggtgcagctgccgctgggctaccgcggcatgcgcaatcgcgaaagcgagccgctggcgcgcaaggcgctggaagaagtgggcctcagccaccgcagccacatgcgcccggcgcagttgtccggcggtgagaagcagcgtgtggccgtcgcccgtgccttcgccaagtcgccgacgctgatcttcgccgacgaacccaccagcgcgctggacgccgagaacggccagcgcgtgatcgacatcctgcaccgctacgcacgtgcgcatggcgccaccgtgctgtgcgtgagccacgatccgcgcctgatccggcatgccgatcgggtgatcgccatggaagacggcatggtccgtgatgaccgccgccagaacgaaaccgtagagtccgccccatga

SEQ ID NO: 496982 - DNA, 915 bp, Stenotrophomonas maltophilia
atgaccaagacgtcgcacctgcttcccctcagcctggtactgtccgtggcactgctgctttgcgcctgttccagggacgcgcccgcccaggcacctgcaggtaaagccagcactgccaccgccggcaaggttgcggtggcgcgcggcatcatcgatgtcgagggtggcctgatcgcgctggcgccgccggtggatggttcgatcaccgccgcgctggtgaaggagggcgccacggtgaagaaggggcagcttctgctgtcgctggacggtgcgctgctgcagcaggaagtggcgatggccaccgctgatctcgcactggccaatgaccgcctgaagggcagccaggcgcagctgcgcgaactggagcgcaatgccacccgcctgtccacgggtgcgagcgaaggcgtgtcgtccaaccagcaggccgatgcggccaagcagcagctggctggcgtacgcgccgatgtcgacgtggccggtgcgcaggtcgacatggcccagcacaagctggaacacgccaggctgaaactgcagcagatgtcgctgagcgcgccggaagccggcaccgtggtcggccaggtgccgggcctcggcgccttcgtgcaggccggcaagccggcgatatcactgctgccggcgcgcccgctgcaggtacgtgccgaactcagcgcggcctacgccgatgccgtgcaggtgggcatgagggccaccgtggtgccagacagcgatggtgccgagaacgccagcacgctgccgcccgcacgcgtggtacgcatcagcccggtgttcgcgcaggctcgcctgcctgaagacgcggggcgtggcgtggccaaggtggtggagtgcgtgctggagttcgatggcgaggccaaggcgcgcttcggccagcatgtgcgggtggagttccggaagtag

SEQ ID NO: 496983 - DNA, 450 bp, Stenotrophomonas maltophilia
atgcctagacgttacatccgcctgttctggctgctggtcgcgctgacctggctggcgctgatcgccgcactggtcaatgccggcttcactccggactactggctgctgcaccacctggaaggcgccgaactgccctacccgaccagcaccgtcatcgtcttcgcgttgctgggcaccgtcgaactggtggtagccgccttgatcgtgcggccgtggagactgaaacgcctgtggctgcgcctgctgatcgccttcgcccttctgctgctgtggtcggtgccgtggatgctgtcggcgatgcatcagccgccggtacaaggcatgcatctgctgtggctgctgctgttggacgtgggcctgctgctggcgctgtgcatggtgtcggcggtgagcgcgtggcgggcgttcaggcgtcgagggcgcgcggatgcgcccccgttgcagcactag

SEQ ID NO: 496984 - DNA, 402 bp, Stenotrophomonas maltophilia
atgttccttcgcggcaaacccttgttgatcgccctgctgctgcatctgctggtggcgctgctgtactgggcactgattccgctgggaatgaactggtatcgcgaccatttcggcttcaccgcccatcgcgacatcggcctgggcatcgcccagttccatctgttctggatgttcattggcgcccaactgctgatcgcagtgttgcggccattgttcgccaagctgctggtgctggcggcgccgctggcgttcgccagctggacgctgatgcacgaccatccgctgcgcctggtgtacttcaccgttggacctggcctgctggcactggccgcaatcgccgcaagcctgcgctattcgtcgcgggcaacctcccgctacaccacggacaccaccgatgcctag

SEQ ID NO: 496985 - DNA, 789 bp, Stenotrophomonas maltophilia
ttgcggcagggtttcggtagcgcggaaggcgaagccgggaacgacgacgaaggcgaggacgccgagcaactcaaggccgcgagcctgtccgaccggctggcgcagcgtttgagcgcgcatcgcaccgccgcgctgcaaatcgaagtggcccggcatccgcaagtcgcgctggccgcgctggcgcatggcatggtgcaaaccgtcttgcagggcagccactacggccacgacttgccgctgggcgtcagcctgaaagtgcaagaccggctggaaggcatggcccccgactggcccgagtcgcccgccgccgtggccctgcgcgagttgcagcaggtcgaaggtgaagcgctgccgcaggacagcgccgaactgttcgccgcgctgctggcgatggagcaaagcgagctggtgcggctgctggcggtatgcgtggcggcgaccgtggacgtggtgacgcctcgcgccacggcgcaccagccgggcgcggaactggcgcaggccgtggggctggacattgccgcatggtggcagcccaccgctgacgggtatttccagcatgtgccgaaggccgcgattctggaagccgtgggcgagttcgcaccgtcgcacgctgcccgactggcgaagttgaagaaggccgacattgccagcgaagccgaacggctggccgatagtacgggctggatgcccgccgtgttcaagagcggacacgacacggagccgcaggacggcgcggaggacttggaagatgctgccgacgtagtggaagcccacgcgctcgccgcctga

SEQ ID NO: 496986 - DNA, 1023 bp, Stenotrophomonas maltophilia
atgccatatcccgttgtgccgtgggagcacgttgcacccaattaccatcgaggtacgattctgctgggcaatggggcgagcattgctgtttcaccgagttttggctatggctcgttgctggatcatgcccagcgagcaggcttactcggagctgatgtacagcaactctttggctttttccgaacatccgatttcgagttgatccttcgactggtctggcaagcgtcaaacgtcaataggtcactacagataccagacaatcgcacgcatcaagcctacctgaatgtcagagagtgtttgattcaagccgttcgcgacgtgcatcctgcatatgatctagtgagtggtcatttgccaagcatgtaccagttcctcagagggttcgatacggtaatttccttgaactatgacttgctggtctattggacgatgacctatggactcgacattcaggacggacatctattcaaggattgcttcctggggaatggcatgttcgatgatgcttggcagagatttcgagccccctatagggaacggactaacaccttggtgttttatccgcatggaagtctggctctgtgccgaactgcagtggagcaggagttcaagattcacaacgctggggaaggtttgctggaggccatccttgcggagtggcgcagtgagcgcgttgtgccgctgtttgtcagcgaagggacgatgctgcagaaagtttcctctattcagaatagttattacctttctacggtgtaccgggaggtacttacgtcacagcggttcacattgacgttattcggctggggactcggggagcacgatcggcatttattgcgacggatgcgcggaaccggcatccaacgggtggcggtctccgtttttggtggcaatcaggtctattgcaactatgcctaccaagtcattcaggatgatttagggcctgtccatgtggacttctttgatagtgaaagccctggatgctggattcatgcggtgccgccggcgttgccaggacttggctaa

SEQ ID NO: 496987 - DNA, 315 bp, Stenotrophomonas maltophilia
atggctaacatcggcaccttcaccgcagagaaagacggcttcaccggcacgcttcgcaccctgacgctcaacgtcaaggtcaagctggttcccaacgacaagggcgacagcgagaacgcccccgacttccaccttcaggcggccggccacgagatcggcgcggcgtggaagaagaccagtgaggccgggcgggattacctgtccgtgagcatcgacgacccttcgttcccggcgacggtctatgcccgcctgatcgagaacgaggacggcacgcacgacctgatttggtcgcgcagcaagcccaaggcagcctga

SEQ ID NO: 496988 - DNA, 294 bp, Stenotrophomonas maltophilia
atgcagaagcgatccgtacaacctggccgaccggccggtgccaccaccttcgatgccgagttggcgcaagccttcggcgcggcggtgcgtgcgctgcggatggaacgcgggattgcgcaggaatcgctggccaacctggctggtatcgagcgttcccatatgggcaaggtcgagcgtggcgagcacatgcccacgctggcaatcatcttcaagatcgccagcgcgcttagttgcagtaccgccgtgctgatggccgcgacggaaagccagctcgcgtcagtgtccgagacgtag

SEQ ID NO: 496989 - DNA, 351 bp, Stenotrophomonas maltophilia
atgacccagccgctcgtcaccggtgaacagcaagcgcaactgcttgccgtcggcgcggcacgcgccgctggccgaagcatcgacccgatgccggcggtgcgactgttcacccctgacgcgcacgccacctggctgctggccgcgctcgacccggccgatggcgatacggcatgggggctgatcgacctgggaataggcatgcccggcctgggccatgtgaagctgtccgatctggcgtccatcgtcgggccgcgcaagcagccggtgatgcgcgatcgctacttccagcccgtgcggctgctgtcggagtacctgcgactggccgaggaaaacggctcgatcaccgactga

SEQ ID NO: 496990 - DNA, 798 bp, Stenotrophomonas maltophilia
atggctgacccgagcgccgaacactggtatccgaccgccgcgtatctctacacgctgcatctcgacggccccgcgctggcgtgggaatacctgcgccgtcaccccgactaccgccgcgactggctgcgccggcgccgccggccagaggccgccgcgcgctggggattgcgcctgctggaagatcccgccctggatgcgcgcgacgcgcatccggcctggttccccgatcacgatgcggtggtgcagctctacccggatgccgacccgccgcccgacgcggtggccttcgcgttctggcgcctccccggccagaagcacctgatccacgatggcaggcgcctggtgctgctgacacgctggccgggctgctgcctgcggctggtgatcgctcccggcctggaggatggcatggcctacgcctatgccatccgcgcctgtgccgcatcctgcggacgctatcaggcgctggcggccgaactggacaagctggccgccgctggcgatgcagcgccagcgggaacggcgcggtcgcggccggcacccgctgcgttgctggagttgaacacgctccaggcgctcgacggcaccctcgcgggcgcgtctctgcgcgacgtggccgaagggctgttcggcgtcgatgccgtcgccgacgactggtacgccgacagcgccttgcgcgcccgcgttcgccggctggtacggcggggcgatgcactgatgcgcggcggctatcgtcgccttgcacaacttccgccgctcagggagggacgttctgtatcccctgcaaaacgtccctga

SEQ ID NO: 496991 - DNA, 441 bp, Stenotrophomonas maltophilia
gtggtggcgctgctgctgggcctgctgccgttgccggcgctgctgcagccgctgcgcccgtactggctggcgctggtgctggcgtactgggtcatcgaagctcccgaacgcgtcggcctgggcatcgccttcgccagcggcgtggttgccgacctgttgtacggcggcgtgctgggcgaacaggcgctgcggctggtgatgctggccttcatcctgcagcgcttccgcgcccgcatccgcttcttcccgatgtcccagcagatgctggccatcggcggcctgctgttcaacgaccgcatcgtcagcgcgctggtccacatcgtggtggatgagccgaccctgccgtggtcgtactggtgggcaccgctgctgggcatgggcctgtggccgctggtgttcgtgctgctggacgcggtgcgcttcggcaagcgcgggcgctga

SEQ ID NO: 496992 - DNA, 2076 bp, Stenotrophomonas maltophilia
atgatcccgcgccgccaggtcaagaacccgcacgccgaagccgaacagttccgccgccgcgcggcgctgggcttcctgggcgtgctggtctgcctgctgggcctgggcggctggtacttcaagctgcaggtgctggaccacgacgtctatgccacgcgctcggaagccaaccgcatcaagccgcggccggtggtgcccgggcgcggcatgatctacgaccgcaatggccgcctgctggccgagaacgtgccggccttccgcctggacgtgaccccggacaaggtcaaggacatggacgccaccctggacgggctggcgaagatcatcaacatcagcccggaagagctggaagcgttcaacaagtcgcgcaaggcgcgccgcaagttcctgccggtcacgctgaagctgcgcatgagcgacgaggagatggcgcgcttcgcggtcgaccgctggcgcttccccggcgtcgagctggagccctacctgacccgccgctacccctacggcgatctgttcgcgcacatcatcggctacgttggccgcgttgatgacaaggatctggagatcctcggcgaaggcaatgccgcgctgacccacatcggcaagtccggcctggagcgttactacgagcagcagctgcgcggcaaggtcggctacgagcaggtcgagaccaacgtgcaggggcgcgcgatccgcaccatcggccgcgtcgccgcgcagtccggcgccgacctgcggctgtcgatcgacgccgacctgcagcgcgccatggtggccgccttcggcgaccaggaaggctcggcggtggcgatggacccgcgcaccggcgaagtgctggcgatggtcagcctgccgtcctacgaccccaacctgttcgtcaacggcatctcgcatgccgacttcaaggcgctgaacgaaaacccgtcgcggccgcagttcaaccgcctggtgctcggtggcgtcgcccccggttccacgctgaagccgctgatcggcctggccggcctggattcgggcgttcgacgcccggaagacaaggtgctgtccaccggcatgttctatctgccgggcacttcccgcggctggggtgacgcccaccgtggcggccatggctggaccgacctgcgcaagtccatcgccgaatcggtcaacacctactactacaagctggcgctggacctgggcatcgagcgcttcgaccattacatggagtactacggcttcggccagccgaccggcatcgacctcaccggcgagatcggcggcatcctgccgtcgccggcctacaagcggaagagccgcaaggaagcctggtaccccggtgatacggtcaacatcagcatcggccagggtgactggaaggtcaccccgctgcagctggcgcgcggcgtcagcggtctggccgatggccagctgcgcaccccgcacctggtgatccagcagcgcgagggtttcgacagcgactggtcggcgatgccggctggcgagagcaagccggtcagccccaaccccgccaacgtgcaggccgtgcgcgagggcatgatggcgaccatgcggcccggcggcagcggctggcgcgtggcggtgggtgcgccgtacgtgatggccggcaagaccggtaccgcgcaggtcatcagccgaaagggcacggcggcggtgaatccgaagagcctgccgatgcacctgcgccaccgcgcgctgttcgtcggcttcgcaccggtggaaaacccggtgatcgcgatcgcggtggccgtggaaggcggcggctatggtggttcggcggccgcgccgatcgcacgcaaggtgttcgacgcctacctgctgggcaagatgcccgaaggcatgcagccactggacagcgagcgcggcaccaccgccatcggcgccaccgcgttcgacaacgaagatgccggcgcgcgccaggctggcgacctcgccgcggcgcagctgggtgaacatccggcgctggtcggcgtgccggcgccggaacctgtacccgcaccgcagccgggtacgccggccgccgccgtgttgcccgccacgccacgcccgaccgtcgcggagcccgtacgatga

SEQ ID NO: 496993 - DNA, 1113 bp, Stenotrophomonas maltophilia
atgagagtgttcctgcgctgggccggcgacatgctgcgccgcttcttcagcacgctggactgggtgctgtgcctggccctggggacgctgatggtgatcggcctggccaccctgaagagcgccggtggcgacagcctggtgatggcccagggcgcgcgcttcgccgtgggcatggccgcgctgtggggcatctcgcgggtgccgatcctgcgcatccgctcggctacgccgatgatctacgcgatctcgatgatcccgttgctggcggtgttcgtgctgggcaccggcaagtacggccggcagtggctggacctgaagttcttctacctgcagccggccgagctgctgaaggtcagcctgccgatgatggtggcctggtacctgcacaagatgccgctgccgccgcgcttcaacaccgtgctcgtggccctggtcatcatcggcgtgcccactggcctggtgatgctgcagccggacttcggtactggtgtgctgatcgctgccagtggcgtgttcgtgctgttgttggccggcctgccgtggtggtgggtcggcctgggtgtgggtggcgtggccgcggtcgcgccggtggcctggttctggttgctgcggccgtaccagaaggaccgcatcatgatgttcctggacccggagatggatgcgctgggggccgggtggaacatcatccagtcgaagatcgcgatcggttccggcggcttcgatggcaagggctggggcgagggctcgcagtcgcacctgaacttcattcccgaacagaccaccgacttcgcgttctcggtgctgagcgaggagttcggctggatcggcgtggccaccgtgctggcgctgtacctggtggtgatcgggcgctgcctgtggatcgccagccagtcgcgcgattcgtattcgcgcctgctggccggcgccaccggcctggcgttcttcgtctatgtgctggtgaacggcgggatgatttccggcctgctgccggtggtgggcgtgccgatgccgctgatcagctacggcggtacctcggcggtgtcattgctggccggcttcggtctggtgatggccgtgcgcagtcacaacccggtgcacggcggctacggctga

SEQ ID NO: 496994 - DNA, 1104 bp, Stenotrophomonas maltophilia
gtgctgtgcgtggaatggaaacgactgtttggcggctgccgtgaggcagtgcgcacgatcgatctgccgttgctggtcgcattgctgatcctgatgggcgcgggcctggcggtgctgcacagtgtgtccgggccggtggccgggcaggcggcgcgctttgcgggtggactgctggcgatgtggctgctgtcacgtgtttcgctgctgcgcctgcgcgcgtggacaccagcgttgtacgcgctgtcgatgctgccgctgatggcggtgtatgtgatcggcaccggcaaatatgggcagcgctggctcaacctcggcgtgttctacctgcaaccgtcggagctgctcaagctcagcctgccgttgatgatggcttggtacctgcaccggcaaccgctgccgccgtcgccgcgcacggtactgaccgccgcggtgctgatcggcgcgccggcggtgttgatcctgatgcagcccaacctcggcaccgccacgctggtcaccgccagcggcgtgttcgcgttgttgctggcgggcctgcactggggctgggtggcgaccggcgcggcggggctggcagtggccgcgccgctggcgtggttcggtctgctgcgtcagtaccagaaggatcgtgtgttgaccttcctcgacccggcggccgaccccctgggcaccggctggaacatcctgcagtcacgcatcgcgatcggctccgggggatggcagggacgcggctgggggcagggcacccaggccacgctggatttcctccccgaatacaccaccgacttcgcgttttcggtgctggccgaagagttcggctggatcggcgtggcgacgctgttcgcgctgtacctgttcgtggtcgggcgttgcctgtggattgccgtgcacgcgcgcgacacgcatgcacggttgctggccggcagcctggggctggcgttcttcgtctacgtgctggtgaacggcggaatgatttccggcctgctgccggtggtgggcattccgatgccgctgatcagctacggcgggacatcggcggtttcgctgttggccggcatcgggttggtgatggcggtacgcgggcaccggcccgtgcacgggggatag

SEQ ID NO: 496995 - DNA, 771 bp, Stenotrophomonas maltophilia; identical to SEQ ID NO: 430753

SEQ ID NO: 496996 - DNA, 318 bp, Stenotrophomonas maltophilia; identical to SEQ ID NO: 430754

SEQ ID NO: 496997 - DNA, 294 bp, Stenotrophomonas maltophilia
gtggcagcgaagaactcattggcagcggcgattcggacggtaaggaaggcgcgtggtttgagccaggaagcgttctccaacgtgtccagtcgcacctacatgagcacgctggagcgcgacctgaaaagcccaaccatccagaagctggccgatctgtgcgaggtcatggaagtgcatccgctcacgctgctcacattggcttatgccggtgacagcacccgcgaagctgatgaattgctggcacaggtgcgccaggaactcagggcgatattggaagagcccgacacgccgtag

SEQ ID NO: 496998 - DNA, 315 bp, Stenotrophomonas maltophilia; identical to SEQ ID NO: 117487

SEQ ID NO: 496999 - DNA, 210 bp, Stenotrophomonas maltophilia; identical to SEQ ID NO: 117485

SEQ ID NO: 497000 - DNA, 735 bp, Stenotrophomonas maltophilia
atgtccgaccgactggcgcagcggttgagcgcgcaccgtaccgccgcgctgcaaatcgaagtggcccggcatccgcaagccgcgctggccgccgtggtgcatggcatggtgcagaccgtcttgcaggaaagccactacggccacgacctgccgctgggcgtgcgcctcacggtgcaagaccggctggaaggcatggccccggactggccggaatcacccgccgccgtggcgctgcgcgaactgcaacaggtggcaggcgaaaccttgccggaggacagcgccgaactgttcgccgcgctgctggcgaaatcacaggatgaactggtgcggctgctggccgtgtgcttagcttccacggtggacgtggtgacgcctcgcgccacgccgcaccagcccggcgcggaactggcgcaggccgtggggctggatatggccgcgtggtggcagcccaccaatgagggttacttccggcatgtgccgaaggccgcgattctggaagccgttggcgggttcgcgccctcgcacgtcacccgactggcgaagttgaagaagggcgacattgccagcgaagccgaacggctcgccgctggcaccggctggatgcccgccatcttccgcaccgaaggcccgcagcaggccgggcaggacgcgccggcggatggcgaagccgaagcacaggaagaagcggccgccgtggcggatgtccagccgcaggccgaggctttggccgcgtga

SEQ ID NO: 497001 - DNA, 1251 bp, Stenotrophomonas maltophilia
gtgcatgcgcacggtcaggtcgccctgcgacagcgcggccagcaggccggagatctgctcgatgctgccggcattggcgtccagcaggccgttgatctgctgggccagctgcaggaagaagccttccttgtcgctggcatcgatgcggccggacaggtcgccagcggcggcctgggcgatcacgcgggccacttcggcttcgacctgcgcttcctgggtacggtcgcgccattccaccacgtagccgacggtgtcgccgccttcattgcggatggtcgagaccacctgggcgaactgggcatcgccgtactgcatcgggcgacgggcgacgccgtgtgccttcaggttgcccagcagggtctggtccatctcgccgcggtgttcgagcacggtgaccggcttgccgatcagcgaagcctgcgcatcgaagtccggcaggtcgcggcgcagttcgtcctggtactggctcagggtctgctgcagggcgcggttgctgtagacgatggtgttgctggtgtcggtcaggtagacgccggtcgagctgtagtccagcgcggtacggatgcgcaggttctcgcgggcgatggcctggtcggtctcgatgcgctcgcgcaggtcgcgctgcatgcgctgcatggcctgcatcagttcgcccacttcatcctggcggctgacgtcgatgtggccatcgagcttgccgccggccacgtcgttggccaccgagacggcgccacgcacgctgccgaccagggcgcgggcaaacagccacaccagcaccaggccgagcgcggcgccgcccagcagcgcgatcacggtcagcacggccgaggcggagtaggtggatgcggcctcttcgcgcgaggcgcgggcgaggcggttgtcttcggcgatcagcgcctccagcgcggaggcggccttgcggtgcttggtgcgggtttcgccgacgaaggtatcgatggcgtcgtccggcaggtccagttccagcatctcggtgacgctgtcataggatgccagggcgtccttccattccttggcgaaggcgtcgaacagcttcttctgctgcgggttgtcgaccagcttcggatactccttgatcgacttgtccatgctggcgcgcaggtcgacaccctgcttgcgcgcatcggacttgacgtcatcgctggcgcggatcagctgctggtaggcggcattgcggtactcgcccagcatgccgcgcatctcgccggccatgcggatgctctccatgcgtga

SEQ ID NO: 497002 - DNA, 384 bp, Stenotrophomonas maltophilia
atgaagtccctgtttgcgttcgtctcggccgctgtcctggccaccaccgccgcctccgctttcgcccagtcggccgacatgatcccgccggaaatggcgccgcgttcggtcggcaaggacggcatggtctgtggcaaggtcgaaaaggcccgttacgcagaaggctccgaaggccagccgaccttcctgtacatgggcggcgccttcccgcgccacaccttctcggcgcgtatcgccggcgagaaccgcggcaagttctccttcccgctggaaaccctggaaggcaagaccgtgtgcgtgatcggcaagatccagcgcgacgcctcgcgtgcggaaatcgaagtcagctcgccggccgggctgaagctggccaacatcaagtaa

SEQ ID NO: 497003 - DNA, 492 bp, Stenotrophomonas maltophilia
atgaacgacaagaccagctccgccgccagcgccggtggcgaattcctcagcttcacccttggtgatgagcactacggcgtggacatcctcaaggtgcaggaaatccgcggctacgacgccgtcacccgcgtgccggacgccccggactacatcaagggcgtgatcaacctgcgcggcaccatcgtcccggtcatcgacctgcgcctgaagctgcgcctggacaacgcccgctacgatgccttcaccgtgatgatcgtgctgaacgtggaagaccgcgtggtcggcatcgtcgtcgacagcgtctccgacgtgatcccgctgtcggccgagcagatccgcccgaccccggaattcggcgccgccgtcgacacccgcttcatctccggcatcggtacccacgacgatcgcatgctgatcctgctggacatcgagaccctgctcgacagcgccgacatgggccaggccaacctcgccgaagacgtcgctgcctga

SEQ ID NO: 497004 - DNA, 774 bp, Stenotrophomonas maltophilia
atgtccgacggcaacgacactgcagtgcatgatgtccacgcggccgatgccgcggacgaacgattcctggtccgcaacccgcgccagctgcgccagctgctgcgctcgctgatcgaccagcgatcgctgatcaacgcccatatcgacggccgcgaccgttccttcccgaccgccctgctcgacctcgacgaagacgaggacttcctgctgctcgatggcagcccgcaggaagcctccaaccgcgccgccgagcaggccgatcacctgctgtgcttcgcccagctcgaacgcgtgctggtacggttccggctgcacgaactgcagcgcgtggacaacgacggccatgtggccttccgtgcgccgctgcctgacgaactggtgcacctgcagcgccgcgagctgtaccggctggagacgccagtcactgattcaccgcagctgctgctgccacccggcgaagcacgggccgaagcgctgtcgatgcgggtggtggacatcagcggtggcggcctggccgtggtggtgcccaatgactgcgcggtgtttggtctgcagaagcgctatccggcacggctgtcgctgccggacggccccgacctggatatcgaactggtggtctgcaacctgctgccgcagcgtcagcccaatggcatcgaggtcaagcgcgtgggcatgcgctttgaaagcctgccacgcggcgccgacagcgccatccagcgctacatcttccgcatcgaccgccagcgcaaggcccgccgcaacggcgagctctga

SEQ ID NO: 497005 - DNA, 279 bp, Stenotrophomonas maltophilia
atggacgaaaccacccagcagaatgctgcgctggtggaagaagccactgctgcggcgcgcgcgatggaagaccaggccgtgcagctgggtgaagccgtggcccgcttccggctggcatcgcagggcacgatggccatcccggcacgcccgctggccacaccggtaccgcgacagctcgcagccgccgcgcctgcggcaaagccggccccggcacgtgcgctgcgcacggcaacggcccagccggcgctggccgcggacggcgactggcaggaattctga

SEQ ID NO: 497006 - DNA, 714 bp, Stenotrophomonas maltophilia
atgaaactgcttgcctttgaaaccgccaccgaagcctgttccgttgccctgcatgtcgatgggcaggtgctggaacgcttcgagatcgccccgcgccggcacgccgagttgagcctgccgtgggccgaggcgctgctggccgacgccggcatcagccgtcgccagcttgatggcatcgccctcagtcgcggtccgggtgcgttcacgggcgtgcgcctggcgattgccattgcccagggcatcgcactggcactggaccgcccgctgctgccggtctcgacgctgcaggtgttggcgctgcgcgcaccggcggaagaaacgcagatcctgtcggcgatcgatgcgcggatgggcgaactctacgtcgcccgcttcgagcgcgtggacagcctgccggtcgcgcgcgatgccgagcgcgtctgcgcgccggcagcggtggcgctgccggaagggctgtcggcctacggtgtcggtaccgggttcgccgcagccgagggtgcgctggtcgcgcagctcggtacaggtttgcgcggattcgacgccacggcattgccgcgtgcgtcggacgtgctcgcactggcggtgccggcgttcgcgcgcggcgaagccattgcaccggagaaggtcgagccggcctacctgcgcgacaacgtggcactgaccctggtcgagcagcaggccgcgcgcgaggcgaaggcgaaggccaacggctga

SEQ ID NO: 497007 - DNA, 2049 bp, Stenotrophomonas maltophilia
atgtccgaccttgtccatgccagccgcgaagccctcagcgaaggcggcgcgctcgcctcgcatctggatgcctttgtcccgcgtccggcacagctgcacctgaccgacgccatcgccgaagcgctgcagcagcgcgacctgctgctggccgaggccggtacaggcaccggcaagaccttcgcctatctggtgccggtgctgctgtccgggctgcgcaccatcatctccaccggtacccgcgcgttgcaggaccagctctaccaccgcgatctgccgcgcgtgcgccaggcactgggcgttggcctgcgcagcgcgctgctgaaggggcgcgcgaattacctgtgccgctaccgcctgcagcaggcgcggggcgaaccgcgtttttccagcccggagcaggctgcgcagttccagcgcatcctggcctggtccggccgttcggagttcggtgacatcgccgaactggaaggcctggccgatgactcgccgcttctgccgatggtcacttccacggtcgacaactgcctgggtaccgattgcccgttctgggacgactgcttcgtggtgcgcgcgcgccaacgtgcgcaggctgccgacgtggtggtggtcaaccaccacctgctgctggccgacctggcactgaagcaggacggcttcggtgagttgctgccgggggcgcaggcctttgtcatcgacgaggcgcatcagctgcccgagttggccgcgcagtttttcggcgaaggcttcggcatgcgcccgtggcaggaactcggccgcgactgcctggccgaggcgcgcggcgtaggcggcgcgcagtcggccctgcaggaaccggtcgaccagttgcagcaggcgttgctggcgctgcgctcggcgatggaggggctgccgcaacggggtacgcagtggcgtgcgctggcgatgccacaggtgcgcgatggattcgatacggtgatggccggcctggtgacgctggagcaggcactgcaaccgctgcgcgaggcggcggcgggtctggatgcctgtcatgcgcgggcacgcgaggcggtgtcgcggctgcagcgctggctgggcgatgatgagcccaccctcgatttcgataccgatccggcggagaccccccgtgccgccgatgtgctctggtatgagctcaccccgcgtggtttccgctgccagcgcacgccgatggatgtgtccggcccgctccgcgagcatcgcgagcgcagccgcgcggcatggatcttcacctcggccacgctgaccgtgggcggtggcttcgaccacatcgccacgcgcctgggcctggacgatccgcacacgctggtccagccgagcccgttcaactggcccgagcaggcgttgtgctacctgcccgaaggcctgcccgatccggcggcgcgcgggtttggcaccgcgctgatccagaccttgcggccggtgttgcaggcttcgcagggcagggccttcctgttgttcgcctcgcaccgtgcattgcgcgaggccgccgaggcactgcgcgacgggccgtggccgttgttcgtgcagggcgaggcgccacgcgcggcgctgctgcagcgtttccgcgaatcgggcaatggcgtgctgctgggctcggccagtttccgcgagggcgtggacgtggtcggcgaagcgctgagcgtggtgatgatcgacaagctgccgttcgcggcaccggatgacccggtatacgaggcgcggctggaggcgatccgcagccaggggggcaacccgttccgcgacgagcagctgccgcaggcggtgatcgccctgaagcagggcgttggccgcctgatccgcagcgaaagcgaccggggcgtgctggtcctgtgcgatccgcgcctgctcaaccgtggctatggccgggtctttcttgagtcgctgccgccgttccggcgcacccgcagcctggccgatgtgcaggccttctttaggccacaatggctgcccgtggccgatgatgcggctgccccggccgccgttgcggcgggcccggagcctgctcccggtgccacgttccccttgttctga

SEQ ID NO: 497008 - DNA, 252 bp, Stenotrophomonas maltophilia
atgacgactaaaacgccaagccaacgcatagccctgctcgaagcgaagttagcgagagccaaggccgacgaacgcaagcaacgaacacggcggctcatcgaggtgggcgcaatgctggaaccactcggcgaacgggtagccgctctgaccgctgaacaacggaaatatttcatcagtcgagtgctggccaactgggatgccttgatggggaccaagggaagccatcaaggtcagcaccagggcgatgcgtaa

SEQ ID NO: 497009 - DNA, 837 bp, Stenotrophomonas maltophilia
atgtcaccaccctaccaacccgccctgtttgagtccagccttccaaaatggctggcctgcaccgatgaactggctgccggcatccagcaccacccccgccagaaggccctcaaacgggcctacatcgaccccaacccctcggcgctggtttgggccatggtgttcgacgtggaccgcccagaggccgctacagcgtggcaggacgcccctacggagtgccctcggcccaactgggtcacccagaacccccggaacggtcatgcgcatctgggctacgtgctggcctctccggtgtccaggacactgaaagcacgggcgacccctcaacggttcttggctcgcattcagcacggcctgaccatggccctcgatgcggacagggcctacacccaccggctgaccaagacccccgaccatcccacctggcgcacattttgggagcgccctgacccctacgagctgggggagttacgtgactaccttggcgaccgtctgccgctgcgtatcgcacgactggaagcggtgggggaggggaggaacgtcacgctgttcgatggcctgcggaagtgggcatatcgagcacggttgggctactcggattggcacctgtgggagcgtgcttgtcgctcccacgctgacgccttaaacgcctttgccagcccactcacaacacgagaagcgcatcaggtggccaagagcgttgccaagtggacgtggaccaacatcacgccaaccgctttttcaaaaatacaggcagaaagaggaagccagaacggagcgaataaaaaaatcgctgcgatggatttcaccgctgaaattgtgaggtatgcccgatga

SEQ ID NO: 497010 - DNA, 303 bp, Stenotrophomonas maltophilia
atgatgcccgttcgccaaaaacgaaaaaaaaccgccaaggaagtcgccaaacattttggcgtatcggaacgcactgtccgcaaccacatggcggaggaacgggacacctacgaagcccgagcagactaccggcgcaatctggccgggaccatgcgagcgcaagggaaatcatgggctgaaatcgccgcggcggttgggggcagcgaatggtctgcccgtgcgttggtgaggcgctatcgcacctcactggcggagcctaccggccccgccccatcccccaccccttgcggggcggggttgtga

SEQ ID NO: 497011 - DNA, 645 bp, Stenotrophomonas maltophilia
gtgtctggctcgctgacgcttgcccccgacaacgctccggcttgggcatcggacccggctcagttgtgggccaatgtggagaccatcgagaagcgcaaagacgctcaactttgccgcgagttcgacattgccctgccccgcgaactgaccccccagcagtgtgccacgctggcccgtgcgttcgtccaaaaagagttcgttgaccggggcatgtgtgcaacgattgctttccatcacatcggtggagacaacccccatttccacctgatgaccacgatgcgagacattgaccaggacgggttcaaaaataaaaaccgcgactggaatgacaagcaatacctagaccattggcgagccgaatgggcacgctatgccaaccatgcgttgaccttggccaactcaccagcacgcattgaccaccgctcgttgaaggcccaaggcatcgaccgcgaaccgacccaacatcaagggccgaaggcgttcgccatgcaggcccgtggtgtggttgttgaccggttccgcagggtgatggtggacctcgtaaccatgctcaaagcccggagggtggcccgtcagggcctttccccttcccctcccatcacaaccccgccccgcaaggggtgggggatggggcggggccggtag

SEQ ID NO: 497012 - DNA, 1116 bp, Stenotrophomonas maltophilia
atggatgggttcacggcgtgtcctgcctgcccaccccgacccggccaacccgtagctacccatcgccatgacctgccgttgccgttgccgttgccgttgcttcaaaagcctgccgcaggcagcgccgcagccgccgctgcaaggaaacctgaatacgttcggacaccgcacctcaatcccccgcccgcgcggccgataacggggttgtcacggcgtatcccgccgctgaccggcacggcgccgcccgcccgcttcgacctggtcctgctcgatgaatctcctgcatcgctggcaacactacttccgcaatctttccgtccggcgcaagctcaacctgctgacgctgctcatcgcgctcggcgtgatcgcgctctcggtgatcgccgcccgcatgcagtacctggacctgaccgaaacccgcaagagcgcgctgaagacccaggtcgaactgagctacggcatcctgcagcactaccaccgcctggccggtaccggcgagctcagcgaagaggccgccaagagcgccgcgctgcaggcgctggaggtcatgcgcgccgggaacgatacctactacttcaacatctacgacaccggctaccgcctgctgatgcacccgttccgcaaggacctggtcggcaaggacatgaaggacttccgcaccgacgacggcgtccggatctactacgaccaggtcgaagcggctcgcgccggcggcggcttcgtcaactaccgctgggccaagccgggcagcaagggcgaggtcgagaaggtcgcctatgccggcctgttcgcgccctggaactgggtggtcagcagcggcgtctacatggacgacgtgcagaaacaggcgctggtgttcaccgccatcatggcggtctctggtggcgtactggtgctgatcgtgctggccctgagctgggtcatcggcaaccgcatcgccgtgccgctgaagcaggccaccgccgtggccgaaggcatcgccggcggcaagctggacagccacatcggcccgcagccgcacgacgaaaccggccgcctgctggaggccatggccggcatgcagcagcagctgcatgcggtcatcaccggccagcgcgaaatggcgcgccgtcatga

SEQ ID NO: 497013 - DNA, 621 bp, Stenotrophomonas maltophilia
atgcgcctgttcacccgtgtcctgcccctgatgctgctggcctccctgctgtccggctgcggctacaacgccatccagcagaaggatgaggcggtcaaggccagctggtctgaggtgctcaaccagtacaagcgccgcgccgatctggtgcccaacctggtgcagacggtgaagggctttgccagccaggaagagcgtgtcctgaccgaagtcaccaacgcccgttcgcgcgtcggccagatcaacgtcaacgccgacgacgaagcctcgctcaagcagttccagcaggcccagggtgaactcggcagcgcactgtcgcggctgctggtggtcaccgagaactacccggtgctgaagtccgaccagaacttccgcgacctgcaggcccagctggaaggcaccgaaaaccgcatcacggttgcgcgcggccgctacatccagcaggtgcaggactacaacacctacatccgttcgttcccccaggtgatcaccgccaagatcttcggctacaagaccaagccgaacttcacggtggacaacgaagcgcagatttccaacgcgccagcggtcgatttcggcaacgcgccgcagcagcagccggcgccgcagccgggccattga

SEQ ID NO: 497014 - DNA, 759 bp, Stenotrophomonas maltophilia
atgtccggcgcaacgcagaccggccgcacgatcaacggccacacctataccgatgcgcccgtggacgtgaagctcgggccgaacactttccgcattccggccaactacctggacagccagatcgcaccgtggcccggcgagggcgtgacgctggtcatcgagtggccggacatgaagccgacgccgccgggtgcccgggcgaatccgcgtacgaatgatttccggaaggaaattgctgtggcgatcgactacatcgatcgtgcgccaatcgaaacatcattggagcgattgtcctccaaccaggcatccgccgaggaaggatcggtggagcgaggggatcctcgggatcgactcgatctgcgtattgcgcggcccgacgtcatgggactgacgccttacgccattgatgaaacgaggatggggattttctcgaaggaatacgaggcacgctatggaaaaccgcccacccgtaatcctgcctatgaagatgactggtacatcgcgcgcgctcccaacggcagcctgaccacattcatcaaatgcgaaagcacggcgtttcggggggatggcgttcgcctgcagggcgatcaggtcatcagtgagcaagggcaagccgctgcggggtgcttccactatttctcggatgtggagaacaagctttccatctcgctgaactacaagcgggccttcctggcggactggaagcggatggaagatgcggtgcgggatcttctcgcgcgctcccgcgtccggcagtga

SEQ ID NO: 497015 - DNA, 207 bp, Stenotrophomonas maltophilia
atgccgcgccgcttcgacgaccgccgccccgacctgtggagcgtgttcaaccgcacccaagaaaacctgacccaaggcgggctgcgtggccgcagcgccaacgggcgccgacagcaaacccgcccggtgcagggcatcgaccaaaacatccgactgaatcgcgccctctggctgctggccgatggcatgcgccagttgaaagcctga

SEQ ID NO: 497016 - DNA, 1323 bp, Stenotrophomonas maltophilia
atgaatcaaggcttcgccgctgcggtcgagggtgacgattgcaccggccacggcgcgcacgtccggggcgtagccctgcaaggcttcctccacggcttgcagttccccggcgacctgttcgcggcgcggttccagcgcttcggtcttgtcctcgtcctcggcgtcgtaggcttcttccagttcggcgtcgatcttgtcgaggcgggtttgcagcgatgcgatgcggcgggcttcgcgggcgctcggttcgcggcgctggcgcggtgcgttctggaacgcctgccgctctgcatagctcatgtgcggcacggcttcgacccacgcccaaccctcggtgcgcacgtccccggccagcgcatccagcttgtcgcgcaccagcgtttccagcagcgcggcgtcggtcagataggttccggcatcgccttccgcgaacaggtcgcggcggatgccgccgcccgccgccgtgtaggcgtccagcccggcgaagcgcaccagcggatgcgtggcgtcgatttcgcgctcggtcaggcgttcgcgcagcgcggacgcaccacgctgccattcgggcgcatcgtagaacgcggcttcctgcgcggcgtggtcgtcggtgatggtcagggccatcaactgttccagcgtgacggctgcggcccggtagtcggccagcaggcgcggcgagacgttggccagcttcaagcggcgctgcaccaccagcggggacacgccgaagtcggcggcaatgtcctcgatgggccggccttccttgaccagcgcggcgaacgcctcgaactggtcggccgggtgcatctgctcacgcagcaggttttccgcgaggctgacggtacgggccgaagcgtcgggcaccagcaggcaaggcacctcaaagtcggcggcgatgcgcttcttcttcgccagcagcttcaacgcggtcaggcggcggtcgcccgccaccacttcgtattgctctccatcggcggacaggatgacgacgaggttttgcagcagaccgatgcgggcgatgctcgcggccagttcgggaatggacaggcgcggggtcttgcgtgcgttgcgcttggatcggcgcggcagcaactgcgagagcggcaccagaatcaggttcttggtcgggtcggccacttccagcggcgcggcggtttcgatggctcgttcgatttgggtaacggcgttcatggtgatgactccttgcggttagggatgcagcagcgagagaagcggcaagggctgctgcgtgcccctgccgcatgggaattcaggctttcaactggcgcatgccatcggccagcagccaaagcgcacggttga

SEQ ID NO: 497017 - DNA, 207 bp, Stenotrophomonas maltophilia
atgccgcgccgctttgatgaccgccgcccggacttgtggagcgtgttcaaccgcacgcaagagaacctgacccaaggcggcctgcgcgggcgcagcgccaacggacgccgccagcaaacccgcccggtgcacggcatcgaccaaaacatccgcctcaaccgtgcgctttggctgctggccgatggcatgcgccagttgaaagcctga

SEQ ID NO: 497018 - DNA, 645 bp, Stenotrophomonas maltophilia
atgcatcgcgcccgtcagcatgctgccagccagacccgcgagcggcgccatcgcctcgcccacgaagccgcccgcctgatggccgaaggcggcatccgcgactaccaccaggccaaattgaaggctgccagccggctcggcatccacgacgatgcctccctgccccgcaacaccgagatcgaagacgccctgcgcgagtaccagcggctgttctccggcccccagcacggcaacgagctgcagcgccgccgcgaagccgcgttgcgtgcgctggagttcctgcacggcttcgcaccgcggctggccggcccggtgctggagggcaccgccgatgccaacagccccgtacagctgcacctgcacagtgacgacccggaagccgtgcaccgcttcctggacgagcacggcattcccgccgaatcgcggacgcgtcgactgcggatggaccgcgaacggagcctggacgtgccggtgtgggtgttcagcgccgaagagctgaccttcgacctggccgtgctgccgtatgacgccctgcgccaggcgcccttgtcgccggtggacgagaagccgatgcgacgcgcgtctgtcgcacagttgcggcagctgctggccgaggcggagatcaccgcgtatatcggcgggtag

SEQ ID NO: 497019 - DNA, 1017 bp, Stenotrophomonas maltophilia
atgcggctgcgggacgccgacaggttttccgacgaggtctgcaggttggccacgaccgaggtgaagcggttctggatcgcaccgaggtcggcgcgggtgctgttgatcgcacccagggccttgtcgacgatttccatcgcctgctgggcacccttcacggtgctgacgtccaggtcgctggcgtacttggcggccggcgcggccgtcgaggcggtgaaggtcggcgcggtagcgccggtccaggtgcccggggtcgcggtgatggccttgaacgagccatcggcgttgacgctgtccttgaccgaggtcagggtcacgccagcggtgccgttcacttccgcgaacacgccggtctcgccgatcttggcgttgatcgcggtcaccagtgcttcacgcgaggccttgccggtggcagcggcgtcggcgccctgcttgaccgagacatcggcaatggcaacgccattgatctgcaggccgctggtgctgaaatcagcgttggtgcccgggtcggccagggccagcgcgttggtatcgaacttggcgccgcccagggcgttggccttggcatcgatggtcttgtcgatggcgatggcctggccggcgttggcaccgacctggaacagctggctggagaacgaaccgtccagcagcttggtgccgttgaagtccgactgcttggcgacgcggtcgatttccgagaccagctgggtcacttcggcctgcagcgccttgcggtcgctggccgagttggtggcgttggaggcctgcaccgacagctcgcggacgcgctgcaggttgttgccgatttcggtcagcgaaccttcggcgacctgggccagcgagatgccgtcgttggcattgcggatggcgacgtcggtaccgcggatctgcgtgccgaagcgctcggagatcgccaggccggcggcgtcgtccttggcgctgttgatgcgcgaaccggaggacaggcgctggatggtggtagccagcgagctgccgctggtgctcaggttacgctga

SEQ ID NO: 497020 - DNA, 936 bp, Stenotrophomonas maltophilia
gtgagccagatccccaccctcgacatcacccgtttcgacagcgaccgcgaggccttcgtggccgagctgggcgcggcctaccgccaatggggattcgcgggcatccgtaaccacggcatcccgcaggccgacatcgacgcggcctacgatgccttcaaggctttcttcgccctgccggaagaggtcaagcgcaagtaccacgtggccggcagcggcggcgcccgcggctacaccccgttcggcgtggaaaccgccaagggctccaagcatttcgacctgaaggagttctggcacatcggccgcgagatcgccgacgattccaagtaccgggacgtgatggcgccgaacctgtggccggccgaggtcgaaggtttccgtgagcgcggttacggcctgtatcaggcgctggacaacctggggtcgcgcgtgttgtccgcgttggccctgcacattggcctgccggaagacttcttcgccgacaagaccaacttcggcaactcgatcctgcgcccgatccactacccgccgatcaccactgacgacatcccgaacgtgcgtgccggtgcccatggcgacatcaacttcatcaccctgctggtcggcgccagtgccgcaggcctggaagtgcagtcgcatgacggcgagtgggtgccatttacgtcagatgcggacacgatcgtggtcaacatcggcgacatgctgcagcgcctgaccaaccacgtgtatccgtcgaccatccaccgcgtggtcaaccccccgggtgacctggcgcgccagccgcgctattcggtgccgttcttcctgcacccgaaccccgactacctgatcgacgtgctgccctcgtgcatcaccccggagaacccgagccggtatccggaggcgatcaccgcccacggcttcctcgaggaacgcctgcgcgagatcaagctgaagtaa

SEQ ID NO: 497021 - DNA, 264 bp, Stenotrophomonas maltophilia
atgcacatcctgtacaaggccgacaacctgttcgacgcccatctggtcaagcacgcgctggaaaacgccggcatccccgccttcgtgttcggcgagcagctgctggggggcatgggcgagctgccgttgttcggtgtgttgcgggtcggcatccccgacgcggcgcggccgcaggcggaggacatcatcgcggcgctggacttgggccaggccgccgccgaccccatttccgatgcagacgatatggccggactgccggcgtag

SEQ ID NO: 497022 - DNA, 204 bp, Stenotrophomonas maltophilia
atgcgcgaggaggtgtcgttggtgaagctgacctcggccccctggaagttgcgcttggtgatcacgttgatcacgccggccaccgcgtcggtgccgtacaccgccgaggcaccgtcggtcagcacttccatgcgctcgatggccgccgccgggatcgcatcgatgttgacgaactgggtctggaagccggccggcgcaccgtag

SEQ ID NO: 497023 - DNA, 285 bp, Stenotrophomonas maltophilia
atgcgacccgctcccttgcggcctgccgccgctgctgtcgctgcgcccgtgcagccccaacgctacctgaccaacgacgaagccgccgaatacctgcgcctgtcgccgcgcacgctggagaaacagcgcgtgatcggcggcgggccaaagtttcgcaagttcggccgccgcgtcatgtacgcggtggccgacctcgatgcctgggccgaccagcgcagctacgaggccacgtctgacccggaatacgccgagcgccatgcaggcgactatcgcgatggccgctga

SEQ ID NO: 497024 - DNA, 285 bp, Stenotrophomonas maltophilia; identical to SEQ ID NO: 117491

SEQ ID NO: 497025 - DNA, 273 bp, Stenotrophomonas maltophilia
atggacgaaaccacccagcagaacgccgcgctggtggaagaagccaccgccgccgcacgtgcgatggaagaacaggccggccacctcagcgaggccgtgtcgatcttcgtggtggacgaagccgaggtcgtcgccgccccgcgcgtcaccaccccggcaccgcgcgccgctgcaccggctgccccggccccggctgccacgccggcccgccgcaccgccggtggtcgtccgatggccaccgaactggccgacggggactggcaggagttctga

SEQ ID NO: 497026 - DNA, 1224 bp, Stenotrophomonas maltophilia
atgatccgccccctgcgctccctgttgctggcactcagcctggttgccacggttgccacggctgcgccggcacccatggacggcgaccagctcaagcaggtcgtcctgctcagccgtcacaacctgcgcgcgccggtggtggcctccggcgcgctggccaatgcgacgcccgagacctggccgcgctgggaggtggcaccgggcgagctgaccaccaagggaggcgtgctggaggtctacatgggccgctacatcgcccagtggctgcgccaggcgcagctgttgccggtgtcaggttgcccgcaggaggatgacttccacgcgtacgccaacagcctgcagcgcacccaggccaccgcgcagttcttcgttgccggtgctttcccgggctgccatgctgcggtcgaacagcgcatgccgctgggctcgatggatccgttgttcgatccggtgatccgccgcgacgacgcggcattccgcacgcgcgcgctggagtcaatgcagcgagcgctggccgcagtggacctggcaccggctttgtccgtggtggaggagatcacccgctatccgcagtcggcggcatgcaaggggcacagcgactgccatctggcgctggccgataccaccttcagtacggaaccgggcaaggagcctcgcgcgtccggatcactggcgctggccagcgggctggtcgatgccttgttgatggagcactaccagggcggtggcatcccccgcgaaggctggggccggttgaccaccgaggcgcaatggcaggcgctggcgcagatccgcaaccgctaccaggacatcctgttcggaacgcccgaggtggcgcgtgatgtggccgctccgctgctgacaagagtgaatgcgttgttcgacgacccggcgtcgccgaaggtgaccctgctggtcggtcacgattccaacatcggctcggtgctggcggcgttgggaatcagcgactacagcctgccggggcagtacgagaagacaccgatcggtggcctgttgcagttcgaacgctggcgtgatcgccacagcggggtggaacggatccgcctggcctacgtctacccgaccaccgcgcagctgcgcgatgcgctgccgctggccaacgcgcagccgccgggccgcgtcgtgctgcgtgtgccggggtgcgcggctcaggagtgcaccgtcgccgagttccagcgcctgctgcatccgaaagcccgctga

SEQ ID NO: 497027 - DNA, 1161 bp, Stenotrophomonas maltophilia
atgctgcagaccctggccatcgctcactatcgctcgctgcacgggctggtactgccgctgcagccgttgaacgtggtcaccggtgacaacggcagtggcaaatccagcctgtaccgcgcgctgcgcctgctggcggaaaccgcccagggcggcgtcgcggcggtgctggcccgcgaagggggacttggttcggcgctgtgggccggccccgaatccatcgatcgccgggtcgcggccggcgagatcccgctgcagggcgggccccggcaggcgtcagtggggctgaagctgggattcaccaccgacgagttcggctatgccatcgacctgggctacccgccacccagccgttccgcgtttgcgctggatccgcagatcaaggcggaggcgatctgggccgggccgttcctgcgcagcgccaacctgctggtcgatcgccgtggggcaatggtgcgccaacgccatgcgcacggctgggatctcgtggatgaccggttgtcgctgttcgacagcctgttcacccaggtcggcgatccgcagcgcatgccggaaaccatcgccctgcgtgagtacatccgtcgctggcgcttctacgatcatttccgcagcgacgccgatgccccggcgcgacaaccggcgatggcaacgcgcacgccggtgctgcatcacgacgggcgggatctggcggcggcctgggtgaccattctcgagatcggagatccggtcgcgttggcacgcagtgtcgatgatgccttctccggcgccacggtcggcttcgaagagctggacggtcgactggccctgcgattccaccagcccgggctgctgcggccgttgtcgatggccgaattgtctgacggtaccctgcgattcctgctgctggccgcggcactgcacacgccgcggccaccgccgctgctggtgctgaacgagccggagaccagcctgcatccggacctgctgccggcgctggcgcggctgatcatcgccgccagtgcgcgcagccaggtgtgggtggtgtcacacgccagccggctgatcgcggcgttggagcaggcgccgggctgccactcgctgcatctgcacaaggaacagggccgcacgctgctgagcgggcagggcctgttggatgcgccggcctggcattggccgcagcgttga

SEQ ID NO: 497028 - DNA, 1569 bp, Stenotrophomonas maltophilia
gtgtcgggccatgattatctcctggtcggcggcgctaccgacgagccgacgccgcaccgcgcatgcacgccgcagatgctgtccggcgcccgccagcaggtgctggtaccggctccgccgcagggctggtcaggccaaccgcaggcgctggacgtgttcaacgtctttgccggtgaagtgcgcgtccagcatggcgaccgcgagatctgcggcaacatgcacgatgcgcgcacccgcgattcacgtttccgggctggcatcggcctggtggccgtgccgccggccggcagccatgagccgttcctggtctcctggcagacaccgctgaaggcacgttgggtgccgaccctgcggctgggcgcgcccagcccggtgcagcagaacgacaccgcccgcctgctggtgcgcgcggcctgcatcgcggtggcgatcgcgctggcgctgtcggcgttgatggccttcctgaccacccgggaccgcagtttcctggtctacatcgccggcaccaccgtgatggtgctgtggcaggccatcctcggcgggctcagcggttatccggaaccctggctgacggtgggcgagcacggcgcctggtggctgctggcgctgaccgctgcgacccaggcactggtgctgccggcgctgtggcggctgaacggaggcgaccgcgtgctgcctcgatcgcgcccggcccagctggcggtgttgtggaccctgatggcgctggccgtgctggtgccgtggctgcgctgggagcatctggcctgggtcgcgaagggcttgcaggtgtcctatctgtctggatgtggcctggcactgatggtcggcgtctgggcacgctggcgcggcgaccgttgggcacaggcgggtctggccgcgctggcaccgatgctggtactgatcatcgccgatgcctgtggtgcggcgtggctgctggaataccgggtggaggcgctgcagctggcggtgacctggctgttgatgatggccgcgtatgcgttgaaccagcggctgggccggctgcgccagcagcgtgatgaacttcgccagctggccgagaccgatggcctgaccgggcttcccaaccgtcgcgccggactgcagcagctggcccgccatctggaacgggtggaccgtgagcgcggcccgttggtgatcggcttcctcgacatcgacctgttcaaggacatcaacgaccgccacggccacgcagtgggcgaccaggtgctggtggcggtggcgcgtgccctgcgcgcggcggtgcgcagccaggacgaagtggtgcggatgggcggcgaagagttcctgctgctgatgcccggcatgccgcgcgaggcggcgtcggcacggctggaccgcctgcgccagcgcatcaccgaggctggccaggccctgcaggtgccggggctggaggtgaccgccagcatcggcctggcgcagtggcgaccgggcgaagacgatctggccgggctgctgcggcgcgccgaccatgccatgtacgtggcaaagcgggcgggccgcaaccgggtcttcgacggcgaggagctcgatccgcccgccctggcatga

SEQ ID NO: 497029 - DNA, 927 bp, Stenotrophomonas maltophilia
atgtggactaccaagaccccctgggtcgccgtcgccgtggcctgcgcgctgggcacggccgcaagcgcctcggccaagacctgccagcagaacttccaggcggtaggcgatccccgcaatggccagttcttcacctccgaagtcaccctccccggcctgaagccccgcagcgccctgggccagctgcgcaaggcagcgcttgatgagggcaacaacttcgtcagcggagatgtcatcaccgagaccgaaggccagatgtacgtgctgcagaccgacaccaagatgccgctggtcagcatcatcaccgcctccaatggcggcaacgtggtggtcggcaccaagctgtcacgcgggcagaccgccaaggaagaggacgcacgcagcgcgctgtgtggctggctggacaagctcaagaccggccccgaaggcgaggcgatcgcggaagccgtgcgtgtctccagcggtttcgacaagccgatccaggccactgcggtcgggatgtccaccgaaatgggcaaggacgccaagcggctgcagcgggaaatcaacaccgcaccgctcagggcgctgttctccggcaccagcaccccgccggataccgatgcgatgtaccagccgttgctcgtcaagtatttcggccgtcgtttcatcatcgatggccaggtctacaccgcccagcccaaccgctttgccaagaccttcgaggtgggctatctggtcaccaagatgaagggcatcggtggcatcggcggacgccagtcgaacgacgacaacaatgccaacttcaccgtgcactgtgcgcttgcgccggatcagatggcgctgggcgccaccctgcgcgagaacgactgggtgaaactggaaggcgtggtcgacaagatggacaccggtggcgtccacctgcgcgattgccggcaggtgaagtag

SEQ ID NO: 497030 - DNA, 798 bp, Stenotrophomonas maltophilia
atgggcatcatcaagcgccccgacgagatcgcgctgatggccgaatccggccgcctgctggcgcaggtgttcgccgcgctcgaccagctgccgctgcagggccgcagcacgatggagatcaacgaattcgtcgagcgcatgatcgtcgatgagctgcaggcacggccggccagcaagggccagtacggcttcccgtatgtgctcaatacctcgatcgacaacgtcatctgccacggcgtgcccaccaccaccgacgtgctgcgcaacggccagatcgtcaacctcgacatcaccctggaaaagaacggctacatcgccgactccagcaccacctacctggtcggtgaggtcgactacgccgcgcgccggctggtgcagaccgcctaccaggcgatgtggaaaggcatcgccgcggtgcgccccggcgcacgcctgggcgatatcggccacgccatcgcccgccacgcacgcagccacggctacagcgtggtgaaggagtactgcggccacggcatcggccaggagatgcatgaggaaccgcagatcctgcactacgggcatcccaacaccggcatggtgctggaagaagggatggtgttcaccatcgagccgatgctcaaccagggcaagccggccatccgccagcagccggacgaatggccggtctacacccgcgacggcaagctgtcggcgcagttcgaacacaccgtggcggtcaccggcagcggcgtgcgcgtgctgaccctgcgccccggcgagacaccgttgtgcgccatcgaccggatggcgaccggctga

SEQ ID NO: 497031 - DNA, 384 bp, Stenotrophomonas maltophilia
atgccccgcgtcccaacaccttcgaacgccgaactggagttgttgaagtgcctgtggcgcgacggcgcctgcagcgcgcgtgaattgcacaacgcggcagctgccgcactggactggtcgtactcgtccacgcgcaagacgctggaacggatggtcgacaagggcctggtgaaagagggcagccagcacggtctgaatgtctacagtgccaaggtcggcaaggtggccaccctggccgcactcagtgccgacttcgctcgtcgcgtactggagatcgacgggccgctgccgacccaggcattcgccgaaagccgcctgctgagcgacaaggaaatcgagcaactgcaggcgctgctgctccaggatgacgaggaccagccatga

SEQ ID NO: 497032 - DNA, 1470 bp, Stenotrophomonas maltophilia
atgagcctgtcatcaaccgcgccgtggatgatcagcctcgctgcgagcctgctgggggctggcctggcctggtacggcgcgcaatcgctgcagcggctgctcaggctttcacatgcgtcgacacgcttttggctgggggcgtggttgtgtgccgtgctgccccccttgcttgcgctgttgctgccggtgcacgcggcaccgttgcagaagctggccagcgcattgcccgttgcgctggacagcggcaccgccgtactgcggccagtgcaacaactgcctgcactcgcggcgaccgagccattgatggcttggctgacgccactgctgctgaccgtctatatcgcgggggtcatgctggccctcgttcgttgggcattggccagcggccggctgcgggccctgctacgccgcagccacccgctgcagactgcgcagttgcctggcccgcaatcgcaccacgctgtgcaggggcttcagcaggaaggcgtcgcgttgcgcattgtagaaggcagcggcacgccgttcgccctgtgcaggccgcagccgcagatcatcctgcccacggcatgcctggccctgcctgatcgtacgcttcgcctggtcatcggccacgaggcggcccacctgcagcgccgcgacccccagcgcgctgcgctgatgcggtttgttggtgcgctgtactggttcaatcccttcgttcgacgcattgccgcgcgcatgcaactggccgccgaactgcaatgcgatgcgcgagcactggccgagggtagcgccgccaacgacggccgtctgttggcccacgcctatgtccagacccttcgctacgcgacggccgtgcagccgaccagcgccctcacccatcgcgatctcggcggccaccaggtgcgcctgcagcacatgctgaagggtgacaacggtcgccgcccaggcctcaccagcgtcctgctgctgctcgcactgggctctgcctgcacagtcggcgtggccaccgtacaggcgaccgtggtggcaggaccgacgcccgtgacgctgccactccccatcgcatcggtaacactggtggaagccacgctgccacctccgtcattcttcatgccactgtccaatgcgcgggtcaccagcgtgttcgggcacgtcgccgacttccgccagagcgcccaccacggcaccgacttcgccgcgcgccgtggcaccgccgtgctcgcccccgccgacggcaccgtgatcgctgccacgcacgcctatcccgatggtgcgaactacggcacggttgtcgtgatcgatcacggcggtggctggcagtcgctgtttgcacacctgcaggacttcgcggtacagccaggccagcaggtgcgcaggggcgatcccatcgcccgcagcggcaacaccgggcgcactaccggcccacacctgcacatggaactgctgcgcaacggaacacgagtggacccgcagcactggttgcagtaa

SEQ ID NO: 497033 - DNA, 2109 bp, Stenotrophomonas maltophilia
atggcccttccaccaacgacaccctccccttcaaacacgaccgatctggatgcagtgcacgtccagtccgagcgctacgacgctcgccgtgacgacactgcgagccgcatcgtggtggaccgcgaggcgctgcaacggcatggcgataccgacctgctggaggcactcaagcgcttgcccggtgtcagcgtttcgaacggcgcaccgggccgtccaggcaccgtgtcactacgcggcctgggcgcgggctacacgcagatcctgttgaacggccagcgcacatccgccgctttcagcctggactcactggccaccgatctgatcgagcgcatcgaaatcctgcgcgcgccctccgctgatcagggcatgggtgccatcgccggcacactcaacatcgtcacccgtgcaccggttgcaaaagacagtcaacggctgacggtttcatggacggatacccaagggcgcatgaccccgtcagcgagctggcggcaggcccgttccaacctcgaccgtgatgtttcactgaccgccacggcaaccgcccgcacattcctggtggaggaacgcagcagagaggacgcttgggatggtgttggtacgccgttgctgcatcgacagtcgcgcctgcgtgccaccggccaacgcaacagcgtttcgctctcgccctcactgacgttcagaaccagcgatgacaccaccctttcgctgcaggccctggtggacgcttcagacttccgtcgcgacatgaccattgattgggacacgctgctgggcccggcactacgcactccccattaccggcaacgcacgcatctgcgccttgaccagggccaggtcagtgcagagtgggagaaaaaactgtcggatggaggcagcctgaacctgcgcctggcaatggacggaaaccgggaggactaccgctttcgcgaacaaggacaggatgaggcacagcaggataatcttttcgatggcaccgatgcgaagctgcacgtgctgggtggcaccacccgcgtgaagtggaccctgccggcgtggggccgccatacactgcaggtcggtgccgaaagcagcatggactcgcggcgtgaatcccgagtgcagcaattgcattcttcccccagcgaaccatcgacggtcagcgacctctccttcgatgcgcggctgcatcgcgtggcgctgtacgcgcaggatgaatttccctggggcgcgcgcagtgccttctacgtcggcggtcgctgggaacaactgcagacccgcagcgaaggtcggaatttcgccaccacgcgtcaccgtgccagcgtgttcacgccggtcctgcagggcctgtggaagcgtgcaaagggcaaggaccagctacgggtctcattgagccgcagcttccgcgcaccagcgctgcgctcgctggtcccgcgtccgtacacctctaccaacaaccgtccactgaaccccgacgagatcgggaatccatcgctgcgtccggaactggcgtggggtctggatgcggcttgggaaatgcacggcggtgaaggtactcaaggaagcatcggcggctacctgcgtcgcatcgatgcaccgatccgcaatgaaacggtgctacgtgacgggcgctgggtatcgacgccggtcaatggtacccgcgccatggcctggggaatcgagatggatggcaggatgccgctggcacgcctgtaccgcagagggccggatatcgagctgcgcggcaacgccacctggaaccactcccgggtcagggatcttcccgggcctgacaatcggattgaagaccaggtgccattcaccgccaatgcgtcgctcgattaccgcatctcatcgcgctggagcagcggcctggcctacacccatcgcagcggaggcagaatacgctacagcctgagcgagctggacatcacgtcctatcgacgcgaactggaagcctgggcacagtacgcaaccgagcggcacggcaagctgcgcttgaccgcctcgaacctgttggcgcaggacatcgagaccggccagtggcgtttcgacgaaggtgggtcgcaggtacttcgcaacacccgacgttccgtacccagccttcgcctgcattgggagctcccgctgtga

SEQ ID NO: 497034 - DNA, 1146 bp, Stenotrophomonas maltophilia
atgggcgtgatcggccgacgtacaaggatgcaccgcgcgaaagtcgcgttgaccctggcagcctgcatgccgcttgcggcggcagcgcagagcagtgccgatgcacccgcactggactgggaacaggcgcggcaacgcctggagcaggtctccgatgcgctggccgctgccgatgcagccgttcgcaacaagcaggacctgcaggacgccacccggctgctgcgcctgccggagatcaccggcgaagtgcgccgcctgcagttccagaagacgctcactctgccgctgggctcactggcgccggtggctgaagccttcggcatcgattcgccgctgtcgttcaccgagcgcgactggcgcacccgtccagtggtcaccgcggtgctgccgctgtacaccggcggcgtgattccggccgcgcagcgtgcggccagtgccgcccacgaacaggccagcgccgagcgcgaagcacaacgtcaatcgctgaccgtgcagctggcccaggcctacttcgggcagcgcctggccgagcaggcggtggacgtgcgccgtgacgtgcgcgatggcctcaaccgccacctgtccgatgcggagaagctggaacgcgagggtttcgccacccgcgcccagcgcctgcaggccaccgtggcccgcgacaaggccgagcgcgaataccagaagacggtgaacgacctggcaacgctgaaggccgcgctggccacgctgctgcgcagtggtggcgaggtgcagccggtttcgccgctgttcgtgcagcgcgtgccgctggaaccggtggccagcttcgagcgtactgcgcaggcgcgccagccgcagatcgcacgcctgcgggccatggtggcgcaggccgaacagggcgtgcgcgtgcagcaggccaagctgaaaccgcagatctttgccttcggccagtacgacttccgccgccgcgacgaaatgctgaccgatccggactgggcgtttggcatcggcctgaagtacaccttcctgtcgccgaactcgcggccggcgcagatcagcgccgcgcgcgcgcagcaggaccaggccgaagcgggcctgcgcgaggccgagaaccaggtcgcgctgggcgtgcgcaaggcctggaacgaactggaaaccgcgcgccagtag

SEQ ID NO: 497035 - DNA, 393 bp, Stenotrophomonas maltophilia
atgacacggatcctgcacatcgaaggcgcgtccatcaacgacatcgccagcgtctacgtggaaatcaatcgcgtgttcatggccgacgaagactggcagctgggcgcaagcttggacgcgcttgatgacccgctgcacggcagctacggcgcgctcgccggtcatgccgccaccacggtggtgtggcgtgacatcgcccacagccgcgaggcactgggccgcgagaccacgcgcgcttggctgcggtccaaactcgatcaggacggcaggttcaacggtccggtcatccagcctcagttgacggcactgtcgattggccagggacagacctacttcgagatcgtcatggagatcttcggcagccatccgcagatcaccctggtgccaggctga

SEQ ID NO: 497036 - DNA, 993 bp, Stenotrophomonas maltophilia
atggcgcatatccatctactggccgccgacaacctgcgtggcctgtcccatgacatccaggtgatcgagcgctcattgcagcagctcgggcacacggtgacggtcagccgtctggacgcggtgcgcaatggtggtgcctggaaactgcgcgggatgcgcctgcgcaggctgctggcctcgtggctcagcttggggcgcacgccagcccggttcgacatcaacatctcgctggagcatgtccggccggcaagcttcggactggccgaggtcaatctgttgattccgaatccggaatgggtgtccgcacgcagcctgcggatcctgccgcggttcgatgcgttgttgaccaagaccgaagaagccacgcgcatcttcaacgcactgggcatgcgcgcgctggaagtcggtttctgcagccgtgaccgctacgacccagcggtgccgcgcagaccgcgcagcttcctgcatgcggccggtaccagtcgcatgaaggggacggctgcactcgtcaatgtctggaagcggcaccctgagtggcccttgctgaccatcctgcgcggcggcccttcggacgaagatgagggcggggccgcgaacctgcggatcgtccgcgagcggctgcccgaccaagaggtgcagcgcctgcagaacgaacatgcgtttcacctgtgcctgtcgcagaccgaaggctggggccattacctggtggaagcgatgagctgcggcgcggtggtgatcacctgcgacggcgcgccgatgaaccagatgatcgacgacagccgcggtatcctggtcgccgcgcacgagggcgagccctgccatctgtccagaacctggcatgtggatgagaaggcgctggaacaggccgtcgagcgtgcgctggcgatggatgaggccgagtggacccggctgggcgccaatgcacgcgcatggcacctggccagcgaagtggcgttcccacgccgtctgggcgtggccctggccaagctttga

SEQ ID NO: 497037 - DNA, 1278 bp, Stenotrophomonas maltophilia
atgactgcagcctgcatggccgccgaacctcgttacacttggcgtaccgtcctgctgagcatcttggtcgccatcgttccgcttgccggctccgcacccaacaccttgctgaaggcggtgctgctgctggccctgctggtcaccggcgtggttctgattcgccgccagcccgatgtccgcctgcgctaccgcatcgcccggttcatcgtgatcgtctgcttcctgcgcctggcctatgccttctacagcatcctctggcacgggctgcgctggaacgagctggatctgccggcgcagacactgctctacctgggtaccgctgctgtgttcgccactgcgctggactggcgcctgatctggaagatcttcgccgtgtccaccctggtcttcggcgggtcgtgcatcgtgcagcaccacgtgatgggtcttgaacgcgcgcacggtttcagtggcggcgaatggacggccatcgagttcaccatggtgacgctgtgcatggcgttgttctcggtcatccggttgatccagcccaatgtgcatccggccgaacgctggctgcacggcgtggccatcgccgtcggcgtctacggctcgatcctggcgcagagtcgcgggccgatcctggcgttcattcccgccatgctgatggtgattgtggtgcacgtccggcgaacccggcgctggcggggggcactggtcttcgtcggtgccttggccatcggcgtggtcggcgccacctcggtgctgaaccacgaggtgatccagcgcttcggtgaggtcagtggcgagatctccggcttcaaccaggaaaacgaggtcggctcggtccgcgagcgcatcgccatgtggggcgtggcggtcgacgccttcgccgagcatcccgtggcgggggtgggcctgaaccagttcggtagctatgcacgtgagggcatcgcccgcggcgaggtgtccgagtcgatcttccgctacaaccacccgcacaacgagtacctggaagcggcggtgaccggtggcgtgccgttgctgctgatcatgctgctggtcttcatcctgcccggcattcatttcgtgcggcgcctcggccacgccgacgacatcaccgcgacgatcgccatcgccggacttgccgtggtcatcgtctatgcgctttcggcgttcacggacaacgtgttctaccgggcgatgccgcattcgttctatttctacctggtgctgggcttcatgatggcgaccgccttgccggcgcgtaacctgaatcggccagggagtccgtcctga

SEQ ID NO: 497038 - DNA, 2439 bp, Stenotrophomonas maltophilia
atgaaaagcagattaaacaaatccaggttagcaattgcggcgatagccctgctttcatcgggccttgccaacgcatcgctaattcaaattggcgatggagccgctgcggcagcacaaggcgatgttgccattggtgatttagctagcgctactacaggcatgttccagagaatgacctggaacggcagctcttgggacattgaaaacgtcactgcgacagctgtatctattggcaagcaatcaaaagcaattgcaggcggtgtcgcaataggcgagcagtctgaagcagcaagcgcatcagtttcaatcggcagtaaagctatagcaacccagcaagggggtgtggctataggtgaaaatgcacaagcgaaagaccaaaacacagtagcgattggagccaatgcgaaagccacggctaacggtgcagtcgctatcggagcaaacacaatcgccgatcaatacgacaccgttgcagtaggaggcgggttgccagagggaaaaagaattgtaggtgtcgccaagggtgttggcgactatgatgctgtaaacgtaaaacagctaaatgaaaccgtcgcagcaggaactggcagcaaacgaattgtggtcaatggacccgaaactggtggcgctgcgcgggctattggcagctatgacattgccattggaacaaatgcggaaactcaatttgatggcagcgagtatggacctaacatcgctgtcggaaggaattcaaaggcatattacggaagcactgttattggcgacaatgcctccgcaggccgaaaaggcgtagctatcggcaatggtgcttatgcaggcggcgttaatgacggcggtggagtggcgattgggcgagactctagagttgaaagcaatggtgtaattggcggcaacggcgtggctattggcccaaacacaatagtaactggcggagcaactgcggcaatcggcccaggagcaagagccgatgcaccggactcaatcgccatcggcggttcaacaggaggaagagctaacacagtcgcgtttggaaatcgccaattaacaggcgttaacgcgggaacagctgatacagatgctgtaaacctaaaacaattgaacgatgctcttgctggcattcctacaacccctggcgcaggcaacccctattttgcagcgaagggtgatccatctaaaaatgatccggcgttagcaataggcgacaactccgtagcaggcggaccatcagcacgtgctgctggcaatcagtcatcggcatacggttcaaatgcgaatgccaatggtgagggatctactgccgcaggcaatcaggctaacgcatacgcagatcaatcaactgcagttggagcgttctcttccgcgacagcaaaatgcacagcagttggctacggtgctgagtgctctgaagatggaactgtgtcctttggtcgatcaggcgacgataaacgcctcaaaaatgttgcaggcggaatagaggacactgacgcggcaaatacagggcaagttagagcggtagatttgcgagtgcgtcaaacacaaaccgcagtatccaggcaagccgtgtggttcggtggtggagcttcttatgatcccactactggcgtatggaccaacccaaattttgcgatgccgagcggtcctagctttaacaacgtcaatgacgctcttgtctacctagacaatcgcatcggcaatggaaactcccctggaaccggacctcaaggccctgctggtgcagacggcgcagatggcaggagcgcctatgaagttgccgtaggcaatggttacaaaggcactgaaaaagaatggctggcctcgctcaaaggcgctgacggtaaagatggtgtcggcggtggtagcagcagcaaatctgtcgcaggcaagaacatcgaagtcagcgataaccaggacggcactcaaacagttgcggtggctgacaacgtagtcctcagtgaaaacggcagcgtcaaagtcggcgcaacaaccgttgacgccaaaggcgtctcaattgaaggcggtgcatccatgacccgtgacggcatcaatgctggcaaccagcgcgtcacgagcgtagcagcaggccgcatagagaaaggttcgacggatgcggtgaacggtggccagatctatgacatgcagaccgctcttaatgatcgctgggacgaaactaacaggcgcattgatcgccaggaccgccgcatagacgcaatgggagctcaagtagcggccatgtcgatgatggcagcagcgaacgttccagctgccgtgggtgaagtccaggcttcagcaggcatcggctttagcggtaatgaaggtgcattggctatcggctggagagctcgtattactgaacgcacaagcgtttcaggtgggttctcgtatagcgcaagaggtaaggcgatgggtggcgtcggagtgtcaatcaacttgggacgctaa

SEQ ID NO: 497039 - DNA, 495 bp, Stenotrophomonas maltophilia
atgagtataaatttcgacaaagacgctgtaactgtgttgctaagcattgccacaatccttatagccctatcgcaaatgaagattgcgagctcaaaagctagactggatttgtataacaagcgctttgccatctacaccacagcattggaatattttcaggcgttgtgggaaaagtctgacaccccgctcaaggcttgcgaagccaacatgatcaaagccttccgtgaatcaaagttcttattcaagcagtcagacgggatttacgaaacactagaaaggattaaagatgccggagccatggccacctatctaaaagaagacatctctaagattgagagtggagtagtgacggatgatcgaattttgacaagcagccgcgaaaacagatctgatgcccttcaacgctttgaagacaatttgaagctacttgaacagcagcttgaaaaataccttggattcaagactgccagcggttggacatttctgccctggtga

SEQ ID NO: 497040 - DNA, 2910 bp, Stenotrophomonas maltophilia
atgatttctattgctcgtatcaatgcccgtgggcaaaaacaaaatggcgaggcagtggttgactacttgcttgcggtggaggaactgtcgcaaggaatgaagaatgcagccgagagggcaaattcacacgcagcgtcagatggtcttgcatcttattactatgatgagaatgcagatgctgtccagcgatggtcaggcagattggctgctgacttaggacttgaaggaaagcccgttgacaagcaggcgatgttaaagctcgcggaagggttccacccctacaccggtgagccgctttgcaagaacgctggagagaagcccagagaagttgaaaagattgatcgaaagactgggaagccaaagctggataagaatgggaatgtaattatgaagtctgagggagggcatagggtcggctttgaccttgtaacgacgcctcctaaaagcgtgtccatcgcattcgcacttggcaatgatgatgaaaaactggaaatacttcaggcgcatcggcgagcaaatgatgttgcgatgaaattcctggagagcaaaattgaaactcgcagggggaagcagggtgtaaatgtaatcgggaccgaaggtgtgatcatcatgcaggcagtgcacacaggaaacagaaatttagagtgcaacgtccacactcataaccttttgtttggtattgcgaagggtgttgatggccaatatgggacctttgatgctcaggaaatttaccgccatcagaaggctgcagatcaaatttacaagagcgagctcgcaatgaacttgcgagagcttaagtatggaattgagcagctgcgagaggtggatgcccttggggaggagacggggaacgtgtcctttgagatatcaggtattagtcgcgaattgattgagcttaattcgtcccgtcgcaccgaaattctaaaatatgaattagagcacggggttgatcgtcaagcagcttgcctggcaacccggcaacacaaggatgaacccgcattcgatgaactgcaggccatgtggactgacaccttcaacaagatcaaacaggagcgcgcagagctggtgccgtctatacagcaattaaagtctaccgctgataaaaacatgcgaattgatgaggatgctgaaatattaaagcgtcttcataaaacagattcagtgttcactgagtgccatcttattgaagccattgcaaaggagaatatggggaaggtgcgcttttctgatgtgatcgagaaagcggaggaatttaaatctcgcatgcagctggttgagatcgcgcctgagaagattgcttctgccgacgccggggaatcgctttctcggcgtaatacggaggtgagatatgccgcaggctggatggttgagtgggagagagaaataatcaacggcgttatggccaggcaggatgaggatcatcaaaaaattcctcaagtcaacgttgaggacgctatagcagcttatgagtcgagaaagaatttcactgttactgacgagcaacgcaacagcgtcatccacttgacctcaaaatcaggtggtgtggcggtgtttacaggtggcgcgggcactgggaagactactgtcagtgacatttacagtgaagtgttcaaagcggatggccgcaacatggtgggcgtttgcgtatccaatatggctgcttcaaagctagaagctgaaagcgggatgccatgtaagtcagttaccaaaactctttcactgctagacagaaacttgatgaagttaactgataaagatgtgctggtgattgatgaggcgggaatgattgatgctgatcaaacccggcgtctcctttcatacgctcaaaaaggaggggccaaggttattctccagggcgatgaaatgcagctacagcccatcggggctggttccgggatggcactagcaaaggtggctgtagacgatgttcagctgactgaaattagaaggcaaaaaaacgctgaggatcgcgcaattgcagggctcttctacacaagaggagctgatggaaaaatacagcaacacaagaaaggcgaaaagtctaggagtgaaacaatattgcatggcaaggccatttttgaagcgcttgaggcaagaggttgtattgatgattacgatacgcgcgatcaatctataggcgctcttgttgatgactatatgtcttctagtgcaagcattgatcaaaggctcgtgcttggcagcactcggatggacgtaaaggaactaaacgaaaagatcagggcagctatggtttccgctggccttgttgattcatcagcggtcaatgtttcaatcgtaaacaagaaggataaatactctattgacttgtcgccaggggatcgagtcgcttttacaaaaaatgatgagaagggcttgggagtcgtgaacggtgacgcaggaaccctgttgagtgttgaaaaaggcgagtctggcggctacaacatggttgtaaggttgaggtccgaaacgcctgcgaaagatgggaagttggtaagtttcaatacagactcattcaataatattcgacacaattatgctgtcactgttcatgatagtcagggccagggcaaggaagatatatttcatcttgctaatctaggtatgatggataatcacagtgcgctagttgcttttactcggcttacaaagggtaaatatacgatgtatggcgacaccgaaactattgagcgaattcatgagcgcatggggatggagcgactgaaggcaaatgctactactgagggtgttttaaaggacgcaaagcagattgataaaaatcacattgctcttagtcagttgcggagttctattgaagcgtttagtggtttggaggcgaagagggatggacaaaggattgataattctcagagggcaagaaagactatcaacgtatttgggcttggtgcttga

SEQ ID NO: 497041 - DNA, 1656 bp, Stenotrophomonas maltophilia
gtgacattcaactgggcaacgttgggtgtctcagccggtgctgcagcttctgaataccttgagcaggtcaaccaacccttacaggtcatcttgagggtagggatcccacttgcactctccattgcttgtgcttgctggtcttttgctaaaggcctgactcctcgctcaaacacgtggcatctctcaggtcctcgcctcctggatggcaaggaagcgttgcgcgaggccagagcaagaagcctcaacaagaagcagatcgaagccgacagctttcccctggctctccacccagcgctgatcttgcccaaaaaacgatgggcgaggcatctgctgatcgctggcagcgttggtagcggtaagacagtcatcttgatggcgttgatcaggcagatgcttcaacgcaatttgaagtgcttcatctacgacgtgaaaggtgacttcacagctaagggcgatttcggcgttggtcaccgccccataattgtcagccctttcgataagcggtcatacgtgtgggatgttgcacgtgatgtgcgctcacctacgcaggctgctgcgttcgcagcaagcctcatccctgaagaaagcggcaacggcaagttctggaccattgcggctcagcaattgctcacaggagcattgcggtctcttcaaaatacgagggggacagagtggaactggacggatctagcgcatgccgtctcccagggtgctcctgcaatgttgccaatgctcaaggagcattacgccaaagccgcgcctttgatcgcgaacgaggagagccaatccactgcctctgtgctggctacgctggcgggatacacgcgggtcattgatgaccttgcactagcgtggcctacacgaacagatcgcatgttcgctatgacagattgggtcaaggatggctacaggggccgcaagcaagtcatcgtccaggcgggtccagatcctagcctcacaaaggcctacatagcagcaatgatcaatgtcgctgttccttcgatcatttcagcccagctccctgacaacgaggagggcaggttcctgggtttcatccttgatgagctgcccagcatcgggcgtttgaacattgatcagctgctcaccctagggcgttcaaagggcgtgtgtgcagttctctgctatcaagacttcagtcaaatggaagctgtgtattcaagagaagtggctaagacgttctctagcacagtcgcaacaaaaattatttgtgaagtccaggcgggagacacgcgggactaccttgcatcgacactcggcaagcacaaagtggcttggaggacgtatgacgacaacgcaaccgtgcacgaagaaacaagagccatcgtgtcctcgcctgagctgacagatcgattgggcttcaggaagggaaaggcatacgggcctagtgggtggggcattcgcgccattgttcagatgggcggtgatcccttgttgctcaattttcccggcaaccagatcgctaatcaacgtccaggacaagttccagcccgctggactattgggcctcgatcagcgcctagggtggtcagcacaaccgttccagcaaatgtggatggggaagggacggacataggcctttcaattgctgatgtattggccagagaggcgtcgcggatatataagtctaaagactga

SEQ ID NO: 497042 - DNA, 936 bp, Stenotrophomonas maltophilia
atgatcaaagaaagatatctaagagtattggctgccgcattgatggcgatgccatttgtttctttttccagcacaatcactatcaatgatcccttttacaatcagatggcttcccaagatcttgtgaatgccatttttcagcaatcagaagatcttgcacttgtaaatattgctcctgaaattgatcgaggtgtggcaaagcgtgcgcttgacgctatgacttgcaccacggaagacggtcagcaaattgacaagttgcttgttgtggatatgagcatgccagcacgcaccaaacgcctttgggcgtttgatgtgagtgacctggacaatccagtcttaatcacgagggactacgttgcccacggctccggctctgacgtatcagcaaagggtagggcggctaaattctctaatatcccagattcaaatatgacgagtcttgggctataccgcatagctgaaaaataccagggcaaaaatgggtggagtaggcggctggacggtctatttgcaaagttcaacagcaaggcgagagaccgtgcggttgtattgcacccatctaactacgttcgtgacgattatgttggcaggagtcaaggttgccctgctgtcaatcagagaaccatggacaagctggaagaggcgggtctgagcaacgcctatctatacatcgatggccaggatgatgagctacagacacttgttagcgcttgcgctgaaaaaaggcgtgctcgattacttgctgaggctacacgtcgctttgaagaaagctttgggctgttcgcgacaagccttatttttaatgagccatcagcctcttctagctttttaagctgggccctgcctgagagtgaatttatacccgcgcctatcatcaacacggagggcgcatgcctaattgacagatcccggcatggccttaggttgtctgcatga

SEQ ID NO: 497043 - DNA, 603 bp, Stenotrophomonas maltophilia
atgaatgatgaggtaaagcacggcaataaactatttgaagctcaggcggcttttcaggatgtgcgtaaggagcgtgatgaacatctaaagtcagatcggcccagtgcgttcatgaaagaagaatacaaaacctggactgagaagagctcagagcttagtgcttcagttgaacgtgctaaagaaaaattctttggcgaaattaacagggcgagccctgaagatatagaaaagcttcaggggcagatgaaggagaccatggaagttcagaactcacagcgcaaaagctttagacagttgttgtcagctcgcagagagcaagagggcgaaaggcttccctttcaactaagtgaagtggaagacgaatggaagaataggaatgaaaacagggcgcgtatcagaacctcacatggaagagaagactatgctgctacagcgcaaagcgaaagtgattactggaaagcacatcagaaaaaggaagatgcctacatgcaagcacacctgggtagcggtcaacctacactgggacaggttgaagactggcatagagaacagcagaggcaaaaagatgttcagcaagttaagcttaagcagcaaatacagtga

SEQ ID NO: 497044 - DNA, 2973 bp, Stenotrophomonas maltophilia
atgagtttactttacaaattgcttgatagaaccgaactgctcttatcaaaaaaagaaaagaaggaatcactgttgatagcagaagctgcgccccttgaacctgtgcaacctcctgtcagttcagtggatgaggataaagggagcgttcaaaacactgttccttctcactctcacgcccgcatgcttgaagaggcctacaaggtagcggatctgattacgggccgacatgacgtgcctgatcgcattccctcaaatcagctggttgttgagccagaacgcgaggaacttgttaaacgtatgggggctgagctaattgacgggatctggacagtccctgaaggaatggacatacagaaattcagtcagttttggccgctcatacctgcggacttgcgcgataaggcagctcgtaatactacgacaaaaaatggtgatccaattgaggggtatttgcgccctgatgacattgtaaggggaggggattcgacagctacccccctaatgtatggagcgttgcccgtaattggggccttggcttaccttgtctcactagttagccctctactctcattgctagtgatgcttctggccaccccattcctcatcaccattgcccagggtgagggaataattgattctgttaagagcttctttgtcttgcttgtggggcccgctgcattggcagctatggcagcaaacggggcgcgtcagcttgagagcttgaatctcctgggatctatcagagcaggtggaattcagtcagtagtaactgcgtctttgagtctcgccaccctctccgcaatcgtgatgggagtcgcgtttgttttgatgcttgcatcaaatatgctggactcaaaatataaagcgtcagtgataggcgggttctgggcacgtgttcgctatagcgcaaaattggcgttcgttttcacacttgtcatgactgtgagtctggccgttcttcctacttcaatgttgccatttgcgtttttcttcatggctagcatgtatcccatgattcataccgaaagcaactacaactctagagctaaggagcttgaggcgcttggtattacatttaagttgggtcgaatgggcaagctgagcactgttcacgtagagccccgcattctgcaggcaaagatagctttagctgataaatcgccaacgatggtagttggatgcgcggaaggttggctaagtgctaaacaccatcccaatgctcctgattcgggtcaagagatggttctttctgctatcgatgctacatctcatattctcgtatttggatcatcaggcgtgggaaaaacatcatctacgcttcgtccgtggatcaagcagtggactgaaaataacatgggttcagtattcgtggctgacgcaaaaggatcgctgccgggtgaggtttcctctctgatcgatcttaggatcggaacgggagttgattatgcgcccatgcaggggcttgatgctcagggcgtttacaacgccgttaaagcaatcaaagtaaaaagcgcaaagtcttcagagaatccaatctgggacaacggcgcaatggatcatatagataacattacaattctccatgaggctttgcatgaacatgagctagtaatgattaatcactcgcgctatttggcttctcttaaggaagatgctgagatgtggttttccatggaggcagttaaacttgaaaaggagggtaaagatccgacagaagcattggaaaaagcgcgcgttgcagccgagctaaaagtagagtggtctcaaaaagccgcacgtgaacggaagtggctttggaaccttgataccctttcaaggttggttattatttcggacaacttaaaatctgacggccctaacctaacggccggtgatgagatgctggcggcactgtctgagttgggatacggggcaagtgaagagcgtcgtagtcgcatgcctgaatcaattcatccagaaattggagctggtggtctgctcgatggaaccattgaatacttcctcggaagctggcccaacaagggtgaattgcgctcctcctttatgtcgaacgtaaatgaccgaattcagccattgacaaggggtaagtatttaacaggaaagagtggtgttcattggaagatgttggaaaaaggagaggacgttcgtgtgtgcctctacgggaagaatgttggaatcgatcttcctgaaactattcatgggcgtgccggtgtagctattaccgcttttgctaagcagtgtgtatatgacagcatcaaaatgagagcgacaacgaaagagagcgattggagagcaatggggcaaactcccttgttgcttgtgtttgatgaggcccaggatcttgtgggtgaagctgagtcagcactcattccaaagtctcgatctatgcgaatggcgttctgctgcgcaacccaatcgattgagagccttattgagcgcttcaatgacgcaaactccgcccgtaagttcgcagatactttccagtcaatcttctgcctggagtcgtcaagtggaacatataagtatatgaaagagagacttggtaaggcggatctaattagcttcaagcaacgctctaatggaattgattactctggagccttaaagaattatgcccttagcccgttgaatgatcctgatcatcctaaccgcgcaggcatggagagtctgttgaggcgtggttttggaaagctaatcgttcgcgctcctacggcccctatgcaatacgtgggtggaaagtggataggaaacaagactcgacagcttgatgagaactcaatgctcactgatataactgttccagtgggtggcgtcctggaaactgttgatgtttttgaagatcaagagttcaactcattgctgacaacgggcaaagcaattgtgtcattgcgtcgcgcaggtggtaaaagagtcgaccttgtaaaacttctttatgtgggtccggatgagctgcgtaaggataaagtggcctga

SEQ ID NO: 497045 - DNA, 804 bp, Stenotrophomonas maltophilia
atgagcgaccttcaacgtgaaagagaactgcgtaggctggaagcgagtttcggattggataataacgtggagggtgagtcctcccctgcatcgaaacgtatcatcccagaacccgtgatggagcaagttgagccagtagcgaagaaggtcgctgaagcaagtcagcgaataattaaacagacaacagctgtagctgatgaagctgtcaaacgattgccaaacataaatctgaataaggctcgtaagaaaagtccatatatatgcgtgggagccgcattgcttgtttgtgctggagtgcttgccctgaaattcaagggtgatgaaaaggccgcagccgcgcctgctgtcgctatggcgccatctcagggcctatatattcccccggctattaatcaagtgccagcattgccagggcaagtccaggaagaggagaggaagcccgttgatcatttagaggaagcaatcccccaggaccttcctttgatagaagaagctgcgcaccttgaaactgtgcaacctcctgtcagttcaatggatgaggataaaagtagcgttcaaaacgctgttcctgctcaaacaattgccccggcacctgctgctgcgcctcaagttagatcggcgcgaaataataataatgaagctaaggttggccgacagcctgctgtagttgccgcgcctcgcgttattcaacggcatcaaccacccccggcaacagaggcggaaattaaagctgaagttgatagggtgaaagcggggaagccatggcaaagcaggattgatcagataaaagagttggatctttaa

SEQ ID NO: 497046 - DNA, 705 bp, Stenotrophomonas maltophilia
atgaaactatacaaagcaacactacttggcctttcaatttctttgtcactgacctgcattgctaatgctggagtcaaggattggatgagggataaaaaggaacggctcacggggcagcacacaaccgaacaagttggctcgccaactgatctgccccctgtagaggttcacgaacagaagcagcggagggtagatggcaagagactcacagctgacgcagcgaaaggctgtgcggctggagcagtgatgagcttgctttcaggtggcctagatctgcgcgcatgtgccgcagcagcagtaggagccggagttcaatcagttcagcagcagcttgcccaggcaagacaggttgaggaggcggcaaagagggctggcatgaaggccaaggtggaaactgaaaagcacacagacagatcgggaaggcagcaggaggcaatgaagtcaattgaaatcgaatacgaagcatctgatcttttagtgatggacgctaagacagtagagacaatggaaaagctctcaaacctcttcaaggggtcaaagggtcagcttgatattcgcatcgaaggaaccaacccggcctgtctttcgcttcttggtgagcttgataagcggggagctcttgataggcatctggtagacaaccagtgcggacgtagcacctcgcacaagctcgtgatcacttcactgacaaagggaggtaggtga

SEQ ID NO: 497047 - DNA, 1011 bp, Stenotrophomonas maltophilia
atgactgagggccgcgcttgccggttctgtctagcagctgcggatgttgtgggtgtgcgcctggtcaactcgttcttgctcgcaccagcgctcggcgggcaggctgttgatgagagccggatcgtcacgtgcctgagttgtgcgaaggcgagaagcaacagggatgtgttgtcctggaactcattccccgttctgggaactgaggagtccagagcctctgtgcttcaacagagagacgctgtgctcactgttgcccgcaaccatctgactgctacaagagccggtgcgagcaaggctcaggttctcgcctgcctcaggcaaagatggcaacaaccacgcgtgaagctcttcgctcatcacagcgcggagcggagctttgtaggctggacagtgagcagcggtgaagagcaagcctatggcgaagctgccgcgatacttcgctttggcttccatgctcagcctgtggccagcaacacaggcgtcgttgtgatggaactggcggagccgatgttccttgatgctgtgtgggcactaatcgagaacggagcactggttgagccactatctcttgatgatgctgtccctgtaaacccacacaattggcagcactggtggcgctacagttttcataatattgatgacctcgtgcgtcgtaggccccgcctcagcggcaacaactcacgcacaaaagggacgctggcctactcgctcgcacgcttgcgtgatcgtcttcctgatgacctcaaacacctgagcgcacggcgcacggccattgccgcaccctctcctccacgcaagctttcggacaagccttctgcgatcagtgaaaggcaggcatatcgcaaacgtgttgaacaagagagagagcgcctgtggcgcactgcgcgcgatgacctcgatgcctacaaagagagtgtggccaggggatgcgcccacccggcgacagcattagaactactagaaatggagttccatgtcctagatctgttcgatgcgatcaagaagtggtga

SEQ ID NO: 497048 - DNA, 267 bp, Stenotrophomonas maltophilia
atgaggatttgtgttttcaatgctaaaggaggcgtgggtagaaccacgactacgctcaacctcgccggtttcttcgctcaagatccagcgctgcgcgtgcttgtatctgactgtgatccgcaaggctctgccttggcctgggcggccctcgcagatgaaacgccgttcactgtcggcaggagccgcagcaggggatttgatgtagagatcctggacttgccccctaagatcccggacaacgaacaattatggaaggtggccgcatga

SEQ ID NO: 497049 - DNA, 174 bp, Stenotrophomonas maltophilia
atgacatttgaattattcttaattatcggcggggcttcccttatcgttgcggctaagttcgcgcggttacaccaacgctactctgataataaatacgctgagaatagagaggattttattattgacgcgcaagcctttgccgctaagtcaaagaacatcattggcaaaaactga

SEQ ID NO: 497050 - DNA, 333 bp, Stenotrophomonas maltophilia
atgaaagagaacacaattaagaaagaatatgataatagtgtttattatgtcgagtgtgaggcgcttgttgatagcattgttgaagaggtcgaaaggaatggtaaattaaggcttgggaggtatttgataatggcgcctggtagatttgccgatgacgtagatgaggtcgataaagtgatggatggtgttcatgatttatatcaatcgattctcattgaagtgggtggccccaagtgcattaaaagaattttagcgtcaaaaaatggtggggattggtattgtgaaagggagttaataaaaattctaaatttgtataaaaacagtcaactatga

SEQ ID NO: 497051 - DNA, 279 bp, Stenotrophomonas maltophilia
atgccagattttaaacatgttgatgaagctgacttctctgatgttgaacgcatcacgaactcaacgcttgttgatagagagcttgaagaactcggaggcggtggatttgaaggggttggttttttagacaaggttcgccgccacttgggaatgagcaataaattggaacgcatggatgaagcaaagagcatcaaggcctacaatgaaattgttgatgcactgaattcaattcctaagccccgcacaaaagaaaagctgatgaaaaaacttggcatgtga

SEQ ID NO: 497052 - DNA, 192 bp, Stenotrophomonas maltophilia
atgtcgcgtcgttctgacccgcaacgtgcgctttcaagccaggttccgcctattcgcgttgagcgttggtttctggcggaactgaagagagttgccgaaataagaggcatcgcgctctcacaatacgttaggcatgcgctgcgcgagagtgttcttgctgatcagctggaagaagagaagcaaaagctttaa

SEQ ID NO: 497053 - DNA, 195 bp, Stenotrophomonas maltophilia
atggatgaggatgacctaccacaatacatatgggatccaggggcttcccgcgtcgtctatgaagacgatagaaagcggaccaaggagcgggcagaatggatccagagacgctgggatgagcgcaaagaaagacgcgagctagagaagaacaccggccccgcaatggggcggagaacgccgccagggcggttgtga

SEQ ID NO: 497054 - DNA, 687 bp, Stenotrophomonas maltophilia
atgtcaatgaaaaaattagctgagagatgggtgggcaagagtttgattgaaccgatttctatgccgccagccaatttggaaaggccaaaaactaaggaggagattgaagctgcggctcttgctgagcacgagagtttaaaggggcatgcgttctactcatacagggggcagtgctacagctcaatgaaaaaattagctgagagatgggtgggcaagagttggattgaaccgattgctacgccgccagccaagctggaacgaccaaaaaataaagaagagattgaagctgcggcacttgctgaacaagagagcttaaagtcaaagggacaaattacgttctatccttacgatagggggcagtgctacaacaagggcagtagggcaattatggcttttgtgaacttgcctggatcctgcgctcactatatttttgtagaagacgtgggcaggtgggagtttgttcaattcccccacatgagcacagaaaagcgttgcgctgagcggtcgggctacagaaacgttgaagagttgcgtgccgatctcttcccattcttcagtagttacattattaaaaatgacttatttggattcgcgccaatgctcgggtcttttgtgcttgaccgcatggggacgcttccagcgcaattagataaaaacctaatcaatcttatgatagggagagggtaa

SEQ ID NO: 497055 - DNA, 231 bp, Stenotrophomonas maltophilia
atgagcgttatcaatctcgcagtcttcatcgccgtctatctcacccagctgaccttgctgttcctgtttgcccgcttctgctatcgcaaggctggcttcagcaggacccacgctggtagccctgctggtgccttcttcttcgccattggcgggctgattgcacttgtagcgatggtggcaactactgtcctggctttcatctcaggaagcatgctggtggcagtggcctaa

SEQ ID NO: 497056 - DNA, 138 bp, Stenotrophomonas maltophilia
atgacacgaccaattaaagcatttttcaacgtcgcgatcctggtagcaggtatggcaatggccaatcgcttcattccagttgcccaggtgacgttagaaagcatgtctcactcaatcagcgaaatcacaggcaaatga

SEQ ID NO: 497057 - DNA, 2256 bp, Stenotrophomonas maltophilia
atgaagtatcgagccatggccctcgccttggctcttgcttgctttcccacatacgcaaacgcaaacgagcctcaagacacagcggatgttctcgcatcagtgaacctctcagggagagaggttctaacggcgcgactgatcaaagcaaagaactcatcaatctacttgtcagttgaagactggcgatcactgccgaatctgacacttccattggaaggaaagacaggcctcatttcttcagatgatcttggtctttcagtgtccttcgatgaagcagaacaggcgttcaagatcactgctccagcatccttgatgacgcgtcagaacctctcaggagctcgcgtagcgagggtgacagaagtagacccgcagccaaaaggcatgctgcttaactacgacattgctacccgcacgaatgactctggatcctacgctgtgagcggtgcccatgatgcccgcattggcgtggggcctggcacgttgatcacaacggggcagttgaacacaacgaaaaatctgactgactacagacgcggcatcagcacttggaacgttgataatttgaagcgaggtgttgcagtccaggtgggcgatgtgttcactcctcgctctgctatgacaagcacggtcaatcttggcggtgtgcgagtcggctcagatcgaatgcttcgcagggatcaagaattcacgccggttccgctgataggcggtgtggcggacacacgcagtgccgcagaaatattcgtcaacaacgacaagatgagctcccgcaatgtggccgcaggcccgtgggatctaggtcgtgtgccagtatcgccaggatcaaatgatgttcgggttgtcatccgcgatgagttcggaagagaagaagtagtcagccagcgcttctacatgacgaactcaaacctgcccaagggccagagagaatgggacattgcagccgggcttgtgcgtgtcgatagtgatacatacaggacgcctgctgtcactgccaagatcgaacaaggcgtaagcaattattggaccgcaggcgcaactttgcagactgacggcacgaacacaaacgttggcctttcaaatcgaatcatcctgggcactgcgggcgctgtcgctgttgaagcagctaccagcactacagcaaagggcaatggaagctcgctatcggtcttttacgaatacagggctcgcaactgggcggctcaagtgggacacactcgctacagcgagaactactggcagctatcacaagcaaaccaggctgctggttccacgctttctacaacgacaacgggaagcctttctctgaatccactaggaaagccatggtctctatctctggccgctgctcgcattgactactccacgggtgccagtcgtcaacgagtcgaccttgcagggagatacaggagcaacaggagcgaattcgggtttggcgtgggaagggactttgaaacaaaagaagatgcggtctacgtgtcgttccgacacaacttcggcaacacctcagcttcaatctcagcgaggcagtcccctgatctgactgtgcgcgccaacgcccaagggcaggcagatatctcagatcagcgggtgagatggtcagcttcagtagaggacagggaaagaggggcacgcagccaggttgaggcttctacagcaacaaaacgcctggacgttcgtggttccatcactgatgacgaacggggcacagagatccgcacgcgcacacgaggatcattatggatcggggagggcggtgtcacagcacaacgctactcaacaggttcatttgcggtcgttgaggtcccagggcaacagggcgttccagtagctggctctggagcgttcaacgtcagcactaataagcggggcattgcagtcctaccaaacgtccgcccactcactcaatccagggtgtccatcgacactacgggtattccgtttgaagtcggcatagagacgaatgccatgccttacacagcgcgccgcaacggcggtgcaaaggtgaagtttgatgtggccagcatgagcatggttgaaatacagcttacgtctaatggtaagcctgttcagtcttctgctgtagccgtcacagacactgaaagggtgatcgtcggtcatgggggtgtcgcagttctaatggctcctaagcctggtcagagtatttcggttgaatttccggctggaggatcctgtcaagctcaactgccagctgttctgcccagcattcaagatagaaatgaactgatttgcctgtaa

SEQ ID NO: 497058 - DNA, 639 bp, Stenotrophomonas maltophilia
atgcgacaattaatattggctgtagcgcttgcaaatccacttgcttcacatgctgtagaagtgtctcctgttgttgctatctacagtccaggccaaaaaattggtgttctgtcgatcactaacacggacgcgacgccaaaaacctaccaagtctttgccgatgcctggtcagtggaaaacggcaagcagacgagacgtgaaactgacgatctccgctttgcgcctagccttatcacgatccagcccggcaagcgtcaggtcatccgctatctaaaatcaaacccggctgctagtgagcaggcataccgcatccgagttcaagaaatattatatcctgaagtagcaaagctcccaggcctgcatcaaaccgtgaaaatagactccccttggttctggcgacctaagggcgcgcaacctcagctttcggcaagctggcaggcagggagtctggtaattcaaaacaccggaagcgcaacagcgcagcttaccaatctgacagccgggcctgagaataaaaacgggctcgtaggttacgtgttgcctgccgaatcgttcaatctgtcattgaaggcaacatcaccaccacgctctatcagagtagttgtaaatggcgtagtccaagaattggcggttagatga

SEQ ID NO: 497059 - DNA, 699 bp, Stenotrophomonas maltophilia
atggactggggtttgaagatgaatcacatttttaagggggttttgcttgctgcgtgccttggagctttgcccctggcaagcgcaggccagggcttgagcaattcaaggattgcggatggatcgtctcatgcctttgctgtgacttatggttcctatgccaatcaagcggacgctgacgcagtgatggcgtatgtgaaaaggtccaaaatccctagttttagcgaaccaacggtcattaatggtcggtcagcgtggagcgtgcgtttaggaccattttcaacatggcagcaagcagaggatgcgaaagcgaaggggctcacgctgcgtagtgatgttaaagcgcaaatcattacgctagattcaacagtcggcccagcggctcagccagcagtgatgagggcgacgcccattgaactctttcaggcctattcagaaaacgaagtgagggcggatcagaaatacaagcgcaaaagaatgcttgtgaccggtcagatacgttcaatccgttcaggggtcggggatcaacctcttgtaattctcgctgggggtggtcgcttcgaggatgtttacgcgcgggatattccagctgcgcaggcggttcaattgaatagggatcaagttgttacactgctgtgcgaaggatctggcacaatagcgtcaacgccccagctgaagggctgtattgtctacagtctctaa

SEQ ID NO: 497060 - DNA, 456 bp, Stenotrophomonas maltophilia
atgcgaaccataatttgtttttgcattgcaacagcattcgtgtcatttgccgctaatgccaagccgagccttggttgccaggaagcaatagggaaagccaagcacgtgcaaatcgtctggaattcagcctcccaggatctgccggcgacggagcatgtagagacctctgttggccgattggcgctggcagcaggcaaggatggcttcactgccctgtccctcaatggcaagcctgtccaagttccgtccagtgccgtgggaacgctggcctatgggcaggtctatgacctgggcaaacagatcctggtggcagcgttcgtggagcgtcctgatgacagcagtgcggtccccagcgaagtgcagttgctgttgtcaggcgatgggagcgtgttgaacagcgcagttcactcagggactgctcccagcaagggcttctgctcacgtgcagatggctga

SEQ ID NO: 497061 - DNA, 1353 bp, Stenotrophomonas maltophilia
gtggttgaacaagttagagaccaattgcagtccggcgaatttcgtgtggagctcgttgactgtcaagtgactcaatgcgttgacgacgatccgatcaccttcaaaggtgttggcatcgtctctcagaacaaggatggggagcttgagtttgttcttgtgtgccaaagcacagaaggtccttacgaccgctacgctcttctcaataattacatttctgggaagctcattggagacgatgggctgtattcaatcaagggccaagatcacaacgggcatgagtggatttctgagcttcaactcatcaaccgaagccatggtcatagcttaagaatttccgccaaactaagcgagttgaagactgcgcgctcagttcatgcaaacaagaatggcaaggaatactgtgggtggtatttcactggcgagctaatgcttccatttcgtccgcatgagaatgatttcgagtgtgagctggaaggttggacgtggaaggcgatcaaagaccatcatggcaatgtagagcttcggttcaattcgctcgcgcctgactttgaaaaaaatagccgctcatttttgaccggtgtcagcctgctcgctggacaatcccccgttccttgctgcagctggcatatcaagggtgataaagaagaagtaaccattctgccccatgggctgcgtcctcaggggagtcgactgcttgagttcatccccagggaatggatctatcgcgggcactggaacgcgtttctgagtctgtggattaacgctaagtccgatgcgacaactagagatgttcaagaggtcctgtatcactatttccatcgcattttaaagacgtatcaaaatgaaatggagaacagtgtccaggtcatcgcgtcctctattgaaggccttatcagcacgttctatcatctcgaaagtgacattgacgaggaattttcagcccttcttgaagacgctattgccaagatttctgcgagcgatcttgagatagacgacagggcattgggtgtcctcaagagttcgctgaagaacagcaagttgcccaagctgaaggtttcattccgcagactaattgcggatggagttctgaccaaggacatgctcgacgcatgggataaggttcgtaacaaagcggcgcacgggggacttctagagcctaccactgatgcaacgcagacccaccttgatgggttcttccattgctacgaggcattcaagcgcattgtttttgacgtaatcaagtatgagggaacacatcgagattactctctgaagaattggccggtcattgagccgcgcgttgagcatgaggctgagagcgagactgagcaagctgtggtgacgcagtcataa

SEQ ID NO: 497062 - DNA, 729 bp, Stenotrophomonas maltophilia
atgccggttcgcacattgaactatcttgcgctccttatgtttggtccgttcgttgcttacgtggctgctggaattgcgcatgggtttacgccactcggatccgggttctacatgcttacgctcagctacgcgcactggttgggctacagtctcattcccttgattcttgccgctttgatcatgatcaagagtcgggtcatcgcatgggttgtcatgatcttgggcggagcctacttgggttatgtaactcagccacagcatgtagaagccagggcggcagcacctatcacatcgccgcagagtgcggcggaagatcgcttgcctatcgtcaacgccacagtagagctacttccacccgacaagctcgatgccactgtgacgccagagaccataaagttgatggaagggcattacatccaacagatcaaggacaatgtctctgcgcgatccggtggagatcaggctgctgtcaacgccgtaaaggttactgccagcacgatgcgggtggaagaatctggacacattgtctacattacagagcttgacacgtctattgatgcttcagctgacaagatcccgtatagccttcgcgtcatctggaacatcgatgatggggcgcttaagagggttcagtgcgtaactaagaatcccaaagatccttggcgtaatggagcgtgtggatcgaagatcgcagaaacgttccgctgggcaggatggcacaaagattga

SEQ ID NO: 497063 - DNA, 948 bp, Stenotrophomonas maltophilia
atgtgttattcagcagaagtgtgggctgactaccacacttatgtgcgccattttggcgctgatatcgatatcgccgcgttcgtccaaatatatttgcgacgagccgagggcgtgaagtggaaaattcccaagggcatggatctctccttcaaagaccctaaaacgcctgaggaaaagcagatccatgacctcatcagaagctataacgcagaggtcattgcagctagcgaacaagagatgttcaagcagtccaagagagtggctgacgcagaacgaaagctagctgtcaaagagacgaaggccgcgctgacagacgtgcgggttggcacaaacaaggtcaaacagatgaagcggtggattgcagacgccatacgatcaactgtcaatcctgaaaaggacaacaggatttggcccgattggtatgccccagttctcatcgttgagaacggcagaaaaattgtcaggccgatgcgctatcactgccgtccagctgggcatgatccgtcagtggacaggacaacaaacggcaaggtaagcggcacctacaatgcgcggcgcgacaaccttacccggttctggcgtaggcaattcggccatacccatgggctcatgctggcagagcaattttatgaaatggtggaggggcctgatggcacatcgcatgaggtccagttcaatcccagcactggcgaaaccatgtatatcgcatgcttgtggtcacactgggtcgatcccacgggcgtagaacctgacctttattcgttcgctgcgatcacagacgaacctgagcctgaggttgctgctgcgggccatgatcgaaccatcatcaacatcaagccggaattcgctgatgcttggctaacacccgaccctgacaacctggaagcgatgttcgccattttcgatgatcgccgccacccctactatgagcatcggcttgcggcatga

SEQ ID NO: 497064 - DNA, 213 bp, Stenotrophomonas maltophilia
atggccctcccactagctgaactgctagaaaagctgaatgcgttggaagaagcccttcccggcatgatccaggcataccctgacccagctgacttctggcctgcatttgcgggccaggctgatctgattgaggacgaggctgggcagcactcagacgaagtagcggggcgcattgatgcgatgctcgcccggcacaacctcaggagcgagtga

SEQ ID NO: 497065 - DNA, 387 bp, Stenotrophomonas maltophilia
atgccggtgcgcgttacatgcgggttcccgagccctgcagaagacttcttcggcactcaggatttgttggacctcaacacccgttgcgtagacaaccccgtggctaccttcttcgttgaggccgacaccggcacttccatgatcgagttcggcatctttccgggtgacaccctggtcgtggatcgcagcaagacgccacgacacggcgatatcgcgatggtgctgtgggagggcgggttcacggtgaagcagttgcgccgcgtgcgtggccgctttgaacttcactctggcaatccggagaacgctccaattatggttccagaggatgtggaacttgatgtgtggggcgtagtgacgtggagcctgcgaaagcagctgaggcgctga

SEQ ID NO: 497066 - DNA, 1263 bp, Stenotrophomonas maltophilia
atgctaggccttgtggatggcaacaacttctatgccagttgcgaacgtatcttcaatccttcgttgcgcggcaaacctgtcgttgtcttgagcaacaacgatggatgcgcgattgcacgcagcagcgaagccaaagcactcggcatcaagatgggtcaaccgatacatgaagttgaaccacgacttcgacgccaactcaaagttcagtctgccaatttcgccctttacggtgacattagcggacgcatcgtgagcattctgcaggagctgtttccgcaggtagaggtctacagcatcgatgagagcttcatatccttagatggcattgcgtcgcgtgacagagagcgcattgcgaaagaggccagggcaagaattatgaaatggactggcatcccgtgttgcgttggcatcggacctaccaagacattggcgaagctatcgaacaagcgggcaaagagcactgttgatggtgtgatcacgacactccctggtgctgctgcactcgatgctttcgctgttgaagacgtgtggggagtcggacggaagctcacggccaaattgggagcggacggcatcatgtctgcaggagatctggtgcgcgctgatccagagactctgcgctcgcgctatggcgtcacgcttgccaggacgcaacgggagcttcagggggtcatgtgttctgatctgctcgaagaagagcctgatcgacagcagattgtggtgagcaggtcattcggcaaggaagtgattgagctagctgatctacagcaggcagttgccacgttcgccatcagagcgatggaaaagcttcgcaatcgatcactgaaggctgctggcgtatgggtctggatgaatacaaatccctttaagcaggacgcagcgcagtatcaccctagcaaggcgttcaacttcatcgcgcccaccgctgacactcgtgaagtgctgatggttgcgcaagccctggtcaaggcaatgcatcgtcctggctaccgctacaagaaagcgggcgttggcttgctcgatcttacagccagtgatcaggtgcaggcggacctcttcgcaaggcctgatccccgctctgcaaagatgatggaagtcctggacgctgccaaccgcaagttcggacggggtgcgatgaccttcgcgtcagctgcaaaaatgcgtcgaggaagcgaatttgcggtgcctgtttgggcaatgaatcaaaagcacctgtcaccggcttatacgacacgctgggaccagcttcttaaagtcaaataa

SEQ ID NO: 497067 - DNA, 426 bp, Stenotrophomonas maltophilia
atgtcggcacagaagacggaaggtcagggcaaaaaactggataacctggctgctcagaagaagaagctgctggaagaactccagaaaattgaagctcaggaaaagcaggaacttcaggcggaagctgaaagcgcccacgcaaacattgtgagcctcctgtctgacttcgctgattacttcgatgctcgccagaagaacgaaattgcccgtttcgttggcggtgcctcacgtccgggccgcaaggctggttcttccaatgcctctgctggcacccgtggacctgtcgcggcaaagttcaagctgcccagcggtgacacctggagtggccgtggccgcactcccacgacctttgcggagtgggaaaagtcggatgaggccaagaagtggcgtgatgacaatcccggccagaagtggcctgctgcctaa

SEQ ID NO: 497068 - DNA, 357 bp, Stenotrophomonas maltophilia
atggttcgtcagctttcattcgatttcgagggtaatggtcttgagggccttccctcgatcagtccaggtgcggttttgcgtgcttgtcataagacaatcacagagtggcgcaagttcgactatttgatgcgtcgttctccccctccacggaccctgctggaatacgtcatggaggaaacaggtcaagatgaagagcagtgcgccgccgctctggaagccgctgacgatgctggccttatcttctacatgcctggatcgacggtcatcaaacttcaaccagcgggcctctatcttttagcgctagagctagtagacgaggaccagaggcgttctcttgaaacccttcgcctgaattga

SEQ ID NO: 497069 - DNA, 1011 bp, Stenotrophomonas maltophilia
atggcttctaaaaagaaatctacgccacggggcggcacggcaacaaaatatgatgactacgcccagctttatgctgatcgcgtcatcgcggcacttcaggaaggaactgccccctggatcagaccgtggaaggccggagtatcacggcaaccaggtgagggtatgccttacaacgcaatcacaggcaaaggatactcaggcgcaaatgccatgatgttgctgatgatgcagggagcaaatggatacacagacgaccgctggctcacatttaagcaagctgcggatctgggttgccatgtccgcaaaggggaaaaatcaacaacgtgcgtcaagtggattgaggccgtagacaaagaggaggatgccgatcctgctcagaaaaagcggatgatccccatccttttctcagtctttaatggaaatcagattgagggaatgcccgcagcacctgttcgtcaactgccacaggaggctgagcgccatgctcagtttgatgaactcctaagagagtcaggcgcaataattcgccacgatggtggcgatagagctttctattccccgcatcgcgatagcatccatttgccacctagagaggccttcaagtcaactgataacttctacgctaccgcactgcatgagctggggcactggaccggccacaaatccagacttgaccgcgatttaacaggagcgttcggaagcgagagctacgcaaaagaagaactgcgcgcggaaatggcgtcaatgatgattggcgagcgtcttggtataggtcacgatccagggcagcacgtagcttatatagcgtcgtggatcaagatcctgaaagaacatccccgagaagttctattggcggcaaaagacgctgaggctatagccggtcacttgggtgttgcaaagtttgagcacgagcctacaaagccgcttgagaaaacagctgaaatggacagtccgccagccgtggtcgccaagcaaagatctaatagcaggggtgttgagctggtcatctga

SEQ ID NO: 497070 - DNA, 1866 bp, Stenotrophomonas maltophilia
atgcgtatagataatattccatcagttgggagttctgtcaacacctcaggacactttgagccaagtaggcgttattcacgcgtgcgcggcgcgccagccagtgcggctgttgccttggagaacgacgcaagcacagtctcccttgaagaggtcagaaaaaatcaaagggaaaagatcgaaaaagagtgggttgctgcgcacgaagtcgattcacgaggtaaggtaaaaccgccttcgcttgaatatatttttggaggccaaatcacatcaggaaaaattggcaagtgggcttgccagtcaactgaagcgtcaggggcagtaattcacaaatgggatggaacttattggaaggctgtcagcactgatgtagggatcggcgtagcctcccaatggctgaaaagcaatgcaaaacacgctgtgagccagaagagggccgcatcatgttgggaacatgcaaccgtggacttgagaagcctcaatcccctgcctgtccagagcgacaaacgcgccatcgttccttgcgctgactactacattgaagtcctgcccacaggatttcaggccctgaagcctgatccttccctgggaatgacacatgcagttcgcatccagtgtggcgcttcaggacaccgcccttacaacactacggcactgccaaaaacgtcaaagtttgcgcagttcctggaacgtgcattgcctgatcctgaggttcgcgaattagtgcaggaacaatgtggaatgacgctgttgccaggcaattattcaaaagctgcgtggtggtatggcgcagccgggtcaggtaaatctacgttggcagagctcgttgaagcgatgcaccggcagtctgttcgcttgagcctagaggccttgggtgatcgcttcagtcttgagccgctcgtaggcgcaagcctgatcctcgttgatgaggtggagtgtgagcgttgggcagaagggcgcttcaaaacgcttgtttcaggcaatggcatcggcatagatcgtaaaaatgaaaaagccctcgctagctatcactctaaagcgaagtggctgattacaagcaacagtgctcctttcgttcgcgacaaatccgatggtgtgtggcgtcgtcttacggtcgtgcaatggaacgttgtcatccccgagagtgagcgcatccctgacttccagaagaccatccttgagactgaaggcaagctagtcctagactggatgcttgaaggtgcaaggcgtgttgtagctcgcggtcgtccgctgtctgatcatgagctacctgaagctgccagagccgctaaaaagcgagctcgcaacggctctgacagtgtccgtgcgtgggcagatgaaatgcgtgttgtctctgagcctggacactgggttcaactgactgaaatctacgcaggctatgaagcctggtgcggacttcagggctatcaaccaggtgaaatccttacaccacgccagttctggcgcggtatgtcagaagctgggctggtcaaccccgctcataaatcaaatcgcagggttggaggcaagcaggcggacttctatgaagtgatgatctgtggccgtgctactgagcagattagagagtgggcaacgacagagcaagtctcttctagtgacaaagcagaagttgagcgcggcgtggtcttctcttcatatcaggcgtggagtcagaagagggtggagctatcgctcatgaagccgtcagaagtgctgaataaatcggcattctgggaagcgatggttcaatctggaatgatctgctatcagccttcgggtgcttgcgatgaagcaaaatgcgcgctagaaatcctgggctcaaagcagtatgaaaagctcacagacgcagaggccgggcaatggacctaa

SEQ ID NO: 497071 - DNA, 768 bp, Stenotrophomonas maltophilia
atgagtaatgtattcccactgtcgcgtgatcccgtatccgtgtcgccgccgcctgacaaggcgcagtggcaagaggaaatagaagaagctaaaagcggggttagagcaaaggtcagcaccaaagctgcagccttttatttgggtgtccattacaccaccctaagggcatgggtgaggacaggggaagggcctgagccggtcaaaaatccttcgcgtcctggcaccacggctgtaaatcagcacatgggttttaccttgcagtcccttgatcgcttcttaaaatcgcgagaagggtcctcgataacgagagggaaaaggagcgaggttgaatccatcttgcgtgatgttgatcgcatccaagcgacgattgaattgaaaatggctgaggatgctcttgcaaaggctagggaaaaggcaagaaggcttggcgtcctttctttcaatggtctggacggagtttcagatatccacccttggctcgttatcgaggggcggatagcaggtcatctttgggcgctgccagaagagcaggtggttcagaatgatcttgaagacaccgttgaagcttccttgattgatgctcttgctctcccctggaagagtgatgcacatagacaaccctacgctgaagtcgctcagtttgagttgaactccctcatcgccgcgattgaggcggaaagggcggttcaaagagccgctgatgaagagcggtttttggatgttaatacacccaaatccattggcattaaagggccttacaggctttag

SEQ ID NO: 497072 - DNA, 1731 bp, Stenotrophomonas maltophilia
atggcacttcgcttgaagttcaatgaagagcagctgcgacagcttcgcagcactatgcgtccagcgctagacaagagcggtagtccagtggtgtccgcaagaggcggctacgccgttcttgagcccaaccctgacgggaaggcctggaggttcctggacgcgagcaaggaggctcccacgggctttggcgtctatgtgggcaaaacaaaggccagctacgaggtccagcgcaagatcaacggcaaggtgatgcgcttcaccgtgggggacactcgggatctgtcccttgaagaagcccataggctggcccgccataaattccaggagtccaaggaaacgggtgcccaccccaaggtcaatgagcgcgcagagaccaccattgaagaaatgaggcaattgactgtcaatggggctataaccctctatcgcgacatgcttattcgtcgcacgccccctgcggcggagggcactatcaagatgctcaataatacaatcgcgcgcttggatcgtgatgaggtcaattttggcagcaagcaaataaggcacatcacagaagaagatgttttaaaggcattcaatgcaacttggctctctgccgcgcttcactcaaatcggcttacgcctgaaataaaagcccatatggagaaggtggggcgggtgaatttgaccaaagaagagttggataagctaggggtcactagcgaagccatgcgggttcgaattaaggcggcaggcgtaagtgccgcagaacaaacctttgctgcagcatcgcgcgctgttcgctacgtgatcgataaggaaaagcggcaggctaaaaaagcagggcgcaatccaataatttttggaaatgattttcaggtcctttgggaagaggggcggatgcgggatgccagggctcttcacagctactacgttaaagccagggttcgcaatccgctgggtgaggcggatggaacgcttggcgcagccattgaatacctctggagcaggcgcttggctcagcgaggccagaacgagagcggagtctattacctgctttcaaccctcttcttgggcgctcgcagaaatgaaaccgcagaattggcatggttcgaccgcgtgccagaaagcgagcgtgaaacgacctcatgggtgtggcttgatgctatggatcccaaagcccgcaaagaagggcgcacgtcagtaaatccgatgacagggaaggagggggcgcaagtattctttgctcagacaaaaaacaggcgcgatcacaacatgccgctgggcccgttctccacagcccttatgcgtcaccgctttgagaggcgcttggaggcggatgacccccgcgcccggtgggtatacccagcccgcagtgcgcgggccgcagaggggcattacaaggacagcaaggccattatgaaaggcctgggcgagaagctgtctgttgaattcgggccaacgccccacgatttgcgcaggacgctaggccgctacgcaggtaagcttcagatccctgatcgcatcgtaagcaggctctttaatcaccttgctccaaaagatccaacggaccctgacgcaggctcggcttccaccattcgctatcaggagccggagtggtatgagctgcaagaggctctgtctcgtgttgagcagctaatggcttccagcgcacctaccttctacaatcagttgaagccagttgactggcctttgctgcctgaaaaggaaaaaggtggagtggatgagtaa

SEQ ID NO: 497073 - DNA, 612 bp, Stenotrophomonas maltophilia
atggacaagatcgacttcaagaggcgcgaccgggcactctatcacccgcccgccggccagttcgtaccggtcgatgtaccgcccctgccctacctgatggtcgatggtcgcggcgacccgaacaccgccccggcctacctgcaggcggtgcaatggctgtactcggtgagctatgcactgaagttcgccctgaaggccgggggccaggactacgtgatgccaccgctggaagcgctttggaccgccgaggatccgtcgagctttgtggcacgccgcaaggatgagtggaggtggacggtgatgatccgcacgccggacgggatcagtccagcgcagttggaggctgccattggcaaggcgacgaggaaactgggcgacgttccggccagccttcgccacgaaattctcgaagaaggcctctgcctgcagaccctgcatgtaggcgcctacgatgacgagggtccggccctggcccatctgcacgacgaactgatgcccgcactgggttacacctttgccggcccccatcatgagatctacctgagcgacccgcgcaggaccgacgcgacgcggttgaaaaccgtgctgcggcagcccgtccgcgtggaatga

SEQ ID NO: 497074 - DNA, 345 bp, Stenotrophomonas maltophilia
atgcccctgattgatcgtttactgcgctggaccaccctgcccaccgggcgccgcgccttcgcgctgctgtgcagcgtgttgctgcttgtactggcctgcaatcccgacctgctgccgctgctgtcgctgatcgatgcactggggatggatgtggtggtgttgctgttggctgcacaggtaacggtggtactgccctggctgcgggaacgcaccgggcgatggttccggctggccatgcggatcgcggccggggtgctggccggggtgatcggcggctatctgcggcaactggtgatgctcgtgctcatcagatccggcacgtactgcgctatatatagggcttga

SEQ ID NO: 497075 - DNA, 351 bp, Stenotrophomonas maltophilia
atgctccgggcctgcagggaagacatgaaacagctcgctatcacgctcggtgcactgctgctgtccggcagcgcatgggccgatacacaccagaccggaaaaatcaccaaactggttgtcgaatccacgttcgtttccgtatggctggaaggccagcccaccaacaacgagtgtgcttccgacgggcgctggacaatcgatctggccagcgacaaatccggacgggaaaagtacgcggccatcctgtcggcggcgtcatcgcggacaccgatcggcttccacgctctcaccagcgaaggttgcggcgtgttcggagcaaagaagatctactatttcgatcttgcttattga

SEQ ID NO: 497076 - DNA, 360 bp, Stenotrophomonas maltophilia
atgaaccgcgttctgatgcttgcgttggccttgtccagtgcctcatgtcgcgccggtgaggagctccctgggccttgccaggcggcaagcagtccggtggagtccattgcgccggtcgtttccgccgcgactgagatgcaggtgcgtggctctgtcgtggcgaccgtcgtcgttgaagaggatgggcgggtgacaaatcccgtcatcacgcggtcacagtttgaagcgctggaccgggggagggtcgacaatgctgcttatgagcgcgcagccttggttgccgtggcgaagtggcgtttccctccggtcccatcccgctgcaccaggaaggtcacattcgatttccaacgtctggattga

SEQ ID NO: 497077 - DNA, 981 bp, Stenotrophomonas maltophilia
atgcgcaggttcgggggaactgcaggcggcgtgtttacccgcttcaggagatgtggagatcgaattcgcaagctgggggcatcaggcgcctggctgtgttgtgtgctgctgatcggccttggcctgtcgccaaccgcagtcgcccagaccactgtgacgtacatccacactgacgccctgggctcggtcgtggctgagagcgatgccaacggcaatgtgatcaagcgctatgactacgagccgtacggggccgtggtgggaggtcaggtcacggacgggccggggtataccgggcacgtgagcgactcggcaacgggcctgatctacatgcagcagcgctacatggatccgcagttgggggtgttcctgtcggttgatccggtcacggcgtatgagcagccggtggggcagttcaaccggtataagtatgcgaacgggaatccttacaggttcacggatccagatgggcgaatcgtcaagtacgcatttgaaggcggagcgacgctgcgtgatggtgctgccgtgctcaaccattggatgaagtcagaaaccatcagctctgaactgaagcagattctcctatccgatgagacctacaccatacagttcaatcgcaatggtgattttggatatgacgagaacaaaagaatcatcagcattgatgtcacctctggacttcgcgtcaaatcctccggggagatccagtctcctgctctggggggcggtcacgaggtgagccatgctgcccagcatgatcgggttggattgtccgctttccaggcttcgcttgttgcgccacagtccaactcggagagcaacggcgtgatgcagatccgagtcggcgtatcttcggaggaggcgcgggctacgggggtggagacccgggccgcgcgtgagctgggggagcctgcccggaagagctacagcgacacgaacggcacggttaatgtctgctcccccaccagcaatcgggagtgttga

SEQ ID NO: 497078 - DNA, 2871 bp, Stenotrophomonas maltophilia
atgaagcattcgaagttgagcctggccctggccggactgatcgccgttggcgccatcgcggcggctgatgacgtcatggcaatgagttatcacgtgcagggggatcgcatcttcctgagcggcggggtgacctacgccgatgtggtgtcgttgcccgcgttgctggccaaggcacaggccgagggccggccgatccgcgaagtggtgctgcgcacctccaatggtggcgcgctgatcgccggcgagtggctgcagggcgtgatccgcacgtccggcctgaacaccatcgtgtccggccactgcatttcgtcctgctcgatcatgcagtccggtggcgtcgaacgctatctggccggtgatctgccgatcgtcgattcggtacagatccacgcggccagcaacagcggcaaggtgatctacacgccgtcgccgcggatgacccagatctataccggcaactacggcggtggcatcgatgccgggctgctgcacaaggccatgtatgaagtcgtgcagcccaacggcctgctggtgttccgcgatccggcgcgcaccacgggtgcctcggtcactttcgatcctgatggcagcggcagcaagctggagtcgttcccgggccaggacatctacagcaacagggtcatcaccgccaagggctaccgcgacccgggcgatacattgaatgtcaccgccaacgtgagcggcgacatcaacccgggctacctgcgcaccggtcgccagctgcagaccttcgtcgatgatgatttcgcgcgctggaacaccaactggcagtccagctacatcaacctcgcgcagagcatctacaacgcgtccagcaatggtccgcagggcatcggcgcgaactcggtacaggactaccagaacgatcccacatacaaggccctgctgctgtcgaagctgcgcctgggcgacctggatgtgtccacgctggacaactccatgggcgtgatccgcgtgaccaacggcgcgacatggcggacctccgcgaccaccggtgccgacttcatgctggtcgacaacggcaccatcgcgctggaaggcggcgccctgcgcgcttcggaggtgcgggtaatggccgcaggcatgctggtcggcaatggtgacgtggccggcaccgctatggatctcagtgcgttggccagcggtacccgcccgtcctggcgcgaggatggcttcaaccgcctgcgcgtgtacgggaccctgatgccgcgcggcggcgatctggtcacccatggctacgtcaacatcatgccgggcgggaaggtgctgttcgatgtgaccgagaacggcggggcgggcagtggccgcctgcgtgtaggcagtttcttcgacagcaagcagaccgacggcgcgctggtgatctccaaaggggccttcctcgaactgaacgtggcgcagggttactacggccaggacttccgccgtgacctggtgcagggcccgatctaccagggcggcttcgaagaggtcgtgcgcctgggtgacaccggctacagcgccagcatcaccggcggcgaagtgttccgcccgcgccacaactcgctgctgagcttcaacgtgaagcaggccgctgacggcctgtggctgaccgccaacccgggtttcgaccagctgggcctgttcaccaacggcacttccggcgatggcttgggccgcgcgctggcggccgcttccgatcgcagggatggtggcctgaagtcgctgcttggcgccctgcagttcgccgaccgtgacgtgatcgcacagcaggccggtgccctgcgcggtgacgcgcacgctaccctgcgcctggccgacaacgcattggtgggcagcatcggcaacgtggtgcagcagcaccaggccgcgatgcgcagtggtggtgatgccgacggcctggcctcgcaggccgcgcaatcggtgtcggcgcagccgggcatgcgccacggcagcctgttcaaccaactggccatgcatctggtcgagccggcggcgggtggcggtgaaggcagtggctctggtcgcaaccatggcctgtgggcgcgcggtttcgccagccacggccgcatcgatgccgacggtggcgtggcaggcttgagccataacatcggcggcatcgtcgtcggcgccgatacccgcgttgccgatgaccgcgtcaccctgggcgtcagcgtggcagcggcggatatgtcgaccaagggccgcgacggctccgacttcagtggtgacgtgcgcgcgctggacgtgggcggctacctggacgcgacctattcgcgcggctatctgtcggcggcggtgcgctacacagacctgcgtcacgacacccgccgcagcgtcagcggtatcgatggcctgcagcagccgctgcgtgccaagtacagcaacgatgcgatctccgcgcgggtggagcacgcgttctcattcaccacgggcaagggcctggtgatccagccgctgttgccggtggtggactacgcgcgtacctcggccacgcgcttcaatgaagggcagggtgcgggtgcactggtcggtcgcagcggcagcctggagagcatccgcgtgggcgccggcctgcagctgttcaggaccttcgaaggcaacaacggcgagcgcattaccccgcgtgcccgcgtggtctggcagaaggaactgggcgactcgcaggcgcgctacagcaccggcttcgccgcagcaccggatctggtgttcggggcaagcagccaggccgtgggcgagcaggtgctggcctggaacctgggtgtgaccagccgcgccagcgaacgcctgtcgatcatggccgactacgtgggcgagcgtcgtgacgggcagatccagaacggcgtgatgctggggctgggttacaagttctga

SEQ ID NO: 497079 - DNA, 969 bp, Stenotrophomonas maltophilia
atgagcagccaccggcacacggaagacgcctcgctgtttgcacgcgccagcgcctgggtggcgcggttggaggccccggactgcacacctgccgaacgcgagtcgttcgaagactggctggctgaagaccctgcccatgtcaaagcctgggcgcaggccgaagatcttttccagcagggccagggcctggctgcggacccatggctgcggacggctgcggcgcgtgcggcacggcctgcccgacgccgctggctgcctgctgcggccgcggccgctggtatctgcctggccatcggcgtgggctggatggtagcggtggatggcaacccagccccgcagcgctttgccaatgacacgcatcaggcgcagcggctgaccctgcccgatggcagcgtagccatgctcgatgccggcacgacgctgcacgcacgctttggctggcgccaccgcgagctggacctcgaacgcggccgcctgcagttgcaggtcgcgccatcgaacaaagcactgcagctgcgcgccggcaccagcaccatccgcgatatcggcaccaccttccaggtcgagcgcctgcacgatggcctggtcgaggtcgcgctgctggagggtgcggtggaagtcagcaacggcgccgcccagcacaccctggcccctggccagcaactgcaggtactcccctccgggcgcatccagcccggtccagcgctgtcctccacggcagccgccgagggctggctgcatgggcagctggtcttcgatgccaccccgctgtcgatcgtggtcgaacgcatgaaccgctatggccatgcaccgctggtgatcgccgacccggagatcaccgatctggcagtcagcggcacgttccgcgcaggcgacgcacaggagttgctgtccgcgctggaacttggctggtccattgctggccagacgcgcccggatggcgcgctggaactgcgccgcacgtactga

SEQ ID NO: 497080 - DNA, 2787 bp, Stenotrophomonas maltophilia
atggcaggaccaggcgcgctgcagtgggggctgctccgccccctgctgtgcctggcgctgctggtcgccgcgccgcctgccgccctcgcaggcgatccggctgccacccacgactaccgcatcaatgctggcccgttgccctcggcattgcagcaatgggcacggcaaagcggcatcgctctggtgttcgatgcccgggaactggcggggctccatgccaacggcacccatggccaggccgatccagcatcggccctgaaacaactggtcgccgggatgccggtgaccatccttcgaacaccgtccggtggcttcgtggtccgccgcatccgcgtcgcgcccgccgtcgcgccgccggttccggcaacggtggcgccgcgcccgcgcatgcccccgcagtcgcccccccaggtggacctggcgccgatccatgtcaccggcagccggttgccgcgcacctccgtgcagaccaccctgccggtgaccacgatcgatcgctcagatatcctgcgcagtggctacggcagcctgttcgacctgctgcgacacctgcccggcatgaacgggctgccagcgatgagcagcgcacgcagtggcgattcgcagtacctgcctgtcggtgcggccgccaccaccagcctggatggcatgggaccgcgcgccaccctgttcctggtcaatggccggcgcctgccccgttatccgatggtgtccctggaacagggcgggctcaccgacctgggcggcattccactcagctttgtcgaacgcatcgaactggtgcgcggcggtgcttcggccatctacggtgccgatgccatgtccggcgtggtcaacatcatcctccgcgaccaggccgacggcccggaggcaacgctgcagaccggtctgagcagtcgtggcgacgccggccagtaccgcgtgcaggccgccaccggaggcctgcgcgggagcggcgaccgctggttcgcaggcatcgacctgcatcgcgtcgatcacctggcgggggaccagcgtgactggcacgccgagacgtcgcagtacctgatcggcgccttccgcgatggcgactactggcccgctacgcgctgcgacggaccattgaaacgacgcaatggcgcctgctggttcgacagttcgcgccctcgttcgcttcaaccggcctccgataccgcctcggcctatctgcgctaccggcatgagcgtggccagggacgctacgtctatgccgaagcccgcgccagccacaaccggcagcgctttgacctgggcccgaccgccgtcgccctcggcctatacggctacaccttcaacagtgtcctgcgcgaagccggcaatgtgcgtccccaggtccgtgccaccgacgccgatctcaccctgggcatcggccgggaccagggcagccacagctgggacgccggcatcagcgcgcagcgcagcgacgtcaccctggccacgccgggcaccgtgcgcgccgaaccgttcatcgaggcggcgcagtcgctcaggttcctgccaggcttcgatgcattgcccgccgatgaagccacttcgctgttcccatcgatccgcaaccgtggacttaccgagcagtggcagggctggtggggcatacagcgcgcattgatgccgatgcggggcggcaatgcgcagctggctaccggcatcgatctgcgccatgaacgctggacgtcgcacccggacaccctgctgagccagggcgatctggcactggggctgccgcagcagcagcggcgcctgtcgcggcagagtggcggcgcgtatgcggaactgggcctgccactcacgtcggaactgcgcatggacctggccgcgcgctgggactacgacggcgactacacggcattctcgccccgtgccggcctgcgctggacgccaacaccgcactggtcgttcctgctggccagcggccgcggctatcgcgcgcccagcctgttcgaacagcgccgcccgccaggacagttcggcacccttaccctgcccgtctcaagcgcactgccaccttgtgcacagagcgagccggacggccgctgcgtggtcactgcggatgtggaggagaacgacgcgctcaaggccgagagctcacgcagccattcgctggcggcgacctggtcacccagcgatgcgttctcgctttcgctgacccacaacatcgtcgagctgcgcaacgagatcctcgcgctgcaaccggccgatgccgtgtggaaccgtgacacctggcagttggatgaggatggcaacctgagcagcctccgcctgtcgttcgacaatatcggccgcaccacttcccgcaactgggtgctgcgtggcgaataccgggtcgacaccggcagcaccggccagtggttgttctcgctggacgcgctgaagcagcaggagctgcgccgccgtcgggaccacgagccggcgatcgacctgcgcgggcatgtcacgcccgagatggcggcggtcctcaacgtgcaatggcagaacagcaactgggacatcgccctgcgcggcaaccaggtgggccgcacccgcgcatggctgcccggcgccgagtgcccgcagcggcagatcgaacagaaccactgcatgaatccgcgccagctgcgctggaacctgcacctggcgcgccgcctgggcacacgcgtcatcgcggcgctggacgtgcacaacgtgcttgatgcgcaaccggtgaactacctggtcggcaatggtgggcagttgccggggctggacgatccactgggtcgctactacctgcttaccctgcagttccgctga

SEQ ID NO: 497081 - DNA, 957 bp, Stenotrophomonas maltophilia
atgaaagcctatctctggttctggggcgcgttcctgctgttcttcgcgttgcccttcccctgcatcctctatttcggaacctcctggccggtggcgctggctgatcgcagcgcgccatggctgtccctgctgctgcttgtgctgtcactggctgcatggctctctctgctgttcgcgttcctgcatttcctgctgctcggcccaccgcgcgccctgcatcgcgtccgctcgatcctcgccgatggcgaaccgcgcgatgcgctgatcgaacacgctgaacagaccggcgtacaggtgcgtggcttcgcgcaatggaaactgcagctgtccttcaagaacctgtccggcacgccgatccgcgaacagctgctggtggtcgacagcaagccgcaactgcagcgcttcggcgtcggcaggcacgtcgatgcacgcctgagccgggtgccgggcgcgttcccgaacgtggtactggacggtgcccagcccgaactggatgtcgccagcctgtggcggcgaagcatcggcgcagcgctcggcatcgtactggtagtcgctgcctatgtggcggcctaccggctgcagagcgagggccttggctggaccttcctgtccttcggccacccgctgctggtgtgcccgctggtgctgtgtgggtacatgttggggctgcgcctgcttggccgcctgctgcaggctgatgcgcgcggcgaggcgttgaagtaccgcggcatcggcgtggaggccagggtgctgaaagtgcgtcagaccggcacctacctcaacgaacagccgcaggtggagttccagctggagtacaccgatcgtgacggccgcgtacagcaggtgagcgtgcgccgcttcatcccgctgatcgatctagccaacatcccgcgcgaaaacgtgaccctgctgtacgacccggatgaccgtggcaacgtgcgcctggagggcgtatga

SEQ ID NO: 497082 - DNA, 720 bp, Stenotrophomonas maltophilia
atgaaacagccgccctccacccgcgccgtgttcctggtattgctgctggttctggcgggcgtggccgttgccggcggcgccctgcagaccatcagcgaaacgctggggcattcggtacagccggaccggttgccaccctccgtctcgtctcagtcgccgcgcgagcaacccgcatcgcttgtgccgtccccggccgccttccccgcagcgagtaccgctgcggcacccgaacgcaacaatcgcctgttcgatgcggactacctgcaggctgcgcgccaggcactggagcagctgccggcacttgccggccagaggctgacggtgttccatagcatccacttctacgacgatggccgcatcaacctcgatctggtcgacccgcaacagccgggccacgtcgacagctaccacttcgaacgtggccagtggcgcaagggcaatccggtgaacccgcagcagttcgcgcctaccatcagcctgcagcgcagcagcacacccctggccagcatcgatttcgaggccgtgccgcgcgtggcgcaggcactgcaggaacaacgcaacgcgctgcagaaccccgcatccgaagtcggccacgtctacgtgatcgtgcgcaaaggcggcaagctggtgtggctgccggatgacgtcgccggtgaccgcgaatccgtgcgcctgcagttcgatgcgcagggcaccctgcgcggcgtgaaccgccgatag

SEQ ID NO: 497083 - DNA, 1968 bp, Stenotrophomonas maltophilia
atgcacaagcgctggctggccgccatcgtcgtggcgggattgtggtgtggaaccgctgctgcgatcgatctgggcgcctatgtgcgagcggacaagttcggcgatgtcatgctgtctcccgggggcgattatctggccgcgaccgtgcctgcggacggcttcaccgctgtgatcatccttcgtacggacgacaacacgccggtgggcaacctgcgcccaccactcaattcgcatgtcttcggcctgcactgggtcaacaacgatcaggtgatgttcggtctggcgcagaagttcggtacccgcgatgcgccgtgggccaccggcgagctgctgacactggatgcacgcaccggacgaccggaactactggtgggctaccgcgaccttggcctgcgcgtgcggcccaagtaccggacgtcggccgcggcgttcctcagtgacgccctgcctggcgacgatgcgcacgtggtcatcgcagtaggcggatcgcggctggatgccaacggttatgcggcccagctggaactggcaagcggcaagcagcggctgctggcccgcgcgccgatgccgggtgcctcctatgtggtggatgcccgcggcgacgtacgtttcgtacagggcgccggtactgacaacgtccatcggctctaccaccgcaacggtggcgactgggcgctggtcaacgatgagaaacggagtggtcgcagcgaggcggcgctgggcttttccgccgacggccagctggcctacctgctcagcgagcagcccagcggccccgatgccatcgtcagctggaacccggccacgcaggagcgcaaggtcgtgctgcgcgatgaggttgtcgatccggcacgactgatccgcagcccgggcagcaccgtgccggtcggtgcgctgttcctgggaaacacgccgcatacccggttcttcgacgaaagctcggacgaggcacggttgtaccgcagcctggaggcggccttccccgggcgtgcagtattcatcacctccagtacccgcgacggtcgccggctgctggtggaaaccgggtccggttccaatccgggcgagttctacctctacgaccgcgaccgcaaccaggcacgcttcctgatggcgcgcagcgaatggattgacccggagagcactgcgtcggtgcggccggtcctgctgaaggcgcgtgacgggctggagctccatggattcctgacagtcccgcatggcagcactggccgtgacctgccgatggtggtggtgccgcatggtgggccgatcgggatattcgacaacggcagtttcgatcacgagaaccagttgctggccgctgccggctacgccgtgctgcagatcaatttccgcggctcgggcaactacggccgtgcccacagccgggcagcactgaaacagtgggggcgcgcgatgcaggacgacgtgaccgacgccacgcgctgggcgatcagcgaaggcatcgccgatgcccggcgcatctgcatctacggtgccagctacggtgcctactcggcgatgatgggcgccgcgcgcgaaccggggctgtaccagtgcgcggccggctatgtgggcgtctacgacctgccgctgatgtttactggcggcgatatccaggaccgcgattccggaatgagctacctgcgcgagtggctgggtgatccggccacgctgggcgcggtctcgccggtcaacctggccgagcggatcaaggtgccggtgttcctggcggccggtggccaggacaagcgcgccccggtccagcacaccgagcgcatggaagcggcgctcaagcgtgccggtacgccggtggaaagcctgtactacaagaccgaagggcacggcttctatacccaggcccatcgcagcgagtactacggcaagctgctggccttcctgtcgcgcagcctgggtggcaagaccgccacgactgcggctgcggacggcaagggcagggcgccgtaa

SEQ ID NO: 497084 - DNA, 447 bp, Stenotrophomonas maltophilia
atgccgatagccgtgcgcgatgcgcgccccgaagatgccgccgcctgcatcgacctgcgcgggcgcacccgcgaaaacgccttcagcgccgcgcagttggcagagctgggcatcaccgaggacagctgggcggccggcatcgcccagggcgattcgatcggccgcgtcgcctgggagggcgagcgcatggccggctactgcttcgccgaccgcgacagcggcgaggtgctggtgctggccctgctgcccgagtatgaaggccgcggcatcggtcgccagctgctacaggacgtggtcagcctgacccgcgatgccggccaccaacgcctgttcctggcctgttcggccgacccacgctcgcgctcgcatggcttctaccggcgcctgggctggcgcccgaccggcgagattgatgaggccggcgacgagattcttgagctggtctga

SEQ ID NO: 497085 - DNA, 1689 bp, Stenotrophomonas maltophilia
atgaagaaatttggcaaggctcttctcgccctgctcgtgctgctgttgctggccgccgcgctgttcctgtactggccgctgacccagcgctcggtgcccgccgccagcaacgacaagcccgtcgacgttgtgctggtcggcgccggcatcatgagcatcaccctggccacctacctgcaggaactgcagccggactggaacatccaggtctacgaacgcctcgacggcgtcgccggtgaaagctccgacggctggaacaacgccggcaccggccactcggccttcgccgaactgaactacaccccggaactgcccgacggcagcatcgagaccaagcgcgcggtcggcatcgccgaatcgttcgaggtctcgcgccagttctggtcgcaccaggtgaaggaaggccggctcagccagcccagcgacttcatcaacccgaccccgcacatgagcttcgtctggggcgatgacaacatcgcctacctgcacaagcgccagcaggccctggtgaagaatccgctgttctacggcatgcagtactccgaggatccggcccagatcaagcagtgggccccgctgctgatggaaggccgtgacccgaagcagaaggttgccgcaacctggatgccgctgggcaccgacgtcaacttcggcgtgatcacccgtcagctgaccgccggcctgcagcgcagcccgaacttcagcctgcatctcaaccacgaagtcagcgcgctgcggcagaacgccgacaagagctggaacgtgacggtgaaggacctcaaggctggcaccgagaccaccacccacgcccgcttcgtgttcatcggtgccggtggcgctgcactgaagctgctgcagatgtccggcattccggaatcgaaggactacgccggcttcccggtcggtggccagttcctcgccttccagggccaggacgtgacctcgcgccacggcgtgaaggcctacggcatggccgagaccggctcgccgccgatgtcggtgccgcacctggatgcgcgcaagctggacggcaagccggtggtcctgttcgggccgttcgcgctgtacagcaccaagttcctcaagcacggttcgtggtgggacctgtactcgtcggtgaaccacaacaacgtcggcccgatgctggaagtgggcaaggacaacctggacctggtgcagtacctgatgggccaggcgcgcctgaacgatgccgaccgccaggccgagctggtcaagtacttccccactgccaagccgggtgactggaagctggtcaccgccggccagcgcgtgcagatcatcaagcgtgatccgctgaagggcccggtgctgcagttcggtaccgagatcgtgaccgacaaggaccacaccatcgccgccctgctcggcgcttcgccgggtgcgtcgacctcgccgccgatcatgctggacctgatggccaaggccttcccggaccagatgaaggccggctgggaagcccgcctgcgcgagatcgtgccgtcgtacgggcgcaagctcaacgacagcgccgcgctggtcaacgagatccgtacgctgaccagccagaccctgcatctgccgtatctggaggtgccggtggatgcgaacgcggcatcgcctgctgcggctgcagtgccggcagcggccaaggaaaagcgcaacgccaacgaggaactgcaggcgctgtaa

SEQ ID NO: 497086 - DNA, 2193 bp, Stenotrophomonas maltophilia
atgtccctgatcctccgtaaccgcctgccccgccgcgcgttgctgccggctgccctgctttcgtcgctgaccctgctggccgcgcccagcgcgttcgccgccgccgatggcactgccgatgccaagaccctggacagggtcagcgtccgcgccgaacagtccgcaccaccgtcgagcaccacgcgcctgccgatcaccctgcaggagaccccgcagtccgccaccgccatcagcctgcagcgcctgcaggacgaatcactgttcagcatcaacgatgtgatgcgcaatgtaaccggcgtgagcgtgtccttctatgacacgcagcgcccgctgtactacgcgcgcggcttcgccatcaccgacttccaggtcgatggcattcccacctacagcggctccaccaaccaggagtacgacaccgccttctacgaccgtatcgaagtgatccgcggcgccaacggcctgctcagcggcgccggcgtgccgtcggccacggtcaacctgctgcgcaagcgcccgggcaaggaattcgatgcgtcgttcgcggtcagcgccggcagctgggactaccgtcgcatggaggccgacgtgaccgcgccactgaccgccgacggccgcttccgcagccgcgtggtcgccgcctacaccgatcgtggcctgtattacgaccgctacgacgagaacaagatggccggcatggcggtgctggaaggcgacgtcaccgacagcaccacgatcaccctcggttaccagagccaggacaacaaccccaccggctcgacctggggcaccgtgccgttcttcgacaaccagggccatttcgcgcacttgccgcgctcgaccaacctgtcgccgaaatggagctactggaagcgcgagagcaacaccgccttcgccaacctggaacagcgtttcggcgacaactggctgttgaagatcaacaccgcctatacccgtggcaacgtgcagaacgtgcgcctgtacggcaccggcaacccggacccggtgaccggcgcgggcatctacctgcgcgcggccgccggtgattcgaaggacacccgccgcaatgtcgatgcctacctgaccggcagtttcgatctgttcggccgcgaccacgacgtgaccctcggcgcacagtggtcggacctggaaggcacgacgaataccctggcactgaacttcccgagcgactgggcgcgctgcggcggcgagcgctgctactacattcccaacgtgtacaactggaacggcgacatctccgaggtgacctaccgccgcaccggcgcgcgccgcgtggccaagaccacgcagagtggcgtctacctggccacccgcctgcgcctggccgatccgctgtcgctgattgccggcgcacgcctgagccgctgggaaaccctcacccgctcctacaacgccgctggcgcctacaccggcaccagcggcgcgtacaaggtgagcgatgaagtcactccctacgtgggcctggtctacgacatcaccccgaacgtgtcggcctatgccagttacaccgagatcttcaacccgcagaacttcaaggaccgcaacgagaacctgctggcaccggtgcagggttcgaacctggaagcgggcatcaagacccagtggctggacggccgcctgaccgccaacgccgccgtgttcgaggccaagcaggacaactacgccgtgcgcgacatgggcgtgccggaaggttcgctgagcgatggcacctccgcctacatcggcgtcaacggcaccaaggcacgcggctgggaagtggacgtcaacggcgagatcctgccgggctggacggtcaatgccggctacacccacgtcaaggtcacccgcgcggctaccgacctgctgtacgccaacccgccgaaggatctgttgcagctcaacacgcagctgcagctgcgcggtgcgctggaacgcctgagcgttggcggtggcgtgcagtggcagagcaaggtgcagggctacaacatcgcctatccgctgggcggcacggtgacggtgaaccagccggcctacatgctggtgcagttcaatgccaactaccgcatcagcgacagctggaccgcaacgctgagcgtgcgcaacgcactggacaagacctactgggcgaatctggactacaacaactacggcgaaccgcgcttcgtgtcggccagcctgcgctggaagttctga

SEQ ID NO: 497087 - DNA, 1644 bp, Stenotrophomonas maltophilia
atgaacccgagctgggatacgttggaacgcagccgccaggcccgcctggaacgtgccgcgccgtgggcccggggacgcgaggtcgccgccggcgacgtaggcgagctgctgcacgcactgctggagccaggcgacaaggtctgcctggagggcaacaaccagaaacaggccgatttcctcgcccaggccctggccgatcttgacccggcccgcgtgcacgacctgcacatggtgcagtcggtgctgtcgctgccgtcgcacctggatgtattcgagcgtggcatcgcgtcgaagctggacttctcgttctccggcccgcagtcagtgcggttggccaacctggtggctgaagggcgcatccagatcggtgccatccacacctacctggaactgttcggccgctacttcatcgacctgaccccgcgcgtggccctggtcgccgcgcaggccgcagatcggcacggcaacctgtacaccgggccgaacaccgaagacacgccggtgatcgtcgaagccaccgccttcggtggcggcatcgtcatcgcccaggtcaacgagatcgtcgacaccctcccccgcgtcgacattcccgctgactgggtcaacttcgtggtgcaggcgccgaggccgaaccatatcgaaccgctgttcacccgcgacccggcgcagatctccgagatccaggtgttgatggcgatgatggcgatcaagggcatctacgccgagtacggcgtgaaccgcctcaaccatggcatcggcttcgacacggcggccatcgaactgctgctccccacctacgccgaatcgctcggcctgaagggaaagatctgccagcactgggcgttgaacccccacccggcactgattccggcaatcgaatcggacttcgtcagatcggtgcattcgttcggttcggaactgggcatggagaagtacatcgccgcgcggggcgatgtgttcttcaccggcgccgatggctcgatgcgttccaaccgcgccttctcgcagaccgccggcctgtatgcctgcgacatgttcatcggttccacactgcagatcgacctgcagggcaacagctccaccgccacccgcgaccgcatcgccggcttcggtggcgcaccgaacatgggttccgatgcacgtggccggcgccatgccagcgaggcctggatcaaggccggccagcaggccgcacgcccgggtgagatgccgcgcgggcgcaagctggtggtgcagatggtggaaaccttccgcgaacacatggcgccggccttcgtcgaccgcctcgatgcctgggaactggccgagcgcgcacagatgccgctgccgccggtgatgatctacggcgacgacgtcagccatgtgctgaccgaggaaggcattgtcaacctgctgctgtgccgcacccctgaggagcgcgaacaggcgatccgtggcgtggccggctataccgccgtgggcatggggcgcgaccgcgcgatggtggagaacctgcgcgaccgcggcgtgatccgccgtcccgatgacctcggcatctccgtgcgcgatgccagccgtgacctgctggcggcgcgttcggtgaaggacctggtgcgctggtccggcggtctgtacgacccgcccaagcgcttccgaaactggtaa

SEQ ID NO: 497088 - DNA, 321 bp, Stenotrophomonas maltophilia
atggaaaccctcgactatcgattcgaagggcacactgcggtgcagtttccgcgcggagcggtgctggtcggcgtgctggcctcgggcaacctggaaatcctgctggagccggccgcactggacggcgcgatgacggtgcgcatcatcaccgccgcgaagggcttcggcagcgtgtggcaagcggtgatcagcgacttcgcacagcgtcatccgctgcgcgatgtacgcatctcgatcaacgatgccggtgcgaccccggcggtagtcagcctgcgcctggaccaggccgtggaaaccctgcttgctggagaaccacgatga

SEQ ID NO: 497089 - DNA, 909 bp, Stenotrophomonas maltophilia
atgaaccggacgcagcgctacagctactacgaagccgatgcgcgcgagcgtatcgccagcctggtcgatgccggttccttcagggaattcctcggcccggcgcggcggatgatgagcccgcacctggcacagctcgaccagcccgcggcgttcgacgacggcatcgttgtcggcgaagccacgctgcgtggccgacgcgtgctcctggccgcgcagcagggtgaattcatgggcggcggggtgggcgaagtgcacggtgcaaaactgaccgggctgctgcgccgcgcagccgaaacacatccccaaggcgtgcttctgctgctggacaccggtggtgtgcgcctgcacgaagccaatgcagggctcatcgccatttccgagatcatgcgcgccaccctggacgcgcgtgcagcgggtgtgccggtgatcgcgctgatcggcagcggcaacggcgccttcggcggcatgggcatcgtcgcccgctgctgcactacggtcatcatgtccgaagagggtcgcctgtcgctgtccggcccggaagtgatcgagaccgtgcgcggcgtagaagagttcgattcccgcgatcgcgcgctggtctggcgcgtaacgggaggcaagcaccgctacctgatcgaccaggcacaggtgctggtgcccgatgccatcgaggccttcgcgcaggcggccagcaacgcgctgcagcctgataccagcagcaccgatccggatactgcactggctgcgctgcaggaacgccatgcggtattgaaggcgcgcgtgcaggcctggggcgattgccgcgatggcctggagatctgggcccgccagggcatcgcagcccccgagcgactaccgctgctcgacaccgatgagttcctcatcgccaccgccgaccggagcctgccatga

SEQ ID NO: 497090 - DNA, 711 bp, Stenotrophomonas maltophilia
atgagcatgccgttgcagaacctgctcgatgccctgtttccgcatgggcatgccattgcggtgaacgattcggtgctgaccggcagcgccaccaccgaggatggcgaggtgaccgtgatcggtaccgccgacaagcttgaagtcggcgtggaccacgcactggcactggccgaaaccgtgcttgccagcaccggcgcacatccacagcgaccgatcgtgatgctggtggataccgccggacagcgcctggcgcggcgcgacgaactgttgggcatcaatggttactttgcgcatctcgcgcagacgctcgatctggcacgccgccgtggcgcgcgcctgatcaccctggtctacggcgaatccgtcagtggcggcttcctctcattcggcctgatggccgaccagatccacgccctgcccgatgcacaggtgcgggtgatggacctgcgcgcaatggcgcgggtgaccaagcaaccgctggagaagctgcaggcgctcagccagagctcgccggtattcgcgccgggcgtcgccaactacgtggcgatgggtgcggtggactcgttgtgggagggcgatctttcccagcacctgctgcaggccctgcgcacgcccgccgaaggcgacctgcgtgccgtgcagggtgccgaacgtggcggtcgcatgctggccgcacgcgtggctgaagcggtgagtcagggcgatgcctga

SEQ ID NO: 497091 - DNA, 642 bp, Stenotrophomonas maltophilia
atgcctgagcggctgccccgccatacgctggtctggctgtcagcgcacgccggctggcaggcggacatcgccgcgcatgagtcgcgcctggccgactggtttgcgcagggccggccggccatcgtcgcgcggcgtgccgccgacgatgccgatccacgcctgcgtctcggcgtgccgctgccacccgccgagggcaaactgcgcttggccctgcgcatgccggcacacgatgtgctgcgcaccgcagcgccaccgacacttcaggcggtgctggaaggcgaccttgtgcaggactggcagcgcccgctgcaggcattgcaggacatcgccgcagcgcgtgtattcggtgccttcgcatggcagcacctcacgggcctgcactatgtgcacgcgcgctcggacatcgatctgctgtggcggatcgacaccgccgcacaggccgatgccctggtcgcacggctgcaggcatgggagaccgaacacggccggcgggtcgatggcgaactgtgcctggtggatggtggcgcggtgaactggcgcgaatacgccgggcgcagccgcgaggtactggtcaagcgcctcgatggtgccgcactggaactacgtgatgcgttgttcgcctccaccggggtgagcgcgtga

SEQ ID NO: 497092 - DNA, 816 bp, Stenotrophomonas maltophilia
gtggacagcgcgcgtctggggcgcctcgccatcgccagcctgcacgccgaactggcccttgcacccaagccagggttggtcacgccattcgacagcggcagccaccacgacatggacgcaggcacgttcctgcgcagcctgtttacgctgcgccactacttcatcgccgtggccgacgccggtgccagcgcggcaccgttccagacgttgcgccggcacggcatcgctgcggagatatcgatgctgcacgccactgcgggcatcaacacccatcgcggtgcgatcttcagccttggcctgctggtggcggcttccgctgcctgtcggggccgcgcgggcggcgccgtcgcagccgagcaggtctgccaggaagtgcgccgctgggctgccgagctcgccggcgcaccacttgatgcgaacagccctggccagcgcgcgcgcgcacggcacggcgtgcagggtgtgcgcgaacaagcggccgccggctacccgctgctgcgcgaggtggcactgcctaccctgcgccacgcgctggccagcgacctgccacgcgaggccgcgatgtgccagaccctggtgcagctgatcgcgtgcgtggatgacctcaacctgctgcaccgtggcggcgccaacggcctgcgctgggcccagcaacaggcgcgaggcttcctcgatgccggtggcgccttcgtacccggctggcaggcacgcctgcacagcatcggtgatggattcgtcgcacgccggctgagccccggcggcagtgccgacctgctggcctgtgcctggttcctgctgcagcaggaggtcgcatga

SEQ ID NO: 497093 - DNA, 921 bp, Stenotrophomonas maltophilia
atgagtcttgccctgctctgccccggccaaggtgcgcagcatgccgcgatgttcgaccgcgtgcgcgatctgcctgccgtgcgcgacgtactggagaccgccagcgcagtgcttggacgcgacgtatttgcggcagctgctgacgaatcgcgcttcgacaatgttctggcgcagcccttgctgtgtgcagccagccttgcgcactggcagggacttcgcgaagcggtgcctgcaccggtgctggtggccggctacagcatcggcgagctcgccgcgcatgccatcgccggcagctttgatgcggccacctgcctggcgctggctgcgcaacgtgcgcagttgatggacagcgccagccccgccgatgcaggcctgcaggcggtgctcgggctggaacgccatgtattgcagccgctgtgcgatctgcacggcgcgcacgtggccatcgccaacgggcaggaccatttcatcgtgggcggcacgcacgcctcgttgcagcggctggacgatgcagcgcgggcgcagggcgcggacatccgtctgctgccggtgcgcgtgcccgcacacacaccattgctggcgacggcggtcgcaccgttcgctgccgcactcgatgcatcgccactgcaggccccacgcctgccgctgctggccggcatcgatgcgcgaccggtgcgggaccgcgcaacggcagtccacacgctgtcgttgcaactggcgcagaccatcgaatgggcgcaggtgatgcgccaggccttcgagcgcggcgcgcgcgtgttcctgcagctgggcccgggcaacgcgctggcgcgcatggtcgcgccggcctatccgtgctgcgaggtgcgcgcggtggaagagttccagagccttgaaggcgcggcggcctgggtccgcagcgcgctggagcggctgcagtaa

SEQ ID NO: 497094 - DNA, 1368 bp, Stenotrophomonas maltophilia
atgagtccacaaatcgcaacgatcatcggtctggtgatcatgttcattgttgccacggcgatgccgatcaacatgggcgccgtcgccttcgcgctggccttcatcatcggcgggctgtgggtcgacatgggcggcaaggaggtcctggccggctttcccggcgatctgttcctgaccctggtcggcatcacctacctgttcgccatcgcgcagaagaacggcaccatcgacctgctggtgcactgggcagtaaaagccgtgcgcggccatatcgtggccattccgtgggtgatgttcgtgatcaccgcggtcctcaccgcgttcggtgcgctgggcccggcggcggtcgcgatcatcggtccggtcgcgctgcgctttgccaagcagtacaacatcaatccactgatgatgggcctgctggtcatccatggcgcgcaggccggtggcttctcgccgatcagcgtgtacggcagcatcaccaacggcgtggtgcagaaagccgggctggaagtgaccgagatggcggtattcctgaccagcctgggcttcaacttcatgatggcgacgatctgcttcttcgcgttcggcggcatcgccctgctgcggcgtggctcgatcaccgcggccggaacgctcggcaatgccgagctggcgatggccggtggcccacaggcctcgtcgcgccaattcgccatcgaaggccatggcgcgctggtcgcagccggcggcggcacgctcagcaatgatccggcagcactggatgcggtgagcctgacccgcgagcggctgttcaccctgatcggcctgctcggcctgggcgtggccgcgctgatctacaacctcaacgtcggcctggtctcgatcaccgtggctgtcgcgctggcactgctgtcgccacaaagccagaagggcgcggtggatggcatcagctggtccaccgtgctgctgatctgcggtgtggtgacctacatcggcgtgctggaacatgccggcgcggtggacttcatcggcaatggcgtgtccgacatcggcattccgctgctcggcgcgctgctggtctgctacgtcggcggcattgtctccgcattcgcctcgtcggctgcggtgctgggcgccacgattccgctggcggtgccgttcctgatgcagggtcacctcagcgccgccggcgtgatctgcgcgctggcggtgtcgtccaccatcgtcgatgtcagcccgttctccaccaatggcgcactggtggtggcttcggcagccaaggaggaacgcgagaccctgttccgccgcttcctggtctacagcggactggtggtggccctggggccgctgctggcctggctggtattcgtggtaccgggctggatgtaa

SEQ ID NO: 497095 - DNA, 720 bp, Stenotrophomonas maltophilia
atggccattgcccctgccccgcggtcaccgaagaagcgcgcacctctgtacgaagaggtggccgaacacgtgcgcgaacgcatctacgattaccgcctgccgccgggtgagtggatcgacgagcccgcactgtgcgaagaactggggatcagccgtacgccgctgcgcgaggcgctgaagctgctggctgccgaaggcctggtgcagatcgatgccggtcgtggctgccgggtcacccggttgacgctggaagacctcaaccagctgttcccggtgatggcgatgctggaaggtcgctgcgcgcacgaggcggtcaggcacatcgacgatgccggcgtgcagcagctggaagacctgcatgcggcgatggaaaccgcggcggccgagggcaacatcgccgagtactaccgcaacaactacctgatccacgaaaccgtgcagcactacgccggcaacccgtggctgatccgcatcacccacgatctgcatcgcatcctgaagatgcatcgcggccgccagctgctgacaccggggcgcaccgcgcagtcgctggccgaacatcgcgagctgatggagtgcttccgacgccgcgacgcgcaggctgccgaacgcaccatggagcgccatctgctcagccagggccaggctctggccgcctatgtggcagcaggcgggctgttgaacgtgccggcgcccttgccgaccgaaggcggcggttga

SEQ ID NO: 497096 - DNA, 1014 bp, Stenotrophomonas maltophilia
atgcagggaacgcagcattcaatccggcgcccgcgccacgtcgcgctgctggtcggtctactcgcgctggcggcctgccagcgcacaacggatgcgccgaccggggcacccgcagcgggcgcaccacttgccgccccggccaccgcaacagacctctctccgctgctcgatgccctgccgacctgcgcgctggacggctggtacatcgatcagcagaccaggcgcccggcccatccctggttggcgacgaacgcgccgaagccctgcaaggaggacggggagaacgagatcgccacgttctgcgtgcaggggcaatggaaggggctgccggtggaggaggtgatcctgccgacgatgaccttcgtctcgttccgtggcgcgaagatcggcctgccgctggagaaggcacgtcccatcgtccgccagcgcttcgggcaggaattcccgggtggcgcggcgtacgaggcaggccgtgagccgaagctgctggccgatcccgaggatgcgcagcgctcatggctgctgtgcagcacgccggaaccgggagacgatctgggcagccaggcaggcgtcagctactcgggcatgaacctgccctacgaccacgacggttgcagctaccgctacagcccggtcgacttctgcgatgcgcggcaccgcggagccatcgaagatgccctccagcatcagaaacccaatttcaacaagcactacctgctggtgcaggtcgatgatcgacccgagtacttccagcgcacgctggtgctggtcgacacccgcaccggacgcgccacgccattgccgatcgatgccttcaccggcccggcggggaagggcggagaggccaccggctacgggacactggaaacgggcgtggaccagccgcagttctgcctcgatggcgcgttgctggtctaccgcgtgttcgaggaggggcgcttctgcttcggctttgacggcgagcgtttcaccggccatgaaacccagtacatgcaggcagcgggcagccgatga

SEQ ID NO: 497097 - DNA, 735 bp, Stenotrophomonas maltophilia
atggctgagtcgctggctaccctgcaacggcgctgggccgatcatgtgcgcgcccctgcaaagaccgcacccgatggcatcgaggcgcggcggatggcggtctaccgccgcctgtgcatcgacagcttggacaccctgctggccggcagcctgccgcggttgaagtcgcagctgggcgatgcctgctggcgcaacaccgtcgagcactactacgcgaggcacgcctgccgcacgccgttgttcccgcagatcgcgggcgagttcgcggcctggctggcggtgcaggacacgctggcgctgccgggctgggcagcggaactggcgcactacgagagcacgcagcagtcgctgcacattgaagcgcgtgacggtgggcggccgctgcagcgggctcccgtaggcaatgatgtgctggcggtttcgccgttggtgcgggtgcttggctaccagtggccagtacatgaggacggggcgctggagccggtgttgagcacggctcccacgctgctggtgatccagcgcctcgccgatttcagcctgctgaccgaggaactgtcaccgctggcctacgcgctgctgtcggtgttcggtgacgacagcgcgtcggtggatgaagcactgcagctgctgtccgaaacacatggcgtggcagcggacgcattgcgcatggcctgcgtgcctgttctgggcgagctgtgcgcggcgggcgtgctggttgcattgcccgctttctga

SEQ ID NO: 497098 - DNA, 297 bp, Stenotrophomonas maltophilia
atgaagatgatcctggcagtggccctggctctgggcggcatgagcacttcaacggcagcccgggccaaggacgatcctgccgccggcgcgaaactctatgcccagcactgcactgcctgccacggtgctgaacgcgccggcgtaccgcctaccttcccggcgctcaccgacgtcggcaagcggcttcagcccgcccaggtcaaggacaagatcaggaagggcggaggattgatgccgccctttgcccagctgtcgcagcaggagatcgacgacctcgccagctatctggcgaagtag

SEQ ID NO: 497099 - DNA, 1686 bp, Stenotrophomonas maltophilia
atggcagataatcactacgacgccattgttgttggctcgggaatcagtggcggttgggcggcgaaggagctgaccgagaagggcctgaaggtcctgatgctggaacgcgggcgcaacatcgagcacgtcaaggactacgtcaacgcgatgaaggaggcgtgggatttcccgcaccgcaaccggccaacgcaggcgatgaaggccgccttcccggtgctgatgcgcgactacggcctggccgagaacctggaaggaatgtgggccaacgagcaggactcaccctacatcgaaaccaagcgcttcgactggttccgtggctaccacgtgggcgggcgctcgctgatgtggggccggcagagctatcggttttccgacctggacttcgaagcgaacctcaaggacgggatcgccaccgactggccgatccgctatgtcgacatcgcgccgtggtacgaccatgtagagaggttcgccggcatcgccggcacgcgcgaaggacttgacgtgctgccggacggcgagttcctgccgccggttcccttgaacatcgtcgagaaggatgtggccgcgcgcatcaagaaggccttcggcggaacgcgccatatgatccactcgcgcactgccaacatcacccagccgatgcccgagcaggggcgcgtcaactgccagtaccgcaacaagtgcatcctgggttgtcccttcggtgcctacttctcgacccaggcggcgacgctgccggcggcgatgaaaaccgggaacctgaccttgcggccgttctcgatcgtcaaggaagtgctctacgacaaggatcgcaagcgtgcgcgtggcgtggaggtgatcgacgccgaaaccggccagacctaccagtacacggccaaggtcatcttcctcaatgcatcgtcgttcaactcgacgtggctgctgatgaattcggccaccgacgtctgggacggcgggctgggctcttcgtccggcgagttggggcacaacgtgatggaccatcatttcggggccggtgcctcgggccgggtcgagggttacgaagacaagtactacttcggccgtcgtccctgcggcttctacattccgcggttccgcaacgtcgcggccgacaagcgcggctacctgcgcgggttcggctaccagggcggtgccagccgcaccggatggtcgcgcgagatcgccgagctcaacatcggtgccgatctgaaggaggcactgaccgtgccgggtgactggcgcatcggcatgaccgggttcggtgaaatgctgccgcaccacgacaacacgatccgcctggaccacgaccgcaaggacaaatggggactgccggtgctggcgatggacgtgtccatgcgcgccaatgaactggcgatgcgcaaggacatggccgccgatgccgccgagatgctggaggcggccggggtcaaggacgtgaagatgcacgacaacgactacgccccgggcaagggcatccacgaaatgggaaccgcgcgcatgggacgtgaccggaagagctcggtgctgaaccagcacaaccaggtctgggatgcccccaacgtctatgtgaccgacggtgcctgcatgacctccagcgcctgcgtgaatccctcgctgacctatatggcgctgaccgcgcgcgcggccgaccatgcggtacgcgaactgaaagcggggaacctctga

SEQ ID NO: 497100 - DNA, 903 bp, Stenotrophomonas maltophilia
atgctgaagatcgattcgctgtccaagacgtacgccaacggcgtgcatgccctcaacaacgtcaacctggacatcccgcgcggcatgttcggcctgctcggccccaacggcgccggcaagtcgtcgctgatgcgcacgctgtccaccctgcaggaggccgacagcggcacggcgacgctcagcattccaggcgaggcgccgatcgacgtactgcgcgacaaggatgcggtgcgccgccggctgggctacctgccgcaggatttcggcgtgtacccgaaagtcagcgcgctggacctgctggagcatttcgcagtgctcaagggcctgacccagcgcgcgcagcgccgcgaggtggtcgatgggctgctgcagcaggtgaacctgtgggatgcccgcaagcgcaagctgggcacctactccggcggcatgcgccagcgcttcggcattgcccaggcgctgctgggtgacccgcggctggtgatcgtcgatgaacccaccgccggcctcgacccggaagagcgcaaccgattcctcaatctgctggcggccatcggcgagaacgtggcggtgatcctgtccacccacattgtcgaggacgtgaccgatctgtgcccgacgatggcgatcatgaacaagggccaggtgctactgaccggccgtcctgccgaagccatcgacgccctgcagcaccaggtctggcgcaagcaggtcgatccttcggaactggccgaccacgaagcgcgctacgtggtgctgtcgacccgcctggtcggtggccgcccggtgatccacgtgcacagcgccaacgaccccggtgacggcttcgcggccgtggctcccgacctcgaggacgtgtacttccagcgcctgcgcctgcaggcccgtgcccgcgcggcagcctga

SEQ ID NO: 497101 - DNA, 3591 bp, Stenotrophomonas maltophilia
atgatcctcaacttcttccgcttcgagctgcgcgagcagctgcgttccccgctgctgtggctgctggccgggctgttcgccctgctcgccttcgccgccgcctccagcgacgcggtgcagatcggtggcggcgccggcaacgtgcacagcaacgcgcccaccgtgatcgcgcagatgctgggcatcttcaccctgctcggcatgctggtcaccgcgctgttcgtcagcaacgcgctgctgcgtgacttcgaactcggcaccgccgaactgatcttcgccagcccggtgaaacgccgcgattacctggccgggcgcatcgctgccgcgcttgcggcaggcctgctggtctacgtgctgatcgccttcggcctgtggctcgcaccgttcatgccgtgggtcgatcccgagcgcatgggcccgatcagctggcagggctatgcgtggacgttcgcggtcatcgtcattccgaacctgttgttcaccaccgcgctgctgtcactactggcggcgctgacccgctcgatcctgtgggtctacatcggcctggtggcctacctggtgctgtacggcgccagcgcggccctgctgcgcgacatcgacaacacgtggatcgcggtgctgagcgagccgctggggatgcgcgcactgggccgcacgatccgctactggtccaccgccgaacgcaacaacgggattcccgagctggctggttacctgctggccaaccgtgctctgtggttgggtgtggctgccgcgctgttcaccgccaccttcgcgctgttccgcaccgaacgcagcggcagtggccgtcggcgctggggccgcaggcaggcgcaaccggttgccgatgccagcgtggtccgtcccagccgcgcgacgctgccgcgcgtgataccggcgttcactgccaccacggcgtggcagcagttcctgcgccaggtccgcttcgatacacgcggcgtcctgcgcagcgtgccgttcatcgtgctgctggtactgggcctggccaacttcctgcccagcgcgctgttccggcagaccctgtacggcacctcgatctggccggtcacctcgcagatgatcatgggcctgcagggggccttcagctggctgctggtgatcatcgtgctgttcttcgccggtgagctggtctggaaggaacgcagtgcgcgcatcaatgaagtgaccgatgccatgccggtgccgaactgggtgccgttgctggccaagttcaccgcactgctggccgtgatcatctgcttccaggccgccggcgcgctggccgctatgggcgttcagctggccaagggctacacgcatctggagccgctgctgtacctgcgcagcctggcgctggattcggtggtctacatcctgatggggggcctggcgctggtgctgcaggtgctcaccaacaacaagttcgtcggttacgcattgctgatcgtggtgatgatcggtcagggcgtgctcggcctgctcgactgcacgcagaacctgtacaacttcggcagctggcccaacgcaccctattcggacatgaacggctacggccacttcctgaccgggcaactggcgttccagggctactgggccctgttcctgctgaccttgatgtgcctggcgtcggccttctgggtacgaggtgtcagccagggcctgcgccagcgcctggccctggccggccgtcgcctgcgcggcccgaccggggtcttcgccggagtcgccgcattggccttcgtcggcgtgggtgcctggctgtactggagcaccaacatccgcaacgagttcatctcgcccgaccagcagctggatctgcaggcccgctacgagcgcgagctgtcgaagtaccgcacgctgccgcagccccgcatcgtggcggtggacaaccgcgtggacctgttcccggaatcgcagtcgatggtgatcgatgcgaactggacggtgcgcaatacccatgccacgccgatccaggacgtgcacgtctcgatgggtgatgacaagcagctggtcgcggtcgacctgggtgggcagacactatcgatgcatgacgccgatctcggctaccgcatctaccgcctgcagaaaccgctgcaaccgggtgaaacccgcagcgtgcatttccgcgcggtgcagaagcccaacggcatcaccgcgggccaggcaccaagcaacatcgtcgacaacggcaccttcttcaacagccgcgtactaccgtcgttcggctacaacgaaggcgccgagatcagcgaccgcaacgagcggcgcaagcgcgacctgggtgagccgcggcgcatgcccaagctggaagacgaagccgcgcgtgccaacacgtacatagccaacgatgccgactggctcgacttccgcaccacgatctgcacggcaccagaccaggtggcgttggcgccgggctaccttctgaaggagaccacggtaaatggccggcgctgcttcagctacgccatggaccggccaatgctgaacttctacgcctacctctcggcacgctgggaggtgcgcagggcgaagtacaagaacatcccggtggaggtctacttcgacccggcgcacggctacaacgtggaccgtatgatcgaagcggtgcagaagtcgctgacctactacgaagcgaacttcaccccgtaccagcatcgccaggtgcgcatcatcgagttcccgggctatgcgcgcttcgcgcagtcgttcgccaacaccatcccctactccgaggccatcggtttcatcgccgacctgcgtgacccggacaaggtggactacgtgttctacgtgaccgcgcacgagatcgcacaccagtggtgggcgcaccaggtgatcggtgccaacgtgcagggcgccacggtgctgtccgaatcgttgtcgcagtactctgcgctgatggtgatggagcaggagtacggccgccagcacatgcgccagttcctcaagcgcgaactggacggctacctgtccggccgcggcggcgaggccatcgaggaacagccgctggaacgtgtggagaaccagcagtacatccactaccagaagggttcgctggtgttctaccggctgcgcgaggagatcggcgagcaggcgcttaaccgcgcattgaagcgcttcctgcaggacaaggggtaccagcaaccgccgtacaccacctcacgcgagctgctggactacatccgcgccgagaccccggccgaccgccagcagctggtcaccgacctgttcgagaagatcagcttctacgacaaccgcgtaatggccgccagcgcccgcaagcgcgatgacggccgctacgacgtgaccctggacctgcacgccgccaagcagtacgccgacggcaagggcaagggcaaggagagcgacggaaagatggatgactgggtcgaggtcggcgtgttcgccaatgggccgtcgggcaaggagcgcgaccagaaggtgctgtacctgcagcgccaccacatcaccagcgccgatccgaagatcacggtgaccgtggatgaaaagccggatgaagcgggcttcgacccctacaacaagctgatcgaccgtgtgagcgatgacaaccggcgcaaggtaacgatgtga

SEQ ID NO: 497102 - DNA, 381 bp, Stenotrophomonas maltophilia
atgacatccagccatatctacttcgccgcacacggaatctccgcatcactgaactgggcagccgaggtattggccgacggtggtcttgagctcgaattggagctgggtgggaacagtgttctcattacgggcgatgaagacgttcgcctgcggctctctctcaacgacgcgccccatgtcctccaggaagccatcgagctagcgcatggcactggatacgtacatgccatgagccagtgcacggccagattcgagatctcaatcaccgacctggaggcggttttggatgagatgaacacgctgatcgaggtccagcagacactgctcaccgccgtggacggtgtcctgtggaacgagtggaacgaagcactcagccggtga

SEQ ID NO: 497103 - DNA, 465 bp, Stenotrophomonas maltophilia
atggaattcaggggactacctgccgacgcaccggaacggcagcaattggcccagtggtaccacgcggaatggggccagcacgccggcctgacagtggaacaggaactgcagcggctcaatccgccacaggatgccgaaggtttcccgcacctgatcgccgcattcgatgacggtcaggtggttggcgcagtccagctcaagcggcgggaaatgctggcgttcccacagtacgaacattggctgggcagcgtgttcgtggccgacagccatcgcgggcgtgggctggctggcgcgctggtggagcaagcagcggcgcaggcggtgcggatgggggtttccgatctctacctgcagaccgaggccttggacggtgggctgtatgcgcggctgggctggaagccgctgcaggaagccgacaactgcagctatcgcgtgctggtgatggtgcgcaggttggccgcatga

SEQ ID NO: 497104 - DNA, 531 bp, Stenotrophomonas maltophilia
atgcgcaggacgcttttcctgatcgcgcccctggcgctgctcggctgctccaggcctgcggcagcgcccgatgttgcgccagcgccggctgtcgccagcgccggaacgcagggcaccgccggcaccgaagcggcgtccctgcagacaccggcgatcgatccgctgttcgctgcggtcgctgccgacgcccaaccaccatcggtgatgctcaaccgctacgtgatcgcgctgctcaaccgcaaccgcagcgccagcgacgcggcatgggcgattccaccggccgacccgcaccgcgcagatgacgctgccatacgccagctgcagggcgtgcgtacgctgcggctggacagcgagcccccggtggcacgcgacggccagcatcctcccaagctgctggaggtgccggtgcggatccgcgcggtcaccacgcaagggaccttccgcttcggcggctggtaccgcgtgcagcccagtgctgatggccgcggctggcagatccagtcggcgcagctgcggccaacgctggactga

SEQ ID NO: 497105 - DNA, 405 bp, Stenotrophomonas maltophilia
atgatgcgtacgtctttgcccgcactgttgctgctgggcctttcgccctgggccctggccaacgcgtcctgcacccccgaagacctggtgggtgccaccccggtcagattgcccgccagcacggtcatctccgcgccgaaagaattttcgatagtgctgacaacggggcaggacggcagcttcggcgcgatccgggctcgcctgagctcgggcaaccgtgagctggatcgcgccgctgccgaatccatccgacaggcctccctcgcagtctcctgcctgcaagaacccggtgaagagatcatcgtggttttctccgccctccccgctcaacctgggcagcccggcaacggcacggtgcagatcgtccgcatcgcccccgcagccccgaaacctaccaagccatga

SEQ ID NO: 497106 - DNA, 471 bp, Stenotrophomonas maltophilia
atgggttggcaaggcggagacggaggggccatgaaggtcgctacgctcggcatgatcgtggcgatgtcggtcctgctcgcgtgcacggatgcctccgtcgtgggcagggacgcttccttcaacagttttgcctgccctgggttcaacccggcacgtgcacttcctgtcgccctggaggaactgcgtgcgcaccctgtccgctttcagggccgcttggtaaaggtgcggggtgcctacgtcggaggctgggaaatgtcggcgctgcatccaggaccgccggtacgtgacccgtgggcggcagacggcatctgggtggagggaatcgcgccggtgacgttgccgacggagcaggcttttgaaatgaccgggatcgtgtcggcggcgcggccggatgcggtgagcggcaaggggcatctcggccagtggcctgccgaactatgtgtgtcgtcggtgcggcggctgcaggagtga

SEQ ID NO: 497107 - DNA, 405 bp, Stenotrophomonas maltophilia
atggcttcgcccgcgcccaccgccacgctgtgccagctcgcccgccaagggtggccactgctcgtggccgtgctgctgacgttgctgctgggctggtcggccttgcacgaggggcgtggcggcgatccggctgcgcacggctggcaggcacacgctgaagatctgctgcaggcgatgccgctgccgcaaccgccagccgacgaatgcccgcagcacgccgcaccagcaccggagcctccgtttgatggcgagggcacctcgccctgcaccggtctggtccctgcacgcgccgctctggtcgcgcgtatcccgctgtggcgctccgatgccctgcgctggcagttgcatgatcccgcgctgcggttgaaccccggccacgcaccgcccgcaccgcacgccagctga

SEQ ID NO: 497108 - DNA, 1440 bp, Stenotrophomonas maltophilia
atggcccagcgccatcgtgtccgttcgtccctgtcccgtaccctgctgaccagcgccgtgctggcagccatgaccgcccctgccttcgcccacggtgacgctaccggcgcgccacagacgctggacaaggtggtggtcaccgcctccggcttcgagcagaaggtgatcgatgcccccgccagcatcagcgtggtcagccgcgaggaactgagcaagcgcccgtataccagcctggtcgacgcgctgcgcgacgtcgaaggcatcgacgtcggcctggaagcgaccgacaagaacggccgcgccaccgtgtcgatgcgcggcctgccgtccgagtacaccctggtgctgatcgacggccgccgccagagcaatgtcggccagatctatccgaacaacttcggtggcggccagttcgcctacctgccgccgctggacgcgatcgagcgcatcgaagtcgtgcgcggcccgatgtccacgctgtatggctcggacgcgatgggtggcgtcatcaacatcatcacccgacgcaaccaggaccgctggcacggcgccgtgacccagggcttcaccgtgcagcaggatgaccagttcggtgatgcgcgcaccaccgacctgtacctcagcggcccgctgctgaaggaccgcctcagcctggcggtgcgcggcagctactacgacgccaaggcctccaatccggagtgggacgcactgaccctgcccgacggcagcctgtgggagcgcagcatcggcttcggcggcggtggcaagtcggtggccaacaccaactggaataccggcgtgcgcctggacttccgggtcaacgatgaccacgaactgtggctggactacgacgtgtcgcggcagaagtacgacaacagcgaaggccagaccggcacgctggacagcctggccagcctgtggcgcgtcggcaatgcggtcatccccaacccgaacgacagcggcaccgtcacccgccgcgtggtgcagccgcgcgtcggctacaccgcctaccagcgctacgagcgcgatcagctgtcgctgacccaccagggccgctacagcttcggcacctggcagacctcactgacccacagcaagagcagcaacctgggtcgttcgctgccgctgaccctggacgagcgcgccaacctgcagacgctgtggaatgacgtctgccgccgcaccggcgccgccaacaactgtgcggccggccgtggcaatgccctggccgcgctcaacccgagcgagatggcgcgcctgcaggcgttcctgccgcgtccgctgcgcaccatggaactggaaggctacgtgctcgacacgatgctcgacctcgacttcggcgcgcacaagctgaccgtcggcggccagtacaacgacaccgacatgatcgacggcgtgttcggcatggatggcgccggttatcgcagcaacaccaggtag

SEQ ID NO: 497109 - DNA, 525 bp, Stenotrophomonas maltophilia
atgtctggcatgactgacgggcagcaactacgcaacgcgcaatggggcaaggtgtcgcgcctgttcaagcctgcgatgatcattagcgcagcgctgacggcaagcgcagaaacgttctatcgcacaggggcatacccgcgagccatcttcgaggcgggcagcactgatgttcgaacctggttgtatgtggcattgatgtacctgatcgcccttcctgtgctgtttctttggatgagacgactgctcgcaggctatcccatgccatggaacccgccattgaagcgatggttgctgggtgccttctccctgattctctgcagcggaatgattgttctgccggtcatcgtgctgactgttggaggcagcgctgcaggtcgcggcagagggctgtatcagctgttcaccggcaatctgttcggcacattccttgtgggaacggtgctcgcctacggagcggccctgggtgcatggctgctgtttatcggaaccccgaagctgctcttccccaagctgggctcgcgctag

SEQ ID NO: 497110 - DNA, 471 bp, Stenotrophomonas maltophilia
gtggcctggtggcgccgggcggccaccgcgctctgtcttgtggtggtggttgcggcacagacgcagtggctggcaccgcccaagccctcgcctatcggtttccacagcatccccggcgatcgctttctgcagttgcgccgccaagccatgcagttcgtggaggctcggccacgacagggcttccagttcgttgagcggtatcgagatgccgagttccaggttcattgccgaggcatacccgtgctgtggctggagaggcgctcgcaacatctgctgttgcaggtctcactggacgcgaagcagcgggcgcctgccgttgtgcggttgcgggtgctcctccaatggcagttggagccgttggattacctggagcaggtactggctggcgtgccggaacctgttctgttggatcgggtgctgcagattcttgccagtgatgtgcctgatggggtgcgatgcggcgtgccgtag

SEQ ID NO: 497111 - DNA, 243 bp, Stenotrophomonas maltophilia
atgcccctctgcggggtacagacctgtgaagtcggcgaaatgtgcgaacatgatgcagcaagcccgaagaaatcggctgcatccagccacagcgcggcactcttgagccatgcgtatgcctcactggatgactcacagtcctgtttgtccctcagcatgaggaacatgatggcccgacgctacaaaggcgttcgctgggagggctcgggttcgtggatggagccctccaacaaggcaacgtag

SEQ ID NO: 497112 - DNA, 516 bp, Stenotrophomonas maltophilia
atgaccgagctgaagcctccttcgcccgccatgctggaccgttaccagggcgacgacgtgaagccgctgtataccggccgcgtgcgggtgagcggtggccaggcccagcacgggcgggcgtccggcgtcgtgcggtcggacgacggtgcactggcggtggacctgcgcctgccgccggaactcggcgggcctggcggcggcgccaatcccgagcagctgctggccgcaagctacgctggctgcttccacggtgccatggtgctggtggccgcgcgtgccggcctgctgctgcacaaccccagcatcgaagtggcggtcaccttcgcccgtgatccggcagatgggctgtacctgctgtcggccgagatcgtggtacatcttcccggcatggatgagaacctggcctgcgaactcgttcgcaacaccgaacgcgtctgcccatacgccaagatgttccatcgcggcgtcagccatgtggtgcatgttcgggtcggcccgcaggctccgcctctgtag

SEQ ID NO: 497113 - DNA, 768 bp, Stenotrophomonas maltophilia
atgaagttcctcgtcatcggtggtaccggccgcatcggcagcaaggtggtggaacgcctgcgcgtagccgggcatgagatcgtggtggcagcaccctcgaccggggtggatgtgctgaccggtgaaggtctggatgccgccatggacggcgtcgacgtggtggtggacctggccaactcgccctcgttcgaagatgcggcagtgctttcgttcttcgtgaccgctggccacaacatacttgcggccgctatccgtgccggcgtacatcaccacgttgcgctttccgtcgtaggcaccgacatgctggcagccagtggctatttccgcggcaagatcgcccaggagcgcctgatccgcgactcgggcctgccgtacaccatcatccattccacgcagttcttcgagttcctgccgggcatcatccagtccgccggcgatggggagaccctgcggctgccggccgccgacgtgcagccgattgccgccgaggatgttgccgaagcggtggcacgcatcgcgcagcagccgccggccaatggcgtgctggaaatcgccgggccgcagcgtagcgcgatggcggatctggccaggcagtatctgcaactgacgggtgattcccggcaggtcgttgcggatgcccaggcgctgtacttcggcgcgccgctgcagatcgacacgctggtgccggtcggacacgcgtggctggggcaggtcgatttcgacgcctggctgcagcagtccggcctgttgcagcggcagcctgcctga

SEQ ID NO: 497114 - DNA, 1032 bp, Stenotrophomonas maltophilia
atgaatgccgcaacgccccgcgcggccagtgacggccacgatgcgctcaatgcgtccttctccaccagctacgccggtgtgctggccttcattgcagtggcgtccgagggcagtttcgcgcgcgcggccgaccgcctcggcatcggccgctcggccgtcagccgcagcgtgcagaagctggaaagccagctgggcgtgcggttgttcctgcgcaccacgcgctcgaccacgctcacccgggaaggcgagctgttcctggagggctgcaacccgggcgtgacctgcatcctgcaggcgctggaggaaatgcgcgacctgcgcgagggtccgccgcgcgggcacctgcgcatcagtgccagccacggcttcggccggcgggtgatcgcccccttgctggccgcattccgcgccgagtacccgcaggtctctgtagaactgctgctggacgagcaggcccccgacctggcaggtgaccgcatcgacgtggcatttcgcgacggcctgctggaagacagccaggtgatcgccaagcagctggtgccgatgcagctggtcgtatgtgtttcaccagcgtacgtgcaggcgtacggtctaccggtatcggtggatgcgctgtccacacatgcctgcatcgggcggcgcctgccgggcggacgcatgcagccctgggaattccgtgtcgacggtgccgaagtgcacctgcagccgccggccgcactggtgttcaatgatgccgacctggtcctgcaggccgtcatcgacgggctcggaatcgcccagctgcccagctatcaggtgcgtgaagcgctgtgggcgggcagggtggtgacctgcctggatcggcatgcgccgctcgatcgcggccactacctgtgctacctcagccgccgccagctgcccaagcgcgtgcgggccttcatcgacttcagcacgcagcgggtgcgcgcgctcgagctggatgtgatctcgcactgggaagcgcgccagcaggccacccctctgaacccaggcgcacggcctggctgggcctga

SEQ ID NO: 497115 - DNA, 276 bp, Stenotrophomonas maltophilia
atgctcggccgtctgccgggcatggacacctcatcgcacctgcgcaccgcatcgcgccctgccagcgaacaggtctggcaggccttcctcgccgcattgcgcgaactgccgcccgacgcacgcgcgatcctgctgttgcacgacgtgctgggcgccggattcgaggacatcgtgcccctgctggggctcgacccttccacgtgcaggcaacggttggcggcggcgcggagccacctgcacgcacaacgtgcccgcctggagccaggccacccatga

SEQ ID NO: 497116 - DNA, 480 bp, Stenotrophomonas maltophilia
atgaccgcacgcctggattacgccgcgcaatcccccgaactgttcaagaagctcggcgtgtactcgcatgccgcccacaccgcctcgatcgaaggggccatcatcgatctggtcaacatccgtgcatcgcagctcaacggctgtggcttctgcctggacatgcacgtgaaggaggccaccctgcgtggtgagcgcccgctgcgcctgcatcacctggcggcatggcgtgaatcaacgctgttcagcccgcgcgagcgcgcctgcctggcctggaccgaagtactgacccagctgccggcgcagggggtgcccgacgagctgtacgcgcgcgtgcgcggcccgctgtccgatcaggaaatggtcgacctcacccacgcggtgatggcgatcaacgcctggaaccgtgccaatgtcgccttccgtaccacgcccggcaccctggatacggcctttggcctggacaaggccggcctggcctga

SEQ ID NO: 497117 - DNA, 405 bp, Stenotrophomonas maltophilia
atgcgtcgctctgttctggtcctgtttgcgctgctgccactgtgcggcgctgccgccaccccgccctctcctgcgccccagcccttggtgcgcgaggtgatgacccgcgccctgccggagcagcccggcaaggaagcgctgatccttaccgtggagtacccgccgggtggcgccgatcctgtccaccgccacgatgcccatggcttcgtctacgtcctggaaggacggatcgtgatgggtgtggccggcggcaaggaggtcacccttggcccgggcgaggccttccatgaaggcccgtccgatctgcacaccgtaggccgcaacgccagcgctaccgagccggcgaagttcgtggtgttcctgatcaaggacatcggcaaaccggcggtgctgccgccgcactga

SEQ ID NO: 497118 - DNA, 882 bp, Stenotrophomonas maltophilia
atggacgattccactgcgctgttctcacgcctccgcccacgcctgttcggcgtggcctaccgcatgcttgggtcttcgcacgaagccgaagacgtggtgcaggatgtctggcttcgctggcatggcgccgaccagtcacagatcgagaatccggaagcctggctggtggcggccaccacccgtcgcgccattgatggcctgcgcctggcccggcatgcgcgcgaacactatgtgggcatgtggttgcccgagccgctgctgaccgatgacgccgccacgcccgagtacgtgctggaaaccgccagcgatctgtcggtcgccttcctcagtgtgctggaacggttggccccggatgcgcgtgcggctttcctgctgcacgatgtgttcgatcaggattatgcggtggtcgcgcgcacactggacaagacggaagccgcttgccggcagatcgtgcatcgcgcacgccagcagctcaggcaggagcgcccgcgctacaacgtcccgcaggacgtgcaccagaaactgctgcgccgcttcgccgaggctgcatccagtggagatttccgcacgatgaaggcgttgatggccgaatcggccgagctggtgggtgacggcggcggtatcgtcaccagctttcccgggcctttgctcggcggcacacgcattgcccagctgctgtatgccccgcacctgcggcgcagcgcgcaattgcggatggtaccggccatgctcaacggacggttgggactgctgcgctatttcgatggcgtgctggaggcggcgatggccttcgagaccgatggcgaacggatcacgcagatcctggtgcagcgcaacccgcacaagctgcagcggttggctcgccctaccgccatccagtag

SEQ ID NO: 497119 - DNA, 921 bp, Stenotrophomonas maltophilia
atgttcagtatggaaaacaccgccgcgcccattgcccccgccctcgatgaactggtgccctcgcgctacgccctgaaagtgggcgacgtcgaagtgctggtgatcagcgatggcgtcctgccgttgcccacccagatgctcggccacaacgtaccggcggccgcccgtgccgaatggttcgaagagatgtacctgccgcaggatgccttcgactgggcattgaacgtgatggtggtgcacagcggggatcgcaccattctcatcgatgccggcctgggcatggacccggacctgcagctgccgcgcgccggccagctgatccgtcgccttggtgctgccggtatcaacctgggcgaaatcaccgatgtggtgatcacccacatgcacatggaccacgtcggcgggctgctggttgaaggtgtgaaggaacagctgcgcccggacctgaagatccacgtggccgcagcggaggtggagttctggaagtcgccggacttcagccgcaccaacatgccgcagggtttccccgatgcgctacgcgccacggccaagcacttctgggccgagtacagcagctatgtgcataccttccaggacgaacagcagatcgcgccgggcgtaacggcccgccgtaccggtgggcataccccgggccactgcgtagtgcgcgtagcgtccgcggggcaggccctgacctttgccggtgacgcggtgtttgcggtcggcttcgaccaaccgaactggcacaacggttttgagcacgacccggaggaatccgcacgcgtacgcatcgctctgctgaaggaactggccggcaccggcgaaatgctggtggccacgcatcttccgttcccgtcagtgggccgggtgtcgctggagggcgagacgttccgctgggtgccggtgttctgggacttctga

SEQ ID NO: 497120 - DNA, 954 bp, Stenotrophomonas maltophilia
atgaacaccttcacccgtgccctggccgttgccgccctcgctctctcggtccaggccggcctgtccgcgcaggccgccgaaccggccacgccggcggcagtcaccagcatcgcgcgcaccgccagctacatcaccaccgccgatggcgtgcagctgtactacaaggactggggcccgaaggacggcccggtcgtgaccttcagccacggctggccgttgaactcggacagctgggaatcccagatgatcttcctggccgatcatggctaccgtgtcatcgcgcatgaccgtcgtggccacggtcgctccagccagccgtgggacggcaatgacatggatcattacgccgatgacctggccacggtgatcaatacgctggacctgcacgatgtcaccctggtgggcttctccaccggtggcggcgaagtggcgcgctacattggccggcatggcacggggcgggtgaagaaggccgtgctgatcagctcggtaccgccgttcatgctgaagaccgccgacaacccgaacggcctgccgattgaagtgttcgatggcatccgcaaggcgcagatggataaccgcgcgcagctgtacaaggacattccgtcgggcccgttctacggcttcaaccgtccgggcgcgaaggtctcgcaggggctgatcgatgcgtggtgggcgcagggcatgcagggcggccacaagaacacctacgattcgatcgctgcgttctccgccaccgatttccgcgcggacctgaagaagtttgatgtgcccaccctggtcatccacggcgacgacgaccagatcgtgccgatcgatatctcaggccgccaatcggcaaggctcatcaagggcgccaggctgattgtctacccgggtgcgccgcacggcctgaccgacacccacaaggacaaggtcaaccaggatctgctggcgttcctgcaggaaaagtga

SEQ ID NO: 497121 - DNA, 300 bp, Stenotrophomonas maltophilia
gtggctaggttgaatccagcccattccctgggagtgcgctggctgttctttcgccttcgcaacgggcagtccatcagtccggccaggctgatgtctgtctggtccgaggcggcggaatccaacgactgcgccgtgcgccgtgaaatcatcgacggcgccggctatgtctacgccttgtatgcgcccaacagcctgctttcacccaggcgcgtggagctgcgcatgagagcgctgctggaggaggccggctacgccttcacgatgggcagcctggcggggcggcacccgggcgacggctga

SEQ ID NO: 497122 - DNA, 270 bp, Stenotrophomonas maltophilia
atgtccgcacaaagccaggcgatcagcctgatgaccaagatcatgtaccagtgtcgcccggagaaaaccacaacaatggcgcaatgccgttgctgccacgcgcccagccctggcgggatggagtgcgcacggtgcctgaccggcaggctcggcgatacgattcacaatcgtggtgcagcgttcggctggctggaatcgttccgcagggtccagcaggacgaagcacacgtattcgaatgcgcaaagcgcgccgatgtggcatctccctag

SEQ ID NO: 497123 - DNA, 216 bp, Stenotrophomonas maltophilia
atgaacagcgtccccgaacagaacaggaatgaccgctccaacgcgtccgctgaagcagaacagcctgcacagcaggggcagggcgaggggggcgaacccggcggagaggagcccggcaagcaaggacagcaacagcagcaggacaacaaggatcgcgagagcccgaagccagcggatgaaaagaagggcggtctcggcggcgatacccgccgctga

SEQ ID NO: 497124 - DNA, 282 bp, Stenotrophomonas maltophilia
atgatccatggaagaagcaagcacgttgtcgacgtcgagcgcgagctggcccactggaaaatcgcgttcaacctgggcgccctgcccgcgatgagcttccgatatgaagtggcgcccgttatccggcttgcctgcgatatctatgtgagagatccgcatggcacccggtcggcatggatcgacgatctgcagggcaggcttgcgaagcgatcgagcctgcgcggccatcctggcgcagcggagattgccgatcggtgctggtccctgcttggctgcgcctag

SEQ ID NO: 497125 - DNA, 309 bp, Stenotrophomonas maltophilia
atgctcccaagaatcgtcggcttcgatgtcccgttgttgcatgagcgtgtagacgcatccaccgacgaagccatcaccgcgctgctggatctggcgccgggcgctcgctggacagagatgttcctcatcaagtgcagggcactggcgtcccagctccagctggcggatgttcgcattgaaggcgccaggatctacttctacggatccatcagcgattctcgtggacttgccgacgcggtgatgtccattgtccacgtactgaatgatgagttgatgcgcgagcggaatcacgcagccagccgcgcctag

SEQ ID NO: 497126 - DNA, 2652 bp, Stenotrophomonas maltophilia
atgtccaacaccccctttggcgagtcgtcatgtgctaccgcagccagcggctgcatcgaagtccgtggtgcgcgcgagcacaacctgaagaatgtcgatgtctccattccgcgcaatgcactggtggtgttctccggcgtgtcgggatccggcaagtcctcgttggccttcggcacggttttcgccgaggcgcagcggcgctacttcgaatccgtcgcaccctatgcgcgccgcctgatcgaccaggcgggcgtgcccgatgtggatgccatcgacgggctgcccccggcggtcgccctgcagcagcagcgcggcgccagcaatgcgcgctcctcggtgggcagcgtgaccacgctgtccagcctggtgcgcatgatgttttcgcgggcgggagcctacccggcccaccagcccatgctgtacgccgaagacttctcgcccaacaccccacagggcgcctgcagcacctgccatggcctggggtatgtctacgaagtgactgaagcactgatggttccggacccgtcgctgagcatccgcgagcgcgccatcgcgtcctggccaccggcatggcatggccagaacctgcgcgacatcctggtcacgctgggctacgacatcgatgtgccgtggaagaagctgccgaagaaggaccgtgagtggatcctgttcaccgaggagacgcccaccgtgccggtctatgccggcttcacgccggccgagacccgtaccgcactcaagcgcaagcaggagcccagctacatgggcacgtacaccggcgcacgccgctacgtgctgcacacctttgccaacacccagagcgccctgatgcgcaagcgtgtgtcgcgctacatggaaggcaagctgtgcccggcctgccacggaaagcgcctgaaaccggaggcgctttcggtcacctttgccggtgtggatatcggcgagttcatgcggctgccgttggaccagctggcggcgttgctcgagcccatcgcgcggggcgacttcagtgcacacagccacggcgcgcgttccagcaggcgtgcaacgccccgcgatcgcgccaagcgggcagcaagtggccgcgcgacccacgaaggcgcacccgacgtgcgcctgacctcagccttgtctgaggaaaagcgcctggcggcacaacgtctggcgggcggggtcatggcgcgtgtacggcaactgcgcgagctcggcctgggctatctatcacttgatcgcgccacgcccacgctgtcggccggcgaactgcagcgcctgcggctggccacgcagctcagctcgttgctgtttggcgtgctgtacgtgctcgacgaaccctcggccggcctgcatccggccgacagccaggcgctgtacgacgcactggaacggctgcgcgacggcggtaactcggtgttcgttgttgaacatgatctggagctgatgcgccgcgcgcagtggctggtcgatgtgggcccgcaggcaggggagcatggcggacgcgttctctacagtggcgagcccgatggcttgcgcgacgttcaggattcgcgcacggcgcagtacctgttcgaccaggtgcctgcgcccgccagtcggcagcgcagtgtcatcagctggctggagctgaagggtatccatcgccataacctgcagggcgtggacgcgcaggtgccgctggggcttctgaccgcagtgaccggtatttccggatcgggcaagtccagcctgatggcacaagcgctgcccgagctgatactgctgcacctggggcatgagccggtggacgacagcgccgacagcacgcccgcggatgggccgaccgtgatcgaagccacgcggggccagctggccggcgacgtggacgccatccagcgcgtggtgcaggtagaccagaagcccatcggccgcacgccacgatccaatctggccacctacaccggcctgttcgatcacgtgcgcaagctcttcgccgcgacacccgacgcgcgccgacgccgattcgacgcgggccgcttttcgttcaacgtggccaagggccgatgcgaaacctgcgaaggcgagggcttcgtcagcgtcgaacttctgttcatgccgagcgtctatgcgccgtgccccacctgccatggcgcccgctacaacgaggccaccctgaaggtgctgtggaatggtcgcaccatcgccgaggtcctgcagatgacggtggaccaggcgcaggcgttcttcgccgaagaagacgccattgcccgcccgctgcagttgctgcaggaaatcggtctgggctacctgcggctgggccagccggccaccgagctttcaggcggtgaggcacagcgcatcaagctggcgaccgagctgcagcgcagccagcgcggacgcacgctgtatgtgctggatgagcccaccaccggccttcatgcatcggacgcggacaggttgctggcgcagctgcaacggctggtggaggctggcaacaccgtggtgatgatcgagcacgatatgcgttctgtcgcacaggcggactgggtgattgatgtcgggccaggtgcaggcggcgcgggtggcaccatcgtggcgaagggcacgccgcaacaggtggcccgcgccaagggaagcaggactgcgccgttccttgcgcgcgagctggggcaggccagctga

SEQ ID NO: 497127 - DNA, 279 bp, Stenotrophomonas maltophilia
atgcaccccgacgtacttggctgggccgccacggcggtgctgatggcaaccctgatccggcagatggtgaagcagtggcagtcgtcccacccggaagccgtatccaaatggctgttcgcgggccagatgaccgcgtctgcgctgtttactgtctacagcgcgatgctgggcagcacggtcttcgtggtgaccaatgcgatgctgctgttgacggcggtggtcggccaggtgatggcctggcgccgccgtggccgacgccgggctcccccaccctgctga

SEQ ID NO: 497128 - DNA, 1494 bp, Stenotrophomonas maltophilia
atgtccgaaccgtttccgcgcgccagcttatggtcagctgacaccgagtcgcattgcttccgcccccttgccggcacgacgcgcgcggacgtgctggtggtgggcgccggcatgaccggcctgctgacagcggcccgcctggcggatagcggcctggatgtgctggtggtcgatgcagggcccatcggcgggcgcaatacggtgatgtccacgggcaatctttacgggcccgtctcccggctggcagaactggtctcgcgctggggcggcgacacggccagtcgtatcgtccagtggcggcagcaggcgctgcgcgccatcgaaacgctggttcatcgctacgatctgcgttgcggcttcgaacgcgtggccatgcagtacggcatgcaggagcgcacgcgcgaggtgacgacgcgattcgagcgtgaacttcaggcctatcagcgcgtcggcctgcagtgcgaacaccggcagtccggactgccgttcgcattgggccacgccttccgcgttcccgatcaggcgcagttggatcctgcggcgttctgcaggcaactggcacgtcatctggcaggtcgcgtgcgcatccacgactggacccggatcaaccgcatcgaggcatccgccggcgttgcgacagccgatggcgcccgcatacaggccaggcagttcgtgctggctacgcattcgcccgcaggcttcaacctggtgcaggccgagatggaggtgtaccgcgagtacggggtggcggtgccggttgccaacccacctgcggcaggcattcactggatcgccgaccggcaccgctcattgcgcggggtgcacggcgctgatggccgcgactggcttgtgctggttggcgaaacacaccgcaccggcgaaacgccagcggtggatccggcccagcatctgctagccgacgcgcgccgcaacttcaacgtgcagcgcgagccgctgtgctggtcggcgcagcaattccggcccgccgaccagctgccctacatcggcagcagcgcccacgataatgtgtgggtcgctaccggctatgggccggacggtttgacctgggcgggcgtggccgcgtgcgcgatcaccgagggaatcatgggcacgaccagcgagatcgagcagttgctcagccccatgcgcttcaccccggtgcgctcggcggccggctgggcccgcaccaacgccacggtggcgcggcacatggtgggagatcgccttgccacggcgccgtcgcactcacccagtgagctcgcccgtggttgcggcgcactgctggacgtggacggaaagcgcactgcggtctaccgcgacgagggcgggcgcctgcacatgatgtcggcgctctgcccgcacctgaagtgcgttgtccaatggaatggccatgagcgcacctgggactgcccctgccacggcagccgcttttccgccaccggagcgctgctggaaggccctgccagacagggcctcacaccagaacagctgtag

SEQ ID NO: 497129 - DNA, 261 bp, Stenotrophomonas maltophilia
atgcccaataccggccttttccatgttctggagctggacgctgtttccggcgtgcagggtattgagcgcgtcaggtccattcgcgtgcgctgcaacacctgcggcgggattacacagttgtcgggggacgcgttgggggcggtgcccggtggaacgacgctggtgtgcggcgcttgtccttcgcgccagacggtcagcaacgcgcggctggtcgaatgcgatcatgtcctgcccggcagcgcccagggatccgacgcgtag

SEQ ID NO: 497130 - DNA, 498 bp, Stenotrophomonas maltophilia
atggctatcaagacagcggaagacctgttcatccacgaactctcggatatctacagcgccgaaaagcagctgaccaaggccctcccgcgcctggcccgtgcggccgagaaccctgacctggccacagcgtttgaaacgcacctggaagaaacccagggccagatcgagcgcatcgaccaggtggtggaggttctcggcatccggctgaagcgcatcaagtgcgcggcgatggaaggtctggtggaggaaggcaaggaagtgatcgacagcatcgacaagggccctgtgcgcgatgccgccctgatcggcggcgcgcagaaagtcgagcattacgagatcgcgtcctacggcaccatcgccgcgctggccaagcagctgggctacaaggacgcccttccgctgctgctggagacgcttgaggaagagaaggctaccgacgagaagctcaccctgctggccaagggcggcggcaatgccaaggcagcacaagccgcctga

SEQ ID NO: 497131 - DNA, 768 bp, Stenotrophomonas maltophilia
atgacggcggcggccgccccgcgtgcatccgctccactgcgtgtcggctgtgcgggctggtcgctgccgcgcgcggatcaggaagcgttcggcgcgggcgacaccgcgctgcagcgctacgccacacgcctgccgatggtggagatcaactcatccttctatcgaccgcaccaggccaggacctatgcgcgatgggcggcgagcgtgccggagggcttccggttcgcggtgaaattgccgcgagagatcagccatgagcgtcggctgcgcgacgcaatgcaaccgctcgagcggttccttgaaggcgtgctggagctgggtgaaaagctcgggccgttactgctgcagttgccgccgagcctggtgtacgacacggccacggccatagcattcctgcggggcctgcgcgcgcgcacccaggccgatgtggcgtgcgagccgcgccacccgagttggttcacgccggaagtggatgcgcttctgagcgcgcatggcgtggcacgggttgccgcggatccggcacgtgtgccggcggcagcgacgcccggcggtgaccgcgcgtggagctactggcgctggcacggccagccgcagatctatcgcagtgcctacggcgaacccacccttgcccaccttgcgcggcaactgctggccgaggccgaggcgaaacgacccgcctggttcgtactggacaacaccgcactgggtcacgccaccggcaacgccctgcacctgcaggcgctgctgcaggagaaggaacatgcctga

SEQ ID NO: 497132 - DNA, 468 bp, Stenotrophomonas maltophilia
atgccttttcgtgcgattgcctatgtgagtgaagcgtccccaagcctgaccgaagagcggctgcaacggcttgtggccgaagcggtgcagttcaacgaatccgtcgatgtcaccggcacgttgcttttcgacggctcgcgcttcctgcagtatctggagggcccggaggccgggatcaatgcggcgtacacgcgcattctcgcggccggcagccacagtgggatcgtcgagctgaaccggggcagggtggggcggcggcagtttccgcactggcgaatgcgcagcgtgcgggtggatgagctcgcgctgggaaagatcgccatctctgactggaccggcttcgtgcgcagcgccttggcgctcgactccggaaacagcgcactggatcgtctgctgtcggtctcgcagttgcacacggatgcaggtgcgggagagaccctggaaccgtacgggcagctggtacgatga

SEQ ID NO: 497133 - DNA, 909 bp, Stenotrophomonas maltophilia
atgttctttcatcacaagaagctgatgtacaccgtgcgcgtgcgcgaatccaacccgcagctcgccagcctcatgcttgaacagttcggcggcccgcagggcgagcttgctgccgccatgcgctacttcacccagggactcggcgaatgcgatccaggccgcaaggacctgctgatggatatcgccaccgaagagatcagccatctggagatcatcggcaccatcatcgccatgctcaaccgcgggccgaaggccattcagtccgaagggcttgccgaggccgaggatatgcggctgctggggcagaacagcaccagccataccgagcagatcctgtacggtggcgggccggcgctggtcaattccagcggggtgccgtggacagcggcctacatcgactcgatcggggaacctgccgccgatctgcgctcgaacatcgctgcggaagcgcgcgccaagctggtgtatgagcgcctgatcaacgtcaccgacgaccccggcatcaaggatgcgctgcgtttcctgatgacgcgcgagatcgcgcacatgaaatcattcgagaaggcgctgcacagcatccagcccaacttcccgccgggcaagctgctgggggaccctgcgttcaccgatctgtacatggacatgtcgcagggcaacggcgccgacgacctgcagggcagctggaacagcggcgagctatgggagcgggtcagcgaccgcgaggcacagaccgctgtggatggtggcgacggcggcggcacggtggccctggacgcgcgcgaacaagcggcggtgcagaccatggccctgcgtacactctccgacccggaagcgcggccgaccaccggggccgagctgggggccggcccgggcgcgggagcactggacctgccaccacgcgagccgtga

SEQ ID NO: 497134 - DNA, 345 bp, Stenotrophomonas maltophilia
atgccgctgtccggaaccgattctgtcgctccaggcgtactgcgtgtcgagtgcatgccactcgactgcggcggtgccgccatcgtcgtggagctggaccgggcgcctgaacgggcctggatgaagtcgctgaagcgagcactgctggccgacgacgccatggaaggcgcacaggccaagttcgatgggcgcttcgtctatgtcgtgggcgtggatggtggcgggcatcgtgctcaacatcgggtaatgcaggccgtgatggcggcgggcggcgcgtgcgcctcgaacgccaggcgcgagcgacctgcagtcggcgtgggcgtatccagcgcaatggcgacctga

SEQ ID NO: 497135 - DNA, 393 bp, Stenotrophomonas maltophilia
atgcaatccggaatgagccagcgcagatgcaacctgctgctggtggaagaccagctcgacctggctgcgctgatggaacaggcgctggaggacgcaggcgatcaggtgacgcatgcctacagcgtgttcgatgcgctggggctgctggacaaccagcgattcgacggcgccgtgctcgacgtcgagcttcgcgacggcgtggtcttcccggtggctgatcgcctgacggaactcggtattccgttcctgttcgtatccgcggtctatgaccagttggtgccgcagcgtcaccgtcgcgccgctttcgtggccaaaccgttccacgtcggcgagttgcaggagacggttcggcgcgtcatgggggatgtctgcgtgcaaccgccggcgcattga

SEQ ID NO: 497136 - DNA, 687 bp, Stenotrophomonas maltophilia
gtgataggcgttttgatacccgcccacaacgaggcggacagtatcgcgcggtgcctgcaatccatccgggtggcggcccttcacccgggcctcggcggcgaagcagtggaggtgatggtcgcgctggatgcgtgtacggatgcaacgggcatcatctgccgccaacaccaggtcggcagcgtgcagctggatgcacgctgcgtcggtgtcgcccgggccgcagccgctgctgaactgctggggcggggcgccaggtggctggcaagcacggacgctgacagcgaggtgcctcccgagtggctggccgcacaggttcagggcagttgtgacgctttctgcggactggtggacatagcgacgacctgccagggtgaacggcgcctgcgcagggcattccaggcaagacagcagtggggcgaccatcatgggcgcatccacggtgccaacctcggcgtctctgccagttcctatcgggccgtgggcggctttgctcccctgcactgcagtgaagacgtggcgcttgtgagagcgctgcaacgctgcggtgcggtggtgcgatgggccggcgctcccgtggtgatgacaagtgcgcgtctgcaggggcgcgctacaggcggattctccgcttatctggcggcgctgggtggcgagcgctccggcgcggaagcatcggccctgatcacctga

SEQ ID NO: 497137 - DNA, 759 bp, Stenotrophomonas maltophilia
atgggcgctgtagccaggacacccctgcaaggggatggaacccaggagcaggcctggctgcactgcgattggctctggcagcaaccgaccacatcggcaaccgcactctgcagcgggcatgaccgcatggtggtggtcgcgccgcatccggacgacgaaatcctcggctgtggcgggctgctgcatcacgctgtggggcagggtatcgacgtcagtgtcgttgccgtgaccgacggcgaagcatgctacccgggcgagccgtggtggacgcccgaacgcctgcgatcagcgcgccgagcggagcttgccgcggcattgggcgaactcggcattccggtcggctccatcttccacctgggtatcgccgacggcgcggtcagcgcgcatgagcaggggctggaaggttggctgcagcagtatctgcaaccgcgcgacctggtcctggcgccatggcggtttgatggtcaccccgatcacgaagcggcaggacgcgctgcctgccgcgccgcgcgggcggtgggttgccaccggctggagtacccggtgtggggctggcactggcttgaccctgcctgcgcacatatggcgtgggaggttccgaagctggtcgacatttcagccgtggcgtccgcaaagcgaaacgcaatcgcgcatttccgtacgcagaccggcgacgtgtcgggcctgaacagcccgccggtgctgcccgcacatgtactcgcccgattcttccgaaactacgaggtattccttgcatga

SEQ ID NO: 497138 - DNA, 942 bp, Stenotrophomonas maltophilia
atgcaggatgtgacgtcatcctcttcgctgttcaatcgcgcacgccaggtgctggtgcagcaaccggcattgcctttgcccggtggcggccagacgctgcagcgttggcaggcgctggcagcctggggggcagaggatctttgcctggccaaggtactggaggcccactatgacgcccaggcgattgctgccgagttgagggcgcccatccctgctgaagacacgttgctggcggtgtgggctgcagagggtccggccaacaccgttcgcatcgatgccggcggtgggttgtacggtgacaaaccctggtgttccggcagcgcatgggtaggtgcggcactggtaacggttcgcaacccgcagggcgtgtggctatgccaggtagcggcggaacactggcacacacttgcgggcgagccatggcctgccgtgggcatggccgcaatcccttccaccacggtgcgctttgacggcgcaccgatggtgatcctggggacgcgcgatgactacctgcagcgcccgggcttctggcacggcggggcaggcatcgcggcggtctggtttggtgcagcggccgctttggccgagcgcatgcgaccggcctgcaccgagggaaatcgcgcgcggctgctgggtgaagtggacctcgcccttggcccggcagccgcgctgcttcgcgaactggcggcgcacatcgacgccgcgcccgaactggcccatcgcgaagatgtagtgcgcgtgcgctgtgtcgtcgagcgcgcggcaacgcgtgtgctggatctggcgggtcgggcgctgggcccgggcccgatgtgcctggaggacgcccatgcccggcgctgcgcggacctgaccgtgttccttcgccagagccacgccgatcgcgattgggaatggctgggcgagcagcgtgcagcacaggaggcaacatgggcgctgtag

SEQ ID NO: 497139 - DNA, 957 bp, Stenotrophomonas maltophilia
atgaacgcccgcgccgtcaccgttaccttgaacccggcgatcgaccagaccgtgcggctggccagcctgcggccgggccatgtgcaccgcgcccgcagcagccgcgacgatgcgggtggcaagggcatcaacgtggccgcctgcctggccgactggggcgtgccgaccaccgcgctgggcgtgctcggtggcggcaacgacggtgtgttcagcgcgctcttctccacgcgcggcatcgtggatggctgcctgcgtatccccggcagcacccgcaccaacatcaagctggttgacgaggacaacggcgaaaccaccgacatcaacctgcccggcctggccctcgacgataccgctctggacgcagtgtcgcgcaggcttggcgccttgctgctgccgggccttccggtggtgctgtccggcagcctgccgtctggactgccgtccgatgcatgggcgcgactgcaggcgcaggccgccgccgccggtgcgcgcgtgctgctggacaccagcggcgacgcacttgtggctgcattgagtgacaccgccggtgcgctgccctacgcggtcaagcccaatcgccacgaactggaggcctggaccggcacgcagctgcctgaccgcagcgccctccgcgtcgctggccaggccctggtcgaacacggggtcgcgctcgtagcgatctcgatgggtaccgacggcgcgctgttcattgatcgcagcggcgcgctggtcgcacgaccgccgcgactggcccagggcagcacggtcggtgcgggcgacgccatggtcgccggcatcgctgccgcgatgctggagccctccctcgatctggacggctgcgcgcggctggcgaccgcgttctcgatgagccggctgcaaagcggtgacgcacgacggctggacccggcgcaggtacgcggttggaccggcgatgtactgatcgagcggttggattga

SEQ ID NO: 497140 - DNA, 930 bp, Stenotrophomonas maltophilia
atgtctcccccgattgtttcccgctcaatcctggtgctgggtgccggcgaactcggaatgcccgtcatccgcaacctggcccagctcgcggttgtgcatgacgcaaccatcagcgtgatgctgaggcctgcgtcgattgaatccacactaccggacaagcgtacggtcattgaccagatccgctcgctgggagtggccctcgttcctggcgacctggtcactgccacggtcgatgagctggctgatctgttttccggttatgacacggtcatcggctgcaccggctacgctgctggccgcgacactcccatgaaggtagcgcgcgccgccgtgaagtcgggcattcccaggtacttcccttggcaattcggggtcgactttgacgccatcggacgcggcgggccgcaggatcttttcgacgcccagctggatgtacgcgactttctccgctcacaggccgaaatggactgggtggtcatttccaccggcatgttcaccagctacctcttcgagccggagtttggcgtcatcgatcttcccggcagaaaggtcaatgcacttggcacagcctccaatgcggttacgctgaccacaccagaggacatcggtgcaatgactgcacagatcgtcttccactcgcccccccttcgaaacgagatcgtctatcttgcgggagacacggtccgttatgagcagctgcccgccatccttgaggaaaagttcggtgctcccttcaagctgatcgtgtggagcgttccccagctgatggaggagcttgccagtgacccgtcaaacatgatcaggaagtaccgtgctgccttcgcccaaggcaggggcgtctcctggagcctggacgggacgttcaatgccagcattggcgtgaaactggagggtgtcgacgactggctgaaagcccacttcgagacttga

SEQ ID NO: 497141 - DNA, 435 bp, Stenotrophomonas maltophilia
atgataccgaccgcaccgttcatgagcaccgatgagcttctgcgacattcacaatcgatatgcgacggcatgagcgcggacgacgacggtctgcgccgcgaggtgctcgcgcatgccggcagccgctggtcgctgggcatcattcacgccctgggggtctacggaacactgcgtcacgccgatgtggcgcggcggatgaaaggagtcacgcagcgtatgctgacgcgtaccctgcgtcagcttgaaagggacggactgatccataggcaggatttccgtgaggttccgccgcgcgtggagtacaccatcactccgctgggcagggagctgctggttcttatgatcccgatgtggacctgggtagtgggacacgccgaggaattccgccgctgcagggagaatttcgacacgcatcacggccctccccctgactga

SEQ ID NO: 497142 - DNA, 561 bp, Stenotrophomonas maltophilia
gtgaacgctcttcagcgcatcgccgccgcagtcagcttcgccgtactcgtctcagccgcttccgccagcttcgccgcagatccggtaatggttggcggggccgagatgtacccgaccaggaccatcgttgaaaacgccgtgaactccagggatcacaccacgctggtggcagcggtcaaggccgcaggcctggtcgagaccctcaatggcgccggtccctttaccgtctttgcgcccaccaatgcggccttcaacaagcttccagcaggcacggtcgatacactggtgaagcctgaaaacaaggcgcagctcacccggatcctcacctaccacgtggtcccaggacggttcagttccgcccagctcctggccgatgccaggaagcacggtggaaaagccacgctgaagacagtgcaaggcgagccgcttaccgtggcgctccacgacggcaagctgtgggtgatcgacgccaagggtggcaaagcaggcatcagcatcgccgacgtcaaccaatccaacggcgtcatccacgttgtcgataccgtgctgatgccgaagtag

SEQ ID NO: 497143 - DNA, 1200 bp, Stenotrophomonas maltophilia
atgaaaactgcacgatggttgtccggcttcgcggccttgatgctggccctccctgcactggccagcacgaccaccacggccgacgccgtcgcgacgatcgaacgcaacgcccgtgccgcgcattccgacgcggtgcttgtctggaaggatggaaaagcactgctggagccacagccagagactggcgaggagccggttcacctcatgtctgccaccaagtcggtggtggcgctggccgtcatgctcctgctggacgacggaaagctggcctcggtcgacgagccggtaagcaacatcttcgcggagtggaagcaggggcggaaaagggacatcacggtacgcatgctgctggaccatacctccggcctgcagaacatggccaacgcgggggaagagctggaagctgcgccggacctggtcaagctcgcactggcggcagagctgagcagcgatccaggtaccacgttctcctacaacaacaaggctaccaatctgctgcccggcattgtcgagcgtctggcaggggaaccgatggatgcctaccttgagaagcgcctgttcaaaccgctgggcattgcccgatatacctggttgaaggacggtgcgggcacccccttgggcatggccggattgtcgctgagtgcccgcgatctggcgaagatcgggcagctgctgcttgatggcggcgtgaccccggcgggtacgcgcgtgctgagcgagcggtcggtggcgctgctgactggagcaagtgcccgctccccggatgttggtcttctgtggtggcgcattccagcatgggagcgttatgagctgaaaggccagatggccggcttcctggcgcagcatggggtcagcgctccggtccagcaggcattgctggccaccgggggcagggtattcgacagcaagagtgcattgattgcgtacgtggccgagcgacttggggcggactggccgcagcactatggcagcgagatcaccggtcgtggactcaagctgtccgacatgttcgacatccaacgcggccccaccgttgcctacgccgccaacggttacctgggccagcacctggtcatcgttccgcagcagcgcgtggttgccgtgcgcctcatccaccgacgcgacagccatcgcgcgccactggatgactacgcgacattcccggcggatgtactcacgctggcccaggcgcttcagtga

SEQ ID NO: 497144 - DNA, 2667 bp, Stenotrophomonas maltophilia
atgaccggccatttcaggaagagcacactcgcacaggcagtacttgccaccatcgtcaccgccactgcagcgctgcccgtcgcagcgcaatcagccaaggaaagcagctcgaccgccaccagcgaggcacgggaggcctcaaccctggacgccgtcatcgtcactgtcgaacgccgggaacaggacctgcagaaatatgcaggtactgcccaggcaatttccgcggacgatacgcgtgcgctgggcatcaacaatgagctgcgcaacatccaggccctggtgccgggcatgagcatggccaaccaggaaggcaacctggagatcttcatccgcggcgtgggctcttcgaacaacaccgaactgggtgatccgggcgccgcgccccacatcaacggggcctacattgcacgaccgcgcggtctgggcggcatgttctacgatgtcgagcgggtggaaatcaacaagggcccgcagggcacgctgcgcggccgcaatgcgctggccggcacgctgaacatcatcaccaagcgccccgacctggaagcgttcggtgggtatgttcaggccgaggccggcaatcgtgaccatcgcggtggcgagttcgcactgaacctgccgatcggcggtggcgcggccttccgcgtggccggctacaaggtggagaaggactcaccgttcaagaatgcggggcgcgcgcaggacctggagccggcaggcgtgcaggatgatcgcggcgcacgcctgtcgttcctgtaccagccggatgagaagctgtcgatcttcgcgatggccgacatcggcaaggaaggcggcacgggctatcccggtgccaacgtctacactgccgcgaaggccggctatctgccggacgatgtcgacctgcgcaagatcatctaccgcggcgcgcagggcaagctggacagcaccaactggggggcgcagaccagcatttcctacgacttcggcaaggtggcggtggagtacaacggcagctaccgcaacgtggactaccgccagaccaatgcgcagagcgaaggcatcctctggccgggccgaaacatcgatccggtttcgcccagcaacccgggtggcatcgactacgacaactactccacgcagtattggctgaccgagtcggagtcgcaggtgcatgagctgcggttcacgtcggaccaggacgaacggctgcgctggaccaccggcctgttccatttcaacgaggaccagcgggtcggctatctctcgctggtcgacaaggggcgctggtactcgggcaccgagttcaccatgccgaaggtcaatggcaagtcttccgccgttttcgccgatggcacgttcgacgtcaacgatcgcctgcgcctgaagggcggcctgcgctactccgaggagaagaagtcgcgttacggcatcggcggcaactggtcgctgggcctgcctggccagggcggggactttgccacgcgcctcggcacgcccggcttcgagcccgcgttcatgagccgtccgaactttgatgtcagcaacatcacctcgcaggcggagatggcccgcttcctgctgcagggcgtgctgcgacacggtcgcaacgacaccttgctgcagcagatcggcgcggtgcccgatggcggcccattcggctgcgtggaccgtcccgacatcggtggcgataccgtcgattgcccgtaccagagctgggcccaggtcagcgcgattccggcccagcagttcggcaagagcaagttcagctttaccgactggcgcgcgggtttcgagtacgacgtgagcgacgaccgcctgctgtacggcctggtgtcgaccggccacaaggcgggcggcttcaacgacacgtttgatccgaaggagattccagagacgttcaagcccgaatcgatcattgcctacgaaatcggcagcaagaactcgttccagatgctgggccgaacctcgaccttcaacgtcagcggcttctattacgactacagcgaccaggtgttccaggacctggcggtgatcgccaccaacccgaccactggcgaagccactggctatgcgctggtcaaccgcaatgtcggcaagtcggcggtgtatggcctggaggcggaaagcagcctgcgcttcccgcacaacttcatggtcaacatcaatgcactctggatggacagcgagatcaagcgcggtaccgtcgccgatgtccgcagccagaactacgacgccggtggtgccacttcgttgatcgacctgtccggcaatgaactgccgctggcctcgaagctcaccttcaacgtgcgcctgcagcatacgaccgagctgcgcttcggtaccttcgactggcagttgctggcctcgtaccgttcggccttcttcctgacccagtacaacaaccgggacgtggagttcatccgcaaggatccggtcactggcgaactggttcatgaccgcacgcagagcgctgctgccgcaggcttcccggatcgtcagcgcggcgagaccacgttgaacgccggcatcggctttacgtcactgagcggcaattggcgggtcgaagcatggggcaacaacctgctcggcaacgacgtctcgcagaaggcgctggtcggatcgggcatcaacgttcgcttcctgaacgatccgcgcagctacggcctgcgtctgcgctaccagttctga

SEQ ID NO: 497145 - DNA, 1461 bp, Stenotrophomonas maltophilia
atgaaacacacaacccgctggtcgcagttcggtgtactcatcaccgtcttcttcttctggggcttcgttgccgcaagcaacggcatcctcatcccggtgttcaagaaggcgttccatctcagccaggcgcagagcatgtacgtggcgatggccttctacgttgcctacaccgctggttcactgatctacatcgctgtttcacgtgccatcggctccgacctgctgcatcgggtcggctatcgcgacggcatctgcatcggcctgctggtctcggcactgggcgccctgctcttctatccagcagccaacaccggctcgtttgcactgatgctgtccgggctgttcatcgtgggcctgggcttctcgctccagcagatcgcggccaatacgctggcggtgatcatgggtgacccggccaccggatcgcagcgcctgaccatggccggcggcgtcaacaacctgggagcaacagtaggcccattgctggtgagcattgccatcttcggcagtgtgtcagcgggcaatacagaggccagcatcgagagcgtaaagataccgtacctggtactgggcgccgccttcgtactggtggccgtgctgctgcggctctcgtccgtgcccaatcatgtccagctgcatgcagccatcccggcaggtgtgcccgaagctgatcaggaaggcagccgcagatctgcgctcgcttacccgcagctggtcatgggcatgatcgcgatcttcctttacgtcggcgtggaggtatcgaccatcgacaatcttccagcctaccttgagcagcccttgagcaagggtggactggggctggaaacctcggtgatcgccccgttcgtgtcgttgtactgggccagcctgatgatcggccgctggggtggtgccgcaggcgcgttcgatgtgcgcgcaggcacccggaagctgttgatgctggtgttgccgttcgtcgcgttcgccatctaccttgccgtcaacgcgatctctggccacaactccgcacagttcctccactacgcgccggtgatcgtcctgatgatcattgcaaccttggccagcaggggcaatccgtcgcgcatgctgctgtactttgccgtgtgtggcattgcggcgcagctggtcggcatgttcaccaccggcatgaccagtgtgatcgccttcatcagtgtcgggctgttctgcagcacgatgtggccctgcatctttaccctggccatcagcggcctgggccgccacaccaaccaggcaagcagcctgctgatcatgatgatcatgggcggcggcatcgtcagttgggcgcagggcgcactggccgacaaggtcggcgtgcactacagcttcatcattggcgtgctgtgtttctgctatctggcgttctacgcctgggcggctggccgtacacttcgtcgccagggtgttgacctggagcgattggcaaccgaagcgggccactga

SEQ ID NO: 497146 - DNA, 1047 bp, Stenotrophomonas maltophilia
atgccgggacctgagcaggtgctcgcaggcaggccgggacgcgtgcggatcgaggatgtcgcggcaacggccggggtctcgatgaagaccgtctcgcgggtgctcaacaacgagccgaacgtctccaagagcacccgggcccgggtggacgcggcagtggaaaagctgcgttaccgccccttgccctctgcacgggtcctcgccggccggcgttcctacctgatcgcgatgctcttcgataatccgtcctcgaactatctgatggagatcgagatgggggtgctggatgcctgcatggaacagcactacaacctgatgctcgctccgctgatctacgacgcggccgatatcgtggaaaaggtcgagtcattgatcatgcagtcgcagctcgacggcgtggtgctgacgccgcccctgaccgacgacacggccctgctggaacgcctggtcgacctgggcattccgtactccagcatttcggcgaaggaacagaaccggaacgtgggcgtcgtcgtggatgaaatcggcgcggtggtggcgctgatcgcacacctggcctcgctgggccatacccgcatcgcccatatcaagggacacgccgcgcatggcgcaagcatgtggcgcctggcaggctatcgcgaaggcctgcgcagggcaggcctgcgctacgaccccagcctggtgctggagggcgagttttcatacgagtcgggctacaacggtgccaacgcgctgcttgaccgacctgatcggccgaccgccatcttcgctgccaacgatgatatggcggcaggcgtcatctgtgcggtgttcgaacatggcctttcggtgccgggcgacatctcggtctgtggtttcgatgacacgccgattgcccgccagatctatccggcgttgaccacggtctgccagcccacccgtgagatgggccggcgggcggccatggagctgatcaaggaagtgcgcgagctcggcagcggtggtgtggtcgatattgactacgctctgcaggtccggcgatccacgggaccggtccgtcacgattga

SEQ ID NO: 497147 - DNA, 2577 bp, Stenotrophomonas maltophilia
atgaacgtccgtcattccgatcgtgcgaagcgcaaccccgttttacgtccacaccgcctgatgctggctgcatcgcttgccatggcgctggtgcctgcgaccggtgcggcccctgccccggtgaacgacgcaggtaccatcactcccgcgcactggcccaaggcaacctggccgctggccaacgatccggccatggaacgacgcatcgacgcgctgatcgcatcaatgacgctggaagaaaaggtcggccagatcgtacagggcgatatcgccagcatcacgcccgacgacgtgcgcagatatcgattgggttcaatactggcaggcggcgcatccgacccaggtggccgctacaacgcaaaacccgccgaatggcttgcgctggccgacgcgttctgggaagcctcgatggacacgcgcaacggtggcaaggccattcccgtcgtctggggcattgatgcgatgcatggccagagcaatgtggtgggtgccactctgttcccgcacaacatcggcctgggcgcagcgcgcaacccggaactgctgcgcgagatcgcaaggatcaccgctgccgaaacccgtgtgaccggcatggaatggaccttcgcgccgaccgtggccgttccacaggacgaccgctgggggcgcacgtacgaaggctactcggaagatccggcattggtggccagctatgcaggggccttcgtcgaaggcctgcagggcaaggcgggggctgctgacttcctcgacgaccaccacgtgatgaccacggtcaagcattttctcggcgatggcggcacgggcaacggcaaggaccagggcaacaccacggtcagcgaggcagaactgcgcgacatccatgccgccggatacctgccggcgatcaatgcgggcgcgcagtcggtgatggcgtccttcaacagcttccatggcgagaagatgcatgggcacaagccgttgttgaccgatgtgctgaagggccggatgggtttcggcggcttcgtggtcggtgactggaacggccatggccagatcaagggctgcagcaacaccgattgcgcgaagacctatgttgccggcctggacatggcgatggcgccggacagctggaaggggatgtatgaaagcacgctggcccacgtgaaggacggcagcctgccggaggcgcggctggacgatgccgtccgccgcattctgcgggcgaagatgcgcatgggcctgttcgacaaacccaagccgtccgagcgcgcattgggcggcagattcgagctgctcggggcgccggcgcatcgccaggtggcgcggcaggccgtgcgtgaatcgctggtgctgctcaagaaccagaaccagctgctgccactcccgccgaaacaacgggtgctggttgcgggcgatggcgcgaacgacatgagccgtcaggcgggcggctggacgctcagctggcagggcgatggcacgcgtcgcgaggacttcccgaatgctgaaacgatctgggaaggtctggaggcacaggtcaggtcgggcggcggccaggccgaactggcggtcgatggccgctaccgcaaccggccggatgtggccatcgtggtgttcggcgaagatccgtatgccgaattccagggcgacctgcccaacctgatgttcaagaacggcaagtccggagacctggagctgatgcgacgcctgaaggcagacggcattccggtcgtgggggtgttcctgagcgggcgcccgttgtggctgaaccgcgaaatcaacgccgccgatgccttcgtggccgcatggctaccgggatcggaaggtgggggcgtggccgatgtgctgctgcgtggggccgatgggcgcgtgcaacacgacttccgcggaaagctgagctactcctggccacgccacgccaaccagtaccagaacaacgtggggcagaaggactacgacccgcagttcgccttcggatacggcctgacctatgccgacaagggaaatctgcctgcgctttccgaggacccgggcattgatccggacgccgccggtagcggtaccctgttcgatcgtggtgtggccggcactgggctgatgcttcgcctgactgccgccaatggcgaatcgaccgatgtcgtgcaccccaatgcaacgactgccgaccagtcactggcgatggtcgcaatcaacaccgatgtgcaggagggcgcacgccggttcagtttccgggcgccggccacggtggcgttgcaggccaatactccgctggactggtcgcgcgagaccaacggcgagctgtccttggtagcgaccatgcgtgtcgaacagctccccgcggaatccgcagtgacactcggtaccgcctgcggggcggcgtgtgctgccgaggttgcgctgggccccgcgctgtcggcggcgccgcgcaatgagtgggtcaggctgggcgttcccctcaagtgcctggccaacgccggggcggacatgagccgcttgaacgtgccgtttgcgctgcgcgccggaaagggcacaacgcttgcgatcacctcggtcgtactgggcaccgagttcgatcgcaaggtggagtgtgcgtcgcagtag

SEQ ID NO: 497148 - DNA, 2649 bp, Stenotrophomonas maltophilia
atgtccaatcccccctttggtgaatcgtcatgcgccgccgctgccagcggttgcgtcgaggtgcgtggcgcgcgcgagcacaacctcaggaatgtcgacgtctccatcccgcgcaacgcattggtggtgttttccggtgtttcgggctccggcaagtcatcgctggcgttcggcacgatcttcgcggaggcgcagcggcgctactttgagtcggttgcgccgtatgcacggcgtctgatcgaccaggccggcgtgcccgatgtggacgccatcgacgggttgccgccggcagtggccctgcagcagcagcgcggcgccagcaacgcgcgctcatcggtgggcagcgtcactacgctgtccagcctggtgcgcatgatgtattcgcgtgcaggtgcatacccggccaaccagccgatgctttacgccgaggacttttcgcccaataccccgcagggcgcctgcagcacctgtcacgggctggggcacgtctacgaggtgacggaagccttgatggtgccggatccgtcgctgagcatccgcgagcgcgccatcgcctcctggccgccggcctggcatggccagaacctgcgcgacatcctggtcacgctcggctacgacatcgacgtaccgtggaagaagctgccgaagaaggatcgggagtggatcctgttcacggaagaaacgcccaccgtgccggtctatgcaggcttcacgcctgccgagacccgggctgcgctcaagcgaaagctcgagccgagctacatgggtacatacaccggcgcgcgtcgctatgtgctgcataccttcgccaacacccagagcgcgctgatgcgcaaacgggtttcccgctacatggaaggcaagctgtgcccggtctgccacggaaagcgcctgaagccggaagcgctctcggtcaccttcgcgggcgtggatatcggtgagttcatgcggttgcccctggatcaactggcggatctgctggagcccatcgcggaaggtgatttcggcgcacacagcaagggtgcacctatcagcaggcatgcgacaccccgcgatcgtgcccggcgcgccgcgagtggccgcgcgacgcacgagggcgcccccgacgtgcgcctgacctcggccctgtccgaagagaagcggctggccgcacagcggctggcgggcggagtcatggggcgggtacggcaactgcgcgagcttggcctgggctatctctcgctggaccgcgccacgcccacgctgtccgccggcgaactgcagcgcctgcggctggccacgcagctcagctcgttgctgtttggtgtgctgtacgtgctcgacgagccttcggccggactgcatcccgccgacagccaggcgctgtacgacgcgttggaccggctgcgtgatggcggaaactcggtgttcgtggtcgagcacgatctggagctgatgcgccgcgcgcagtggctggtggacgtgggcccggaggccggcgagcggggagggcgcgtgctctacagcggtgagccgggcggcctgcgccaggtgcaggagtcgcgcacggcactgtatctgttcgaccaggtacccgcgcccacccgtcggcagcgcaccgccacccactggctggaactgcagggcatccatcgccacaacctgcagggagtggacgcgcaggtgccgctgggattgctgacggccgtgaccggcatttcggggtcgggcaagtccagcctgatggcacaggccttgcccgagctgatgctgctgcacctggggcatgaacccgcggacgatggcgccgaggcgtcgccgaacgacgggccgacggtgatggaaaccacccgaggccagttggccggtgatgtggacgccatccagcgggtcgtgcaggtcgaccagaagccgattggccgcacaccgcgctccaacctcgccacctataccgggatgttcgatcacgtacgcaaactgttcgcggcgacgcccgccgcacgtcgtcgtcgcttcgatgcgggtcgtttctcgttcaacgtagccaagggccgatgcgaaacctgcgaaggcgagggtttcgtgagtgtcgaactgctgttcatgcccagcgtctatgccccatgccccacctgccacggcgcccgctacaacgaggccacgctgaaggtgctgtggaacgaccgcaacatcgccgaggtcctgcagatgaccgtggaccaggcgcatgcattcttcatggcggaagaggtcattgcccggccgttgcagctgctgcaggacatcggcctgggttacctgaggctgggccagccggccacggagctttcaggcggcgaggcccagcgcatcaagctggccactgaactgcagcgcagccagcgcgggcgcacgctttacgtgctggacgaacccaccaccggcctgcacgcgtcggatgcggacaggctgctggttcagctgcagcggctggtcgacgcaggaaatacggtggtgatgatcgagcatgacatgcgggcggtcgcccaggcggactgggtgattgacgtcgggccgggcgcaggcagcgcgggtggcaccatcgtggcgaagggaacgccgcaacaggtggcccgcgcgcggggaagcaggacagcgcctttccttgcgcgcgagctggctcctctgtag

SEQ ID NO: 497149 - DNA, 234 bp, Stenotrophomonas maltophilia
gtgaacctttctggcggcggcagcggggaatcggcaagcgccgggctcgcagccagtgcagcgatgagcgtgatgagcgtgatgagcgccttcatttcactgcacacctcgatcaagcggccgccgaaccgcaaactaagcggcgtgcacgtagggctcaaccgcggcggccagcacatcgataccccacgcagaacccgcaatctcctcgggctggcttctcttgaagcgtga

SEQ ID NO: 497150 - DNA, 432 bp, Stenotrophomonas maltophilia
atgcccatccgggccgttgtatacgcaagccaggcagctgaaggcctttcgattgaccgcctggaagcactcgtcaccgatgccgcgaggttcaacaagcttgcaggggtgacaggcgtgctgctgcatgacggcacgcggttcgtgcagtacttcgaagggccggaagatggggtggccagcgtctacgagcgggtgctgcaatcgaccagccacacggatgtggtggagctggcccgggggcgtgtctctacccggcagttcccctattggtcgatgcaccagcttcctgccgaccagcttctggtcggcaggcttgccagggccgactggtcacgcttcaagagaagccagcccgaggagattgcgggttctgcgtggggtatcgatgtgctggccgccgcggttgagccctacgtgcacgccgcttag

SEQ ID NO: 497151 - DNA, 252 bp, Stenotrophomonas maltophilia
atgagtcataccggcctattcaagatcagggacctcacctacacgccaggcgcggagggcgacctggcccgtgccctgcagatcgaagccacctgcacggcctgcggcgcaaccagcgtctggggcgagcaggagatggagcatgtgcgaggaggaaccgtgcttgcgtgccgggcgtgcggtacgcgccaggccatcagcaatgcgggcctgatcagtaccccgtcagggatacgccaccgccggggctga

SEQ ID NO: 497152 - DNA, 870 bp, Stenotrophomonas maltophilia
atgtccgcgcctacgtcgctgcgggtgcaggccttccttgatgctttttcgctggaggtgagcgccagggccatgccggcgctgggtgccgaagccacccgcattccgcgtggcaccacgatctccattccctggctggccagcgaggacgacgacgcacgcctggcagcggcgcgcagggtgcgtgaactgggcttcgagccgatgccgcatctctcggcgcggcgcatcgggtcgcgtgcggtgcttgagcgcttcctgcagcgtgccgccaacgaggcaggtgtcgcccagtgcttggtgatcgccggcgacctggccacgcccgccggaccgtttgctgacagcgcttcgatcatcgagagcggccttctggagagggccggtatcaaggtcgtcgccatcggcggtcaccccgatggccatccggtcctgggcagtgacgcgtgctggcaggtactggaacacaagtgccagtccatcgaagcgcgcggcatggcgccagtgatcatcacgcagttcgccttcgatgccgacatcgtcctggcctggttgcacgcgctgcgcgcccgtggcatccacgttccggtgctggttggcgtgccgggcccggcaagcatcgcgcggctggtacgctacgccgcaatgtgcggggtgggggccagtgcattgatgctgtcccggtatggcatctcgatcggccggttgctgggcagcgcgggcccggaggtgttcgtggaccgtctggcgggcggtttgactgatgcccacgggttggtcagcccgcacttctttccgttcggtggaattgcccagtcgttggactggatcaaccagcatcgggcgctgccatcggttgcccgccgctga

SEQ ID NO: 497153 - DNA, 540 bp, Stenotrophomonas maltophilia
atgatcgtcacccggccgtccggctgggtgcagagcggcgagcgctgggatctgtggtggaacggccgttcggtggccagtatcgtgccgcatgccgtgctcgggttccgcctgaaactggacgcacgcaggatgtcacagagcaaggtcgtgtccgtcgccagcgcccgccaggcgaagcgctacgccgagcgctggtgcgcggcgcggctctgcccacaactgccactgcgtgacgccgtcgcccgactggtgcagagtgcacccgaaccgggcgccgtgttcgcgccgccactgacccggacgcagcggcagcaggcccggcgcctggccgaggccggcgcaagcgagatggggcggatcaaggaagcgctggcgccacggccgcgcgtgatggccgccaggcccgaggtgcagggacgaggtggaacctggtctgtgcccggccagaatccatcctcgccgcaccgaaacgggaacacctccccagccagggttacgccgaaagctcctcacgcacgatcctggccccttcgctga

SEQ ID NO: 497154 - DNA, 813 bp, Stenotrophomonas maltophilia
atgaaccgctggcttttcctggcgcttgctgcgctcccgttcactgccggtgccgtggtcatccgtgatgacgttgacgacgcccggtatcagatcgatgcctctgtcttcccggcgctggctgacatgccgggtgaaggacatggcgttctcatcgccccgcgctgggtactgaccgcagcgcatgcggcacccatggaagggatggaagaatccatctccatcaatggacgcgcctatgcggtcgagcgcgtctttgtgcatcccggtttcagaagaatgccggaggccctgggcaaggaggcgctggcgacaggaaatccctccaggatccacgcgttcctggcagcatcggatgacatcgcactgatcaggcttgcgactgctgtaaaggatgtacagcccgtagcgctctatcgccgtgctgccgaagtcgcgcagatcgcggccctgataggaaagggggctaccggcaatggcgtcgtagggctggtgccgggcggcccgcatcgcacgaccctgcggcgggcattcaacgcgattaccggcggcaacgaacggtatctctggtaccggttcgatccgccaccgcaggccctgccgctggagggggttctcggcaacggtgacagcggcggtccgctggtgattgatgatcacggaacgccgcagctggtggggcttggttcgtggatcactgcggttccagagcatgcgctcgaggcggggttctatggccaggtggtctacaacgttcgcgtatcgcgctacatcgactggatcgaaagcatcagccgtgacgcgtcacattga

SEQ ID NO: 497155 - DNA, 1158 bp, Stenotrophomonas maltophilia
atggaatccatgtcaacgactgcccgaaaccggcaatggctcaatgccgtcgtgctatccgcagtgctccttgccgtcggctgcgagggcaggaaggcaccgccgaacgatgtgggggcggcggtcgacgaggcggcccatgccctgatcgaacagcctttgctgcactcggcctccatcggcgtggtgtaccggggcaagaccttcatccgtcaccgcggcgagatggtagccggcaagcccgatgttccgaccgacgcaacgctgtatgagatcggctcgctgagcaagaccctggcgggcacgttgatggcccgtgcggtgcttgagggcagggtgggcctggaggatgacgttcgcagctacctgcagggcgactatccgaacctgcagtaccagggccagcccatacgggtccgtcacctgctgtcacacaccagtggcctgccgaacatgctgccggagcgggcgaacaccgtgttggaggacttcaccgatcaccgcgtgcccggtgaactcagtgccctctatgcgcattacggcaagccggatttcctgcgggatctgcacgccgtgcggatcccacggatgcccgggaaagagtacgcctactccagtgctgggacggagctgacggcccacattctggaaggcgtctacaagaccgactacacgtcattgctgcgtggcttcttcagcgacgccgcagcaatgaccagcatcgggatcaagctggggaatgcggaaaaagaccgtcttgccatcggctaccacagcgacaatccggtgccgacctcgccgatgccacagttgccatggggcgcttccggcaacgtcaaggcaacagtgcccgacatggtgaaataccttcagttccagctggccaacggcccggtggtgcaggaatcgcatcgcactctggccagattcgacgacgagttcagcattggctatttctggaacatcgtcgctggcgatcgccagaagggtgtctattacgcccaccacggtggcgttccacgctcgcagtgctacatctacatcatgccggagcacgatctgggcatcttcgtgatcaccaaccagagcggcgaccggaccgcgcgtgccatggaggcggcgatcgataccctggtcgggagaatcgcggcgcgttga

SEQ ID NO: 497156 - DNA, 1005 bp, Stenotrophomonas maltophilia
atgaaatccggaatcgattcgatcaaggttgtactgctggtgctgtgcagttggctggcgatggcgggcagtgcccttgccgcaggcccggccgggcattgggacattggcctgtacggcaatctgttcggcgcccgcgagtaccaggtgtgggtgccggcgggctacgacgaccagcagccgctaccgttgctgctggtgctgcacggctgcgtcaacgggcccaacctgatgggggaggcgtcaggcttcaatgatgtggccgacaccgaagggttcatcgtggtctacccccggcagaacgtcacctccaatccggcccgctgctggaactggcagctgccgatcaaccaggcccgcgacagcggcgaagggtcgatcctggccggcatcgtggacaaggtgaaagcggactacagcgtggatccgcgccgggtctatgtcaccggcatttcggcaggtggtgcgatgacctcgatcatgctggcctgctattcggatgtgttcgctgccggcgccatccactccggtggcatgttcaagggcgcgaccacgatttccggcagcgcctacgcactgctggccggcagcatctattcgccggacagcaatggccgcctggcgtggcagtgctcgggttcgccgtcgccgcgaccgctgccggtgctggtgttccatggcagcgccgatctcaccgtcaatccggtgaacggccagcaggccgtgcgccagttcctgcagaccaatgacctggccgacgacggcctggacaacgactcggtgaaatacgtgccgaccagcacctatcacggacaggtgccgggcggccgcgggtataccgtcgacacctacgcctacggtggcaggacgctggtccagcactacgtggtgcagggcatggggcatgcctggagcggcagccagtcgggcctgccattcaccgacccgaaggggccggacgccacgctgatcacctggttgttcctgaaggactaccagcgctga

SEQ ID NO: 497157 - DNA, 2199 bp, Stenotrophomonas maltophilia
atgaaacggaattgcctgagtctcatgatcggcgcattgctggcctccgggccggtactggcacaggaaacgccccaggccacgccgacggcggccaggactgcatcacccaccaacctggacagcatcaaggtcaccgcgcgcaagcgcgaggaaaccttgcaggaggtcccggtagcggttaccgcatttacctccgaagcgctggacaagatgaatgtccaggacatcagcgacctggatgcgcaggtgcccaacctgaccatctacgccgcccgcggtgccagcagcacggtcaccgcctacatccgtggcatcggccagtccgaccccacctggggcgccgatccgggcgtgggcatctacctggatgacgtctacatcgcgcgcccgcagggtgcgctgctggatgtgttcgatgtctcgcgcatcgaggtgctgcgcggcccgcagggcacgctctacggcaagaacaccatcggcggcgcgatcaagtacatctcgcgcggcctgccgacccagaccgagggcttcgcccaggtcaccgtgggcaactacagccagttggatgccaaggcagccatcggcggtccgatcggcggtgctgacagcggcctgcgcgcccgcgtggcggtggccagcatgaaccacgacgggtttggcgagaacactttcaacggccagccggtcagtgacaagcagatcaacgcggcacgcctgaacctgggcgcgtatgcgggcgacgacttcgacgtgcagttcgcactggactggatcgacgatcagtccggcatgcgcggctcgaagatgctggcacccaatccgttcctgcgcgcctacccgccgatggacagccgctatgacatccgctcgggcatgcgcaacctcaacaacgtggagagcaagggcgcctcggccacggtgaactggcggccgaacgaagacatcgcgctgaaatacgtggtcgccaagcgtgaatcggacagcgaggccaacatcgacttcgataccgccccggtcaagctcgccgacgtgggtggcacctaccacgacgaccaggtcagcaacgaagtgcagttgaactacgatgccggcggccgggtgcgcggtgtggtcggcctgtaccagttcagtggcgaggctggcgggcagatccagaacaactacttcagtgcccagttcgccgacaaccagggcaaggtgctgaccgacagcatcgcgctgtatgcggactggaccttcgacctgacccgcagactgaagctcgatgtcggcgcccgctacaccgacgaggacaagcgcgcgatcgtgctcaaccgcctctacgccgacccgggcttcagccggccggtggcggtgaccgccgatttcgacaagaagaccaatttcaggaacgtctcgcccaaggtctcgctggactaccagatcactccggacatcatggtctatggcctggcgacgcgtggcttcaagtccggcggctacaacatccgcgccaacgcggtggcggtaccgcgctcggcggagccgttcgatgacgagaccgtggacagctatgaggtcggcagcaagatggccttcctcgaccagcgcctgttcctgaacctgtcagcgttctacaacaagtacaaggacatccagctgtcggtgttcaccggcctggataccaatggcgatggcatcgatgattccttcttcggtgatttcaccaatgccggcgccggtaccgtcaaaggcctggaagtcgagtatcagtacctgcccagccagcactggctgatttccggcaacctggcgtggctggataccagatacgacgagtacatggaccgcggcatcaacgtggccaggcagatgaagttcaccaatgccccggatatctccggtgcgttcaacgtggaataccgcaccgacctggccaacggcagcaacctgtcggcacgcgtgagctacagctaccagagcgaagtgtggccgaccaccgacctcagcccggtgatccgccagcagggttacgggctggtcaatgccggcgtcatctggcgcctggatgatgcgtggaccttctcgctgcagggcaccaacctggccgacaaggaataccgcactactggctacaacattcctgcagtcggcacgctgattggcttctatggcccgccgcgccaatatggcctcagcgtccgttacgatttctag

SEQ ID NO: 497158 - DNA, 879 bp, Stenotrophomonas maltophilia
atgacgcagtcttacgacgacctgtactggaacagcgacgatggcctgcgcctgcacgcgcgcgaccatgcagcggatgcccggcaggcgccccgcggcaccgtggtctgcattcccggcctgacccgcaatggtgccgatttcgatgcactggccgaaacactcaccgccgagggatggcgcgtgatcgccgtcgacctgcgtggccgcgccggttcagaacgtgcgcatgatccgtccagctacaacccgcgcacctacgcagatgacatggtcgcgctgctgcgcgcgcagaacatcgacaaggcggtgttcgtcggcacctcactgggcgtgctggtgaccatcaccctcgcttcgcgcgcgcccgagcgggtcgcgggcgcggtgctcaacgatgccggccccagggtgccgcgtgaggcgctggcacggatcggcaagtacgccggcaagccggtaccgccgatggacctggtgcaggccacggcctacgtggaatccatcggcaaggccgcgttcccgcgcttcagcaccgacgactggcggcagatggccgtgcgcaccttccgcccgcgcagcgatggcctgctggaactggactacgacccagcagtgatccgcaccacccggccatggctgctgtggctgttgcgtccgctgctgtggcgtgcggtccgtgggctgaccgcacgggtgccggtgctggtggtgcgcggcgcgctgtccgatattctgccggccgatgtggcgcggcagatggcggccacctcggaaagtgcccgtctggtggaggtgcccgatgtcggccacgctccgatgctgtccgaaccagaggcgcgcgacgcgatccttgccttgctggagcgtgtggtgtga

SEQ ID NO: 497159 - DNA, 477 bp, Stenotrophomonas maltophilia
gtgagtgcggacagcgagctgcctcccgccctgcaggcggtgcagcagtgggccgccagtgagcggctgagtggcgtgacctgcctggaccaggcgcgcatcgatgcctttgccgacgccaccggcgaccacaactggatccatgtcgatccagcgcgggcgcaggcgcagatgccgggcgggcgtaccatcgcacacggcttcctgctgctctcgctgacggtggaggacgatgtggccgctctggccggcttccccggcatcgcccatgtgctcaactacggcttgaacaaggtccgcttcctggcgccagtgccgagcgggtccgaggtgcgggtacgctcgcagctggtgtcactggatgcgcgccagcccggccagtggctgctgatccagcgcaaggccgtcgagcgggtcgccgatggcgagctggcactggtcgctgagcagctgtcactgatcgtgatcacgccctag

SEQ ID NO: 497160 - DNA, 3330 bp, Stenotrophomonas maltophilia
atgttgacgccctccatcgtcctcttcgcctgcattgcatggaccgcactgctgtttggcgtggcgctgtggggcgagcgccgggggcaccggctttcgaaggcatggccgctcatctatgcactgtcgctggccgtgcactgcaccgcgtggacctactacggtgcggcctcgcaggggcggcaatggggtttccccattccaccaaccctggccggcatggcgctgatcttcgcgttcggcctgccgttcctgctccgtctcgggcggctggccaagcagcacaacagtgccaccatcgccgatctggtcgttgcacgactgcgtgccgatcgcggcctcggcttcaccatcaccctggtggcgctgttcggcatcattccgtacatcgcactgcagctgaaagccgtcagccaggggctgggcaccctgctgggtgatgggttcgcgcctgccggtgcgcagctggacatgtcgttctggttcgcgctgacgatggccgcgttcactctgctgttcggtgcacgtaaggcctcggccaccgagcccaaccgcggcatcgtggtcgcgctgggcctggagtccgtattgaagctggtggcgctgctggccattggcctgtatgcggcgttgtccgtgcacaaagccggcacaccgctgctggagaagatggcgcagctgccaccaccggccatcgtgccggactatctcaccatggtcgcgctgggggcgatctccgcgttcaccctgccgcaccagttccatgtcggcgtggtcgagcttcgccagacctcggacctgaagacggcacgctggatgttcccggtctacctgctgctgatcggcctgccgtcggtgccgatggcattggccggcgctgcgcagctgccggcctcggtatcgcccgacctgtacgtgctggcgctgccgcaggccgctggccatcatctgctggcgctgctggcctatctgggcagcctgagtgcggccaccggcatgatgatcctgtccgggctgacgctgtcgatcatgcttggcaaccatggattcggttcgcgcctgctcggcggcatcgggggcggcgtggccaatgccgatctgcgcccgcgcgtgctggcgttccgccgtgccggcatcctcgccgtgttcctgatgtcgtggctgtacagccgcgcgatgagcgacaccgaggcactcagcgatttcggcctgatgtccttcaccgccctctcgcagctggcaccggctgtgctgctggcggtgtatcgcccacgtacgccctccgcggccatcatcgccggcatcgtgctgggctcattggcctggctgtggctggtactgctgccgatggtgatcccggccgcgacgccgtcggtcggcgccgacgggctgcactggttgtcggtggtctcgctgcgcgtgcagccgggccatatcgcgatcagcatgggggccagcctggcgatcaacctgctgaccgtggccctggtgtcgcgggccgtgcgtccgtcattgccgcggcggcgggatgcggtggctgcggcgtccctgcgcaggaccgccggacgcttccttggccaggagcgtgcgcgccagctgctggagggccacgccgggcagatgctggatgacgaccgggtcaccgccgtcgagcgtgagctgacggccgtggtgggcgcaggcatggcacggctgctggtcgaagccgcacgcgagggcggcgccgcgccgctggatgcggtgacccgcgccgtcggcgaagctacccaggtgctgcgcttcaaccagcgactgctcgaagccgcgctggagaacatgagccagggcatcagcgtggtcgatgcgcagctgcagctggtggcctggaacagccgctacgccgcgctgttcaagttcccgccggagctgctgcaggtcgggcagccggtggtcaacctcacggcgtgggcactggggcagctgaagatcggcgatggccccggcgacacgcccaccagggcgttgcagcgccgcgtcgcgcatatgcgccgtggcacgccacacctgtcggaacggatatttcccgatgacaccatcgtcgagatccgcggcaacccgatgccgggtggcggctatgtagccaccttcaccgatgtcacggcgttccgtcgcgcggaggatgcgctcaagcgcagcaatgaaacgctggaacgccgcgtacaggaccgcaccgcgaggctgcagcaggcggtccaggaggccgagcgcgcgaacgcggcgaaaacccgcttcctgacggcggtcggccatgacctcatccagcccctgcatgcggcccagctgctgaccgaggcgatgtcgcagcacatcgaatccgagttcctcgacagtttcctgcagcagatccgcggcgcactggattccaccgatgacctgctgtccggcctgctcgatatctcgcgactggaagccggtgggctggtggccgatccacgcccgttcgcgctgtcgacggtgctggatccgctcgcgcaggagttcgcggtgctggcggcggcgcgcggcctgcagttccgccatgtgcggagccaggcctgggtccatagcgatcccctgctgctgcgccgggtgctgcagaacttcctggccaatgccattcgctacacccgccatggcggtgtgttgctgggtgtgcgccgccaggggcaggcactgatgatcggcgtgcatgacaccggccccggcattgctccggagcagcacgcggtggtgttcgaggagttccaccgggtcgatcgcagcaacggccagggactgggactgggcttgaccatcgcccaccgcatcgccgatctgctgcatgcacccttgcacctgcgcagcgtgcccgggcacggctcggccttctcgatcagcgtgcaacgcgcagcaccgtcagtgaccccgcgcagttcggcaccgacgggtggcagcaacgccctcaagggtatccgcatactggcagtggacaacgacccggacgcgctggaggcgatgcggcaactgctgctttcctggggctgcgacgtcatcgcggcaggcagcgccgatgccatcgggccctcagggcacgaggcggcgctgtggctgtttgactatcacctggatgacggcgataccggtgttgcgctgtggcagcggctcgcggacatgcatggaccgcggccgacggtaatcctcagtgcggataccggcagcgatacacgcgaggcggtgcgcggcgctgggctgtccctgctcaacaagccgttcaagccgttggcgctgcgctgggcgatcaaccacctgctggcggccactgccacgcgctga

SEQ ID NO: 497161 - DNA, 675 bp, Stenotrophomonas maltophilia
atgccaaccctgctcattgccgacgatcaccccttgttccgcgcggcactgcatcgcgcggcggaagaggcggtcgccgatctgcagatcagcgaggcggattcactggacagcgtgctggaggcgatcgagaaccagtcgatcgacctgatgctgctggacctgcatatgccgggcaatcatgggctggccggcctcgccaccattcgcgcacttcagccaggtctggcgatcatcatcgtctcggccaatgaagagccgcaggtgatccggcgcgccatcgacctcggcgccgcgggctacctgcccaagagctcgggtttgaacgagctgcagtccgcgctgcagtccgtgctggagggcgaacgctggatcccggcgctgctgcgcgagccggtggcgcgggtggcgccgttcagcagggatgccgacctggccgcacgcctggccagcctgtccgcacatcaatacaaggtgctggggctggtggccgaaggcctgctcaacaagcagatcgccgaccggctgggcgtgcagctgcgcacggtcaaggcgcacatgacacgcatcatggagcggctgggcgtgcgcaaccgtgcgcaggccatccgcgtgctgcacgaaatggggttggccgatccgtcccggcagatcgaagagctgcccgagccctga

SEQ ID NO: 497162 - DNA, 1647 bp, Stenotrophomonas maltophilia
atgtcatctgcccccactcccgatgcccatgcctatccactgctggtcaagcagctgctgctgatgccgctggcggtgagtcctgaacaggaaatcgtctacggcgaccaggtccgattcgattaccgcaccctgcaggtgcgcatcggccaactggccggcctgttgacctcgttgggcgtcggccacggcgacacggtggcggtgatggactgggacagcaaccgctacctggaggcctacttcgcggttccgatgatcggtgcggtgctgatgatggtgaacgtgcgcctggcccccgagcagatcgcgtacacgctgaaccacagcggcgcgcgggtgatcctggccaaccgcgagttcctgccactgctggacgccatcgacgagcagctgccggacctgcgcacgcgcatcctgttggacgatgccggtggcccgctgccgccaggcttcgccaccgagcacgaagcggggttgcgcggtgccacgccggtcgtccgcttcccggacttcgacgagaatgcccgtgccacggtgttctacaccaccggaaccaccggattgcccaagggggtctatttcagccaccggcagctggtgctgcattcgctggcggcgatggccgcgctcggcggtgcaccccgccagggccgcctgcatcgtgacgatgtctacatgcccatcaccccgatgttccatgtgcatgcgtggggcctgccctacgtggctaccgcgatgggcatcaggcaggtctatccggggcgttacctgcctgcgaagctgctggcgttgatcgcccgcgaaaaggtgaccttctcgcactgcgtgcccaccatcctgcacatgctgctggaacacccgggcgcggcgcagaccgacctggagggctggaaggtgatcatcggcggtgccgccctgccccgtgccctggcgcagcgtgcactggcacggggcatcgacatcttcggcggatatggcatgtccgagacctgccctctgctcaccatcgcccagatcgacgtggacagcgtgaccgatgccgatgaggtgctgtcactgcgcaccaaggccggcattccggttccgctggtggacctgcgcatcgtcgacccggacatgggcgatgtcgcccatgatggcatcgccaccggcgaagtggtggcgcgtgcaccctggctgacccagggttacctgcacgatcccgaggcttcggcaacgctgtgggcgggcggctacctgcacaccggcgacatcggcaacatcgacgaagctggctacctgcgtgtcaccgaccgcatcaaggacgtgatcaagaccgggggcgaatggatctcctcgctcgcgctggaagacatcatcgcactgcacccggcggtcagcgaggtcgcggtgatcggtatcgccgacacgaaatggggcgagcggccattgccactggtggtcaggaagccgggaagccatgtggccgaagcggagatcatcgaactggtcgcggcgcgcagccgttccggagacatctcacgctatgcgatcccggagcgcgtgagcttcgtggatgcaatcgagcggaccagcgtgggcaagatcaacaagaagaagctgcgcgggctgcatgatccggtccttggcaccggcgggcgatga

SEQ ID NO: 497163 - DNA, 600 bp, Stenotrophomonas maltophilia
atgtccgacaaccctccaccgctgaacatcctggcgtttgccggcagcctgcgcagcaacagttacaaccggcgcctggtcagggctgcagcaggcgccgcgcctgcgggcctgctgctgaccgtgcatgacaccatcgccgatattccgctgttcgacgaagacctggaagccgccgacccggccggccctgccggggtcaagcgcctgcgcgcggccattgcatccgctgacggcgtgctgatcgccacgccggagtacagccagtcactgcccggcgtactcaagaacacgcttgattggctgtcccgcgacgatgccgagtaccgcacggtcctttcggccaagccggtggcgatcatcggcgctacgccgggtcactggggcaccaaactggcacagtcgcagctgcgccatacactgaccgccatgggcgcattgaccatggcctcgccacagctctatgtggccgaagcagcggccgcctacgacgatgacgcggaagatttcgacgcgccgacgcgcaagcgcctgcagcgcttcctggagggattccagagctgggtccagctgctgcagggtggggcgtcgcgcgcttga

SEQ ID NO: 497164 - DNA, 1767 bp, Stenotrophomonas maltophilia
atgtacgcaaggatcgcggcagctgcgctgctgtgtatgacggccctgcctgcgtcgagcgccaaccgcggctcgacggtgatggaggactacgcggcggcgctgaatgcccgcgggcagattctgcagttggataccggtgatatgttcggggagaggatcgggctgtttaccggctcggtggaatttctgcagaccgacgtcgacctgccgggcaacagtgcgctggaggtgggcatcaagcggcgcttggtggcaggtgcacagggccggcagggattgggcatgttcggggtgtgggacctggccctgcccagggtgcatggaacgttcagcacccaggggggatggaagaattacgtggtggccgagccgctcaaccgctgttcgaagttcaccccgcctccaaccgagatcgtcacggtgaaggcacagacgccgacagggccggggacattcaccgagtacttcaactccgacgagttctggcatggaacgcagctctacctgccagagaccggtgacgaggatctactcgcgcaaagcagcgaatggccggtgccgagtacaggccatgcgtacccgatgcgaaccaagagcggcaatgtcatccgctgcgtcgccatggacgatggggcaggtgagggcttcgaagtcacgacgcctgccggtatcacctatacgctcaatcatatggccagccttggtagcggaccgccattgatcaagaagggatactcgcggggaaacttcggctcggttacggagttcgagttcgttcttttccggcaggagttccatattcttccgaccagtgcccgagaccggtttggaaattcggtgacctacacgtgggatccggcaaatccacggcagttgctgcgcatcgcagccaacgatggccgcaccgtcgatctcgaatggacggctggatcgcccagcacgctgccaagcgaagtgagcgcggtccgtgcgggtgggaggacgtggacctacggtaccgtggtgggtggctacaaggtcaccttcccggaccagtcctactggcagactacggggttcaacgtaggcaccatgggtgccggtgccgttcccgcagagcggggtttctgccggaatccgggtgtggtgacctacggccattccggttcgatccgccatcccagtggtgcagtggcgaagtatcgcttcgagccgacgctgcatggccgctcgtgggcgcgttatggctgcaatatgcccgacagcaccggtagcgggttcctcgactcgatcgaatacacgcccgccaggtactacacgtggtcgctggtttccaggacagtcaccgggccgggcatcgaccagccttatacgtgggcctacagttacggcccggccaacgggtgctatgccgacggcagcaaggaactgtgccaggccaattcgccggccacgaagtgggtggacgtcaaggatgcagagggcgtcaccacccggcacacctttggcaatcgattcaatgtggacgaaggctatctgctttcctcggtccagccgggccgcgccaccaccctcagctatcagcttgacgcttccggcagctatccggcattggccgggcgaccggcatatcagcgtgccagcggaatcatcgcagccaagcagataccgttgttgcagaaggtcatcgagcaggatggcgtacgctacctctggaaggtcaatacgttcgacagcatggcacgaccagtgtccatcactgaagccagccagcccgtgcagtag

SEQ ID NO: 497165 - DNA, 744 bp, Stenotrophomonas maltophilia
atgtccgccaaccgcctttaccagaccatcgctgccaagctccgcaagctgatcgaggacggcgaattcccgccgggctcgcggctgccgggcgagcgtgaactggccgaacggttcggtgtcagccgggtcaccatccgcgaagccgagatcgcactggaagcacagggctggatcgcgatccgcatcggttcgggcgtgcatgtaaagccgcgcccgacgcaggcgcccggcgggctgccggatgtcagcgccttcgacctcaccgctgcccgcgcggtattcgaggccgaggccgccgctttggcggcaagcaatctggatgatgccggcattgccgagctgcaggcgctggccgaagcgctgtgccgtcgcgacctgagcgacgcggaagccggcgagtacgaccgccgtttccacctggccatcgcacggctttccggtaacccggtggtggagttcttcgtgcagcagatctggcgcatgcgcagcgaactgccgcgggtaaccgaggtctatgcacgggtctgccatgatgatggcgccagccgtgccgacgagcacatggcgatcttcgaagccctgcgcgcgcgtgatccggtggccgcgcgcaatgcgatgcgccatcacttccagcgtctgttcgaggccatgctgcaggcgaccgaaagccaggcgctggaggagatccgccgccgcacgcagcaggaccgcgaacggttcatggccacgacgcgtatctga

SEQ ID NO: 497166 - DNA, 2892 bp, Stenotrophomonas maltophilia
atgcggcgacccgccggagcagtgcacagcatctcgttgtcccccacacccctgatcgtggcgctgctcgccgtgctggcggggctgcccacggcccaggcgcaatccggcaaggacgcggcagggcaggatcccaccacgctggaccaggtgcaggtcaccggcatccgcgaatcgatgcagagttcgatcaacaagaagcgcgatgacacggtcattgccgacgtgctctcggccgatgacatcggcgacctgccggcgccttcgctggccgatgcgatcgagaccctgaccggcgccgcttcgacccgcgacaagaccggcgcctcggaaatctccatccgtggcctgggtgccttcctcagcagcaccaacttcaatggccgcgagatcaccaacggcagcggcgaccgctcggtgaacttcaacatgttccccgccgagctgatcaatacggtggccatctacaagacccagcgcgccgacatcatcgaaggcggcgtggctggcaccatcggcctggaaacagtgcgcccactggagtacggcaagcgtgcggcgcagctggacctgcgcggcagctgggccgagtatgacaagaagtaccgcgacgacgacggcatcggctatcgcggcaccgccagctacatcgaccagttcgagttcggcaacgggcagaagctgggcatctcgctgggcttccagcgcctggacggcaccgacccggaagagagcatcaccagcggttccacctggtatgcctgcgatggcacgcagaacgtgggcaatgccaactgcaatgaagtgtccgcgcaggccatcgccaacggcgcgccgtactacctggtgccaagcagccgcatctaccggctcaagcaggagcgcaacgaccggcagagcgagttcgccgcattgcagtggcggcccaatgacgtggttgaagtgaacctcgacttcgaacacaccgagcgcaactggtacgagaaccgcagcgacctgagcctgtccaacgcccgccgtggcatcacccggcgcgaggtggacgaggacggcatcgtgcgccacctgcatggcagcacctcgattgattccacttcaaaccgctactggcgtggcgaggagtacaccgggggtggcctgaacctgatcctgcgaccgaccccggcctgggaactgtccaccgatctttcgtactcgcacaccaatcgcctcgacagcgagcgcatgacccgccttcgtgccaaccagcgcgacgtcaacaatgccatcgtgccgggcatcagcagtggtgccaccggctacgtggactatgactgggactggcacggcgaagtgcccagtgtcgcgctggcgccgaacttcgaccccaacaactgggacgcctacaccggcgcggcgcgcgtcacctccagcgcaacggagaacgaccacaggatcaaggccggccgcttcgatgccagcttcatgccggagtccggcttcttcacccgtatcaagggtggcgtgcgtgccagccaggcggactaccgcctgcgcgacaacaccctggtaagcgattacgaccagcgcgtggcggccgacaaggcgaagatcatcgccgccaaccaggcctgccgcgcgccgttcccacaggatgacttcatggatgccgccagcggcaacacgatctcctcgtgggcgtacttcgatccgaactgcctgtaccagtcgttccgtggcagcctcgacagtgggttggatccgggtttccaggatccgaacaatgtcgatatcaccgagaagacacgcgcgctctatctgatgggggagttcagcagcagcctgttcggcttgccggtgaccggcaacctcggcctgcgctgggtcaagaccgacgttcgctccgaaggcgtgcgtaccgggctgcgtatcgaggacaatggtgacggcacgatccgcctgcaacccaccggtgcgtacagcacgcaggtgttcaaggcgggcaacgacaagctgctgcccagcctcaacgcggccttcgaactgcgcccggacgtgttgctgcgggtcggtgcataccgcgcgatgtcacggccggacatcgccgcgctgggtgccgggcgcaccatcaacgtgagcagtgatgccacctacggcaatctggccgacgcgctggatgacatcagcgccagcggcaaccccgccgcgcagccgctgatgtcctggaacggcgacctgtcactggagtggtacccgaacccggacacgatgctggccggcgcggtgtactggaagcagttcaacggcggcaccgccactgcgctggtgccggagacctacaccatcgacggccagagcgtgaccgtgccggtacgccagcaggtaaccaccgacgaggacagcacgctgaccggcttcgagctgaccgccacccatcgactgtcgtacctgcccaagccgttcgacggactgggcttcaaggtcagttacaactacgccgatgccgactaccggacccaggactcgcgactgggcgagcagctggccagtgacggcacgatcattccggcgatcgtgccgccggcgggcctcagcggcttctcgcggcacgtcctgtccggctcgatctactgggacgtcgggcgcttcaacatccaggccatcggcaagttccgctcgcactactaccaggacttcaccggcaacaccgcacagcagaaccgctactacgatgacaacaccagcgtggacctgcgcctgcgctaccgggtgaacaagcggttgtcgctgtcgctggagttgatgaacctgaccaacgagccgcgcgtggcctaccagccgctttatgggaacttccgcgaagtggtgacctacgggcggcgtgcgtatttcggtgtacgatacaagttctga

SEQ ID NO: 497167 - DNA, 1440 bp, Stenotrophomonas maltophilia
atgcgcattcactcgctgacgcgtcaccgatccaatgattcatggctgttttgcctgaccactggtctggcaatgtgcctgaccacttcagcagcaagtgcagccagctggctcgtccacgatgtcgcggagttcactaccgccgcctcggcgctgcagcctggcgatgagatcgtgctggctgacggcacctggaccgatgcccggctgctgcttaagggccagggcacggcagccgcgccgatcgtgctgcgcgcgcagaccgccggcaaggtcgtcctcagcgggcgctcggacctgcgcctggccgggagctacctgcaggtgtccaacctggtgttccgcaacggctatgcgccgggtgatgcggtggtggcgttccgcgagtcgagcaaggccgtcgccagcaacagccgcgtcaccggcctggtgatcgatgactacaccaaccccgatgccagcgaccaggactactgggtatcgctgtatggcagcaacaaccggttggatcacagccagctgcgcggcaagaccaacgccggaccgaccgtggtggtggtgcgcgatgccacccagggcctggacaaccagcaccgtatcgaccacaactggttcgggccgcgcccggcgctgggcgtcaacggtggcgaaacgatccgcgtcggcaccagcgacagctcactgagcgattccaacagcacggtggagaacaactggttcgaaggctgcgacggcgagaccgagatcatcagcaacaagtccggcggcaacacctaccgcggcaacgtgttctaccgttcggccggcgcgttgaccctgcgccatggcaacggcaaccgggtgatcgacaacgtcttcctcggcgatgacaaggccggcaccggcggcgtacgcatcatcaacgccgaccagaccgtcagcaacaactacttcgagcggctggccgggtccagcaaccgctcggcactggcggtgatggatgcgcaggccagtcctccgctgtccggctatgcgccggtggtgaatgccacgatcaatcgcaacaccttcgtggacgtggcgaagatcagtttcggcgtcggccacgatgaagccaaaggcatcgtggtcgccgccagcagcagccgcttcaccggcaacctgatcgtcaaccgcagcagcaggaacccgccgaatgccgccagttcgctggccggcatcgacttcagcggcaacgtgcagtcgccggcagccagcaccgtgttcccgggtggcgtagagggccgtggcgtcagtctgcagcaggctgccagcggattgtgggtggccacgcctgccctgcccgccgtgggcgccgatcctgccctggcgatgaccgcgcgcgaggcgaccggcgtcgactggtatcccaaggtgggcgaagttgccctgtcacgcacccgcaatggagttgatcgatga

SEQ ID NO: 497168 - DNA, 2229 bp, Stenotrophomonas maltophilia
atgaggttgcagccgctgttcgtttccctggctttggccgcccccttcgccctgctgccgagcgcatcgctgtccgcagcgcccgctgccgctgcgcggcaggccgacaccgcgccggtgctggtcaccgctgcgcagtggcagcagatggccagcgaaggccgccgctacccgtggttcgccaaggagcaggcgcgcaccgaggcaacactgaagaagatgatgaaggccggcatcgacgtgccggtgcccagggacaagggcggcgggcgcacccatgaacagcacaagcgcaactaccaggcactgttggcggcgggcacgctgttccggttgaccggcgacaggacctacgtggattacgcgcgtgacatgctgcttcagtatgcccagctgtacccgacgctcggcccgcacccggaaggcaggggccagattcccggccgcgtgttctggcaggtgctcaacgattcggtgtggctggtcaacgccatccagggctacgacgcgatccgtgacgtgctgtccgccgaggaccgcaacaccatcgaatcgaaggtgttccggccgatggccgagttcctcgtcagcgaaccgaagaactacgaccagatccataaccacgccacgtgggcggtggccgccaccggcatgaccggctacgtgctgcgcgaccaggaactggtggagaagtccctgcgcggcagccagaaggacgacaagttcggcttcctgcggcagatcgacctgctgttctcgcccgatggctactacgaggaaggcccctactaccagcgctatgcactggcgccgttcctgctgttcgccaacgccatcgaacgcaatgagccgcagcggaagatcttcgcgcgtcgcgatggcgtgctgctgaaggcggtggatgtgctggtgcagtccagctatggaggcctgttcttcccgatcaacgatgcgatcctggacaagggcatcgacaccgaagagctggtggccggcatcggcatcgcctatgcgcgcaccggtgatgaccgcctgctgtcggtggcccagcagcagaaacgcctgctgctttcgcccgaaggcctgcaggtggcgcgggcactggccgccaacaaggccaagcccttcgactaccgcccgatgctgctgcgcgatggccccgacggcgaccgcggcggcctggcgatcctgcgcatgaacggcgaacgcggccaggcactggtgcagaaggacacgatgcagggcatgggacacggccacttcgacaagctcaactggctgttctacgacaacggcaacccggtggtgaccgattacggcgccgcccgcttcctcaacgtggaagccaagcgcggtggcatctacctggccgagaaccgcagttgggccaagcagaccgtggcccacaacaccctggtggtggacgagcagagccacttcaacggcgactggaagcgtggcgaggcgcatgccccgcaagtgcgcttcttccaggccgatgccgatacccagattgcctcggcaacgatgcgcgatgcctatcccggcgtggcgttcacccgcacccaggcgctgctgcgccaccccgacctgggcttgccggtggtgctggacctgctgcaggtgcacggcgacaaggccgcgcgctacgacctgccgctgcacttcaacggccacatcgtcaccaccggcttcgaggccgagcacttccccagccagcgcccggttctgggcaaggacaacggctaccagcacctgtggctggatgcacgcagcaaacccggcagcgagccgcggtcgctggcgtggctgctggacgggcgcttctacacctaccgcttcggcagcagtgcgccggcgcaggcgctgctggtggaaagcggcgcgaacgatccggaattcaacctgcgccgcgagcctgccctgctgcagcgcgtggacggccagaaggacgtcaccttcttcagcgtgctggagccgcatggcgagtacaacggcaccgccgagtacgtgcatggcgccgacagccgcatcagggagatcgtgcgtacccgcggcagcgatgccgaggtgatcgagctgcgcctggccagcggtgcacgcatcgccttgggtgtcgccgataacagcgccaccacgagcgagcacagcgtgaccgtcgacggccacgtctaccgctggaacggcagccatgcgcgcctggaccgcagcaagggtgacggcaaatga

SEQ ID NO: 497169 - DNA, 1305 bp, Stenotrophomonas maltophilia
atgaacggccctgcggtggtggccaagctgcgcaaggtgccggtgcgttcagccgtgcgctggctgatcgtgggcctgattgccgtggccacggtcatcaactacatcgaccgcaacgcactggcggtgatgtggccggaaatcgccagggaagtgggcgcgaccaaggatgactacgccctgctggtgacggtgttcatgctgttctacgccgccggccagttcctgttcggccgcctgttcgacatgatcggcacgcgcctgggtttcgccctgtcgatcagcgtgtggtcgatctccatcgccctgcactcgatcacccattcgatgctgtccttcagcctggtgcgggcgatgctcggcatcagcgaagcaggcgcgtggccgggcgcggtgaaggccaatgccgagtggttcccggcgcgcgagcgcgcattggcgcaaggcgtgttcaacgcgggtgcgtcgatcggcgcgatcgtgtccgcaccggccatcgccggcttgtacctgtggctgggctggcgcggcaccttcgtgctggtcggtgcaatcggtttcctgtggctgctgccatggctgtttgtctaccgcgccggcccggacaagcacccgtgggtgagcgatgccgagcgccggctgatccaggaagaccaggccgggcaacaggcggtggtggcgccgaaggccagcgttcgtgagctgctggcccaccggcagagctggggcatgctcgcctgccgcttcctgctggacccgatctggtggctgttcgtgtcctggctgccgatctacctggctgaaaccttcggcttcgacatcaagcagatcggcctgttcgcctgggttccgtttgtcggcgcgatgctgggcagcctgagtggtggctggttgtccgggcgcctaatacgcgccgggcacagcgtggaccgcgcccgcaagctgtccatcacgctgggctgcgtggtcatggctcctgccctgctgggtgccgtgctggccaaccagccgctgctggcggtgctggcaatcgctgcggtgctgttcggcttccaggtggccatcggcaacatccagaccctgccgggcgacctgttcgacggccgctcggtgggcacgctggcaggcctgggtggcctggccgccgtggccggcaccttgatcaccacctggctggtgccggtgctgacccgccactcctatgccccgatcttcatcctcgttgccgccctggtgccgctgtcgctggccgcgctgtggtggtggaccggccctatccggaagctcgaccgccgcggcggttga

SEQ ID NO: 497170 - DNA, 753 bp, Stenotrophomonas maltophilia
atgtcgttccaggacaaggtggccattgtcaccggcggtggccgcgatatcggtcgcgccgtttcgatcaagctggctgccgccggtgcacgcgtctgcatcaactacgccaatgacgaggccagtgcccaggaaacgctggcacggatccaggcggccggtggccaggccatggtgcatcgcgccgacgtcaccgatgccacggccgtcgccggcctggtcgctgcggcacaggccgcgttcggcgagcgcatcgacctgctggtgaacgtggccggtggcatggtgcagcgccggccgctggccgacatcgacccggtgttcttccacaccgtgatggacctgaacctgacctcgacctacctcaccacccacgcggtggtgccgcacatgcgcgaaggcgcggccatcgtcaacttcgcctcgcaggcaggtcgtgatggcggcggcccgggcgcatcgatctacgccaccgccaaggcggcggtgatgaccttcacccgcgccatggccaaggagctggggccgaagggtatccgggtgaacgcgctgtgctgcggcatgatcgccacccgcttccacgatgaattcaccaagccggaagtacgcacggccgttgccggcgccaccccgttgcgccgccagggcgcgccggacgaagccgccgacgctgcggtgttcctggcctcggatgcggcggcgttcatcaccggcgcgaatctggacgtcaacggcggcacctacttctcctga

SEQ ID NO: 497171 - DNA, 1188 bp, Stenotrophomonas maltophilia
atgcagcgctggacacttctgttttcattgacgctctgctccgccatgacggcgcccgccgtgtgggctgcacccgtgtgggtcactgcctggacggccgcgcccgcgcccgaccgcaaggacggaacgtccgaggcacccgtacagttcgccgcacagaccgtgcgccaggacatgcgtatcggcagccgtggcgatgcgctgcggctgcgcatcagcaacgagctcggcacgacgcccttgcgggtcgaggacctgcgtgtgggagtgaaggacggcaaggccgcaccgctgccggtaacggtggatggccgcgcggtcatcgaggtgccggtcggagccgcgctgctgagcgacccggtgcggatgccggtggcggcgctgcaggagatcagcgtgagtgcctatttcccgcagcccacccgccccgcggtgcgccgcaccgagctgcgggtcgcagatggcaagcagacagccgtcgccgacagcgtgcggctgagctaccagcagaacgtgttctcggcagtgatggtgcagcgtgatgatcgtccccaggtaatcgtggcgctgggcgattccatcacggaaggcgccaccgcacgccgcggcagcttcaaccagtggccggagcgattggcgcagcgcctgcagcaggcctgcccgaaccggttcgtggtgctcaaccagggcatcagcggcaacaagctgcttgaccacggccgcagccacagtgcgctgtcacgattggatcgcgatgtgatcgcggtggccgacgccgatcaggtgatcctgttcgaaggcatcaatgacatccgccacggtggtggcgcgcagccgctgcctggacgcagtgcggcggacatgctgctgggctatcagcaggttgcggcgcggctgcatgcgcacggcatccgcgcctggctgggtacgttgaccccgttcggcggttccgagcgctacgagcccgtgtccgccgccacccgcaccacgatcaaccagtgggcacgcggcggcaacagcggcttcgatggcatcatcgatttcgatgccgcgctgcgtgacccgaaggcagccgaatcgttgcccaacgagatcacccgcgaccatctgcatcccaacgacgaaggctaccggcgcatggccgatgccatcgatctgcgcatgctgggctgcaccacccccgagtga

SEQ ID NO: 497172 - DNA, 1020 bp, Stenotrophomonas maltophilia
atgagccgcgtcgtttgtttcggtgagttgctgctgcgcctgggtgcacccggtcgtgaactgctgctgcagacgccgcagctgcaggttcatgtgggaggtgccgaggccaatgtggcggtctcgctggccagcctgggccacgatgtgcagatggtcagcacggtacccggtaacgcgctgggccggcatgctgtggccgagctgcggcggcatggcgtgggcgtgggcgccgtgcgtgaagtggagggtgatcgcatgggcctgtacttcctggcgaccggtgcggtgcagcgcgccagtgaagtggtgtatgaccgggccggttctgcattcgcaaacagcaatgccagtgaccatgcgtggcctgccctgctgtccggcgcgcacctgctgcatgtctcgggcgtgagcccggcgctgggcgccaacgtggccgagtcggtgctgggtgccgtgcgtgcggctcgcgcggccggtgtgcaggtgtccttcgacggcaattatcgtccctcactgtggcgacgctgggatggcgacgcagcggcgatcctgcgcgaggtcttcgccgaggccgacattgtctttgccgatcatcgggacatcgaactggtgctggggctgcacttcgcgcaggacgatgcggtcgcccgaaccgaggccgctgcggccgctgcctttgccgcgttcccgcacctgcggtggctgtcctgcacccagcgcgaggtggtgagtgcagaccatcacgtgctcggtgcgctgctgctgggacgcgatggaacccgcgcgcaggcggctccgaggccgctgcccggcatcgttgatcgcatcggcggtggcgatgcctttgccgccggcgtcctgcacggattgctgtccggtctagacgcagaaagcaccgtccgcttcggactggctgcgggcgcgttgaagcacgccattcccggcgacttcagccctgcccgcgaagctgaagtccgggcactgatggagagccatccgttcgacgttcgtcgctga

SEQ ID NO: 497173 - DNA, 930 bp, Stenotrophomonas maltophilia
atggattacaccggatacacgcgcaagtttcccaacaaccgcccactgaatgcgtttgatcgcgagcaccgcctgctgcagaagaagcggctggatgtcgtgccgctggcacagctgtgcgtggtgaagatgaattcgaacggcctagtttcggtggatcgctggttcgccgcgcgtggctttgcagccctgctgggcgcgatcggcattgccttcgggctgggcggcgtgctgatgctgctctggttgctgatcgtgaacaggctacccaacgaaaacggcctgtgggaggcgatattcatcggcatggcgatgctggccgccttcactgcagcgagcatctgggtggcgtgcctcgagctgttccgctggacccactatccgatcgcgctcgatcgcaagcaccggcagatagacgtgttccggctggatggcaccatcctcagcgtgccctgggaccaggtctatttcacgcttggccgcggaacgggaaccttcggatggtacaactgggatgtccgcggactgatcctggacgcggatggcgtcacagtacgggagacgttcgcgttctgcatcgcgacctctcgcatcgagaacgcacatgcccactgggagttcctgcggcgctacatggaagaaggaccggcagccgtcgtggacgcggtgcactgctgcatgccgctggacggcaagcgcgagagcttcgcgtccggcaaggagcgcatcttcgccgaagacgcgcagctcccgggtttcatgtggctcacgatgctgccactcaactacctgcacacgatcatgcgctgggtggtgatgcagaccagcaggattccgcagtttccaccggacatcgaggcgcgcctgacaccggacgccggtgatccctgtgtccgcgacgcttcgatgaatccaccggacctgcgctga

SEQ ID NO: 497174 - DNA, 1452 bp, Stenotrophomonas maltophilia
atggtcattgcagggctgctgctcggtgcggtgcttgcggcgcccgccgcgcaaggcgcgccgagcggatggccggacacgctgttgaaggatctggacgctgccgacgccgccatgcgcggcagccatccgggcgccgtggatctgcggaatccgggtttcgttccgcagctggaggccgcctcggcgcttgcccgctcgcgcgcggccaatgtcgacagcttcgcaggctactggtgggcgatgaagggttacgcagcctccttcaatgacggccacgtcagcctcaacgcgcttgccgacgctcccgatcttccaacgcagtggccggggttcctgagcggtttcgacggtgatgcgcaggtggtcatgaccgtggacggtggtccgggccatccgccgctgggggctcgattgctgtcctgtgacggcatcgatgcgcagacactggctgcgcgccgggtgggtgacttcagcgggcgctggaacctgcaggccagccgcatccagggtggtggtgaagtgctgctggagcagggcaatccgttcgtgccaatgttgcgcagctgcgtttttcgggtggatggacgcgagaagccctacgcgctgcagtggcagccactgcaggcggcacagcgcaaggcgcgcctggccgacacccggcgcagcttccgaccggccaatggctggcacacgatgcccaatggcggctactggatcaccacaagcagcttcaatgccgaccctacggagcagaacttcaaggaactgaccgcgctgctcgagcagcttgctccaaaagccgaagcactgcagcaggcacggtcggtcgtgctggatgtgcgtggcaacagtggcggtgcttcgcagtggagcatcgaactggcgcgattgatctggggccgtgccgccgtggacgcgctgtccgatcccagctgggtggagtggcggacctccgaggccaacatcgcccaattgcgcggcttcctgcagaagctggtgcaggcgcccgacgcgtcgccagagctgcgtcgcatgctggaatcggtgacggcgggcatggcacaggcgcgcgaccggggtgaggcagtgtggcgcgagccatccgaggccagggcggatacagctgcaaccgcaggcccggccgctccgctgcgcaggggcagggtggtgatcgtggccgatgcctcctgcggctcggcctgcctcgatgcactggatctgtggaaacggctgggcgcggtgcaggtgggcgtcgagacttcggccgacagcctctacatggatgtcaggccggagcggctgccaagcgggctggccaggatttcggtgccgatgaaggttttccgggggcgggtgcgtggttcgaatgaaccgcatgtgccggatcgtcgctatgacggcgacatgcgggacacacgcgcactggaagcgtggctgctggcgctgtga

SEQ ID NO: 497175 - DNA, 741 bp, Stenotrophomonas maltophilia
atgcgccttgcaaccttcttcttcgcgttcgtcctcagtgccttcgccggcgctgcccaggcccaggtcgtcaccctcaacaagggcggcttcgtgctcacctacgactgcagcatccacagcgccacccgctacgaatacaccctgaccgcagacaccggttcggccgcgcgcccgtccagcttctacaaggatccggacctgccggcaggctgcctcggccagaccagcaccgcctcctacgccagcatcacgtccggctatgaccgcggccatctggtgacgtccaaccacatggactacaacgcgacctacatccgccgcgccaactacatgaccaacatcgttccgcaggtgtccagcttcaaccagggcatctgggtgaaggccgagaacgtggccgagtgctaccgcgacatcgcgccggtggatgtctatggtggcgtggtctacggcgacgcctccaacgactacttcctttccagccacggcatcccgacgccggagttcttctggaagaccatcatcacccgtgacccgaacaccggcaccgccaaggcgatcagctggatcattcccaacgaagccaatctgggcagcctcgacagctatctggtgaccatcgccgatctggaggagctgctgggtgcgagctacgtggcgatcaacgcaccggcctcgttgaagaacatgctgccggccagcacctggccgcagccggcgggttgtgacctgggctga

SEQ ID NO: 497176 - DNA, 882 bp, Stenotrophomonas maltophilia
atgaaggcgctgctggccgtgatgctactggttgctgcgtcgcctcccgcgtctccatcacgggtgctgcggatcgtcggccccgccgagcgcttcgccccgggcgttgcatccacgcaatacgacgagattcgactgaccttgagcccggacggtaaaaccgcactgtggttcagccgcaaccggcccggcggtccaggcgggtatgacatctgggtctcccgcaacgatggtcagcgctggcggccggcgatgccggtgccgttcaactcgccggggcgcgacttcgatcccgccttttccgccgatggccgcgtggtgtatttctgttcggatcgcgcaggcggccagggcggcgacgatctgtaccgggtcagcatgtggagcgacggtcgattcggggagccggtcaatcttggcccggcagtgaacagcgcggccgatgaattcgcgccgatgctctcgcccgacgcagccacgctgctgttctccagcgatcgcgcaggcggtgcgggtggccatgacctctacgtcgcagcgatggtccgcggcattgcgcagccggcacggccgctgccgggagacctcaataccgcagcgcaggagttcgatgccaccttcctgggcgacggccggacgctggtgtttgcccgcgccctggacttcggcagtgcaccggtacgccagttcatcgcctacgcgcgtggagaccgttatgacgcgggccttgcattgccctcccccttgaacgaggcctccggcgacagctacggcgcgatgctggatggctcgcaacccgacaccttgacctattcggcgcggcgcgcggacggtgcagggttggacctgtaccgcatccgctatcggatgatgcggccttga

SEQ ID NO: 497177 - DNA, 537 bp, Stenotrophomonas maltophilia
atggcctcacaccagtcccttgcctgcgcctgcggccaggtgcgcctgaccgccacgggccaacccattgccaccctcgaatgctgctgcgatagctgccgcaaggccggcgccatgctgcagtcgatgccccgagcaccggacgtcctgggcccgcacggccagacgctcttcgtaatgcaccgcaaggatcgcgtcagcatcgatgccggacatgccatgctgcgcgcgttgcggttgtccagcaagggcggcagccgccgcgtcgtggcgggatgctgcaatacaccgctcttcctggagttcagcggtggccattggctgagcctgtatggcctgttgtggccggcgtcggcaagacccgccgtggagatgcggacgatggtcagtgatcttcctgacccgtctgtccttccagacgatgtgccgaacctgaagacccactcgctgcggttctacgcccgcctgatgaaggcgtggatcgccatgggcttccgcagcccgcgcatcgaagtcgcgggagatacccatgtctga

SEQ ID NO: 497178 - DNA, 309 bp, Stenotrophomonas maltophilia
atgtctgagcccgagcggatcgagatcgagagcatcaccacgcccgggcacatccagcgcgtggatcgcgccaagtatctcgccatgcgccatgccttgctgcgggccctgcctgcgcaaccgcccggcctgaccgttgcgcaggcaaaacaggcactgctgccacatctgcccgccaccctgttcccggcaggtgccaccgccggctggtggttgaaggccgtgcagctggacctggaagccaagggcgtgatcgagcgcgtcgcgggcaagccgttgcgcctgttcaagcacctcgcggccggctga

SEQ ID NO: 497179 - DNA, 1356 bp, Stenotrophomonas maltophilia
atggcagcggtcccggaggcttctacgtcgcgttgcgtgctctggtttggcgagccgttggcgaacgagcgcagtgcgctggcggcagcgggctggtatgtgcgcagcatccatcccgatcccgccatggcgattggcctgcgtgggcgcgatcgtttgctcgccgtgctcgatctgcgccatctcgatgcggtcgcgctgcagctgctggcgccgtggatcgagcagcaccagcatctgccctggttggcggtactgccaccgggtgccggacccacatcgcctgcttggctgccgttgctgcagcgatgctgcgcgcgcttcacgctgccgttcggcctgcaggacctggtctgcgcaatgcgccagcagttcgacgcggatgatccgcctgtcgacgcaacctgcggtgggcacggaccgcacgcgctgattggcgaaagcgccgcgttgcatgcggtgcgcacggtgctgcacaagtttgcgccggtggagctgccggtgctggtcacaggtgaaaccggtacaggcaaggaactggccgcacacgcgctgcatgcgctgtcggggcgtgccggcaagcctttcattgcagtgaactgcggtgcgattccggccaacctggtgcagtcggagctgttcggccacgaacgtggctcgttcaccggtgccgacaagcggcagatcggcgtgttcgaatcggcccacggcggaacggtgtttcttgatgaggtgggcgatctgccggcagaggcacagaccagtcttctgcgtgtgttgcaggaaggaaccttcgagcgcgtgggcagcagccagccgctgcgcgcagacgtgcgtgtgcttgccgcgacccacgtcgaactggaacacgcggtggcgcaggggcggttccgcagcgatctctactaccgcctgaatgtgctgcgcctgctgatgccgccgctgcgcgagcgcggtgccgacgtgcagctgctggccgagcacttcctgcgctgcttccggttgcgccacggcgtgcgtgcacgcggctttgcaccggccgcagtacaggccatgcggcgcttcgactggcccggcaacgtacgcgaactgctgaaccgtgtgcagcgtgcagcgatcatggccgaaggcgagctgatcagtgagcgtgacctggagctgggcgcatcggcggcggtcctgccggcggcgatgctgcacgatgcacgggggcaggccgagcgcgatgtgctgctgcagaccctgcgccagaccggctacaacgtctccgagtgtgcgcggcagatgcagatatcgcgggtgacggtgtatcgcctgtgccgcaagcaccggctggagctgcctgcgcagcgctga

SEQ ID NO: 497180 - DNA, 531 bp, Stenotrophomonas maltophilia
atggacggcaccaccctgattcgcggcctggccgcagcactggcaacagccctgctgtcggttggcgccgacgcgtccgcatcgggcgcccgccagggcgtgaaggcacaaccgggcgaaatcgtcctgttgcgggacgtctccgcgcggccggcctatcgcatggcaccacggggcatggcgctgatagccgacccgaagccacagcgcgagatcgccgccgcattgggggtcggcggcacgacgaccggcatggacgagttgagcgatgaggactatgccggcatgggcgccggccaggccgcgtccatcgcggcgccgggcggaaccaccgttgaacgggtcacccagcaggccttgggcggcacgctgggccgcagtggcgacggcatggtcggcagcagcctggggggcgccatgagtgggccgctcggtgcggtcggcagcagcacccgcggtatcgccgataccgtgcgcggcgcactggcccagttcccgctgcagggcacggccccggcaggtggaaaatga

SEQ ID NO: 497181 - DNA, 618 bp, Stenotrophomonas maltophilia
atgaagcccctgcacggcgtgcttctgctgctcgctgccgcgccctcggcgacccgggccgatgactacagcggcatgctcgcctatctcgacgtggcccggatcgacggccgcgcgctggccggggcgaatggcgccatcgccgtgaaccaggccgccggcgacctcaacgtgcaggccaacctgcggggtatcgccaagggcgatcgcgccgacgtggcgatcaatgcgcggcaactgcagcagggcaaccgcgtgctgtccgggccgctgcaggccactgcatacattggcggtgatgcactggccggtgccagtggcatcgcatccatcaaccaggccagcggcatcgccaacacgacgctcaacgtcgtcagcgcgacgctggcccgacagggcatacgcgaaaccgacgatacggccttggccgccgagggttccgcgttggcaggggggcgggacgacaccggtcgcggcgtcgcgacgggcacccgcagcgccggtgtagccagcaccgcgctgcggggattcgacggggtcctgcaactcaatcagatcgcgggcaacggcaacgatacggccaacgtactgggcctggtcgtgcaggaccgcccgtga

SEQ ID NO: 497182 - DNA, 750 bp, Stenotrophomonas maltophilia
atgttccgccaacacgtatggatggttctgctgctgatggcccctgccctgcccctgcaggccgccgacggcaggaccgggcgtggcctcacggaaatccccgatccggagctgagcctgatgcgggggcgctacaccgtgggcggcaacaacgtcgcctggttcggggtcaccatggtgtcgcagtggcaggccagcaacggcacgaccctgcagggcggcctgaccctgggcatggacttccgtggcggtggcgcgccgaaactcagcttccagcccagcgtgcatgtcacggcagccgatgcgccgctgcccgatacccacggacgcagcatcgacagcagcggcctggccaacgccagcggcctggtgcagagcgtgcaggtggccggcgatggcaatgtcgcgcgcaacgtcaccacgctggtggtgcgcggcggtgccgtgcccgcagccacatccgacggcgctcactcggccagcgcacagcaggccggtatcagtgccagtgctgtgctggacggcaaccaggcacgcctgatgctgcaggtggacggccagggactggtgcagcaatggatacgcaatggcagtgtcggccagggtattgccctggccggtgacggccaggcggccagcaaccagctgcggctggaactggtgaggaacaccgcgggcggcaacctgccgttgagccagaacgtggcccaggcgattgcgttgaaccgcggcatggggccgggccagtag

SEQ ID NO: 497183 - DNA, 465 bp, Stenotrophomonas maltophilia
atggcgtcgaccagcgcctggatgcttgccagcgcgaacccggcgccgcccctgctcgcgggcgccggtgccgccgcgcttgtgtgcttccgcagcgaaggccccgcccattcggcgcgcacgggcaccctggcgtcgctggtgctgatcggcttcgcggcctggtccgcctccagcgctggcctgagtctcatgcctgcagggatagcagcggtcctggtggcgacgttgcttgccctgcgcctgtgggccctggtccgcatggcccgccgcttgcaggaccgggtggacgcaacgggcatgcaatcacggtggagcaagctgcctgcggccgtatcggccctgctcgcacagcacctgcgcgggaccgcaacgctggcgcccgccctgcagcacacgctggtgctggccaccctcgcctgggccgcccacgaagaagcacagaccctggaacggccacgatga

SEQ ID NO: 497184 - DNA, 2193 bp, Stenotrophomonas maltophilia
atgaccgtttacaacttcacttctgcacagcatcgtgctgccgcattctcaggcctgatgcatccgccgggcatgcacctgcgttatcgggtgtccgccttggcgttagggctgctggcctcgtttgccgccctggccgacactgcaccgtccaccctgccctcggtgcaggtgcaggaacagcgccgggtcactgcggactatgcgggcgggcacgtggccgccggcagccgcgtcggcctgctcggcgacaaggacttcatggacacgccgttcagtacggtcagctacaccgagtccttcatccgtgatcgccagaccaaggacctgaccgacgtcatcgccgccaccgaccctacggtgttcagcaacggcgtcaccggtgcgtggagcgagaactacgcgatccgaggctttgcctccaacaccagcgacaccacgttcaatggcctcagcggcatggcgccctactaccgcacctcgccggaaatgttcgagcgcatcgaggtgctgaagggaccgtctgcgctgctcaacggcatgccgccgggcggctcggtcggtggcagcgtcaacctggtgcccaagcgtgcgggtgagctgccattgctgcgggtcagtgccaacttcgcctccgacgcgcagttcggcacccatgtggatatgggtcgccgcctcggtgccgacaagcagttcggcatccgcttcaactttgcctaccgtgatggtgacggcgccgtcggcaagcagcgcaagaaggtacagctcggttcgctggcactggactggcgcggcgaacgtgcgcggctgtcggccgatctgtacagcgccgacgatcgcgtggacggcccggcacgtggcgtcggcctggcaccgggcgtggccattccgcggccgccgcgtggcgatacgctgatcaacccggactgggcctacgtggacagccaggacaagggcgcaatgctgcgcggcgaactggatatcaacgatagcctgatggcctatctggcctacggcaccagcaagaccgactaccgctacaacggttcgatcagcgcgcagatcctcaatccggctggcgacttcaccacggtgatcggccagctcgccttcgacatcaagaagcagtccggagatgccggcctgcgcggttccttccacaccggcagcgtcggccaccagtgggccgccaacgtgacccactaccagcacacccagaacgactacggccggcgcagcgtacccggctgggactggaccaccaatctgtacaacccggtgtggggaccggccgcgccgttcatggcaccgcacatctcgcataccgagctgacgctggacagcctcggcttcgccaacaccctgtccttctccgatgaccgcgtgcagttgacgctgggtgtgcgtcgccagcaggtggtcagcgagaccttcagcgtcgctaccagtgcgcgcacctcgcgctacgacaagagcgcgaccacccctgcggctgcattgctggtgaaggccaccgacacgctctccctctacaccaactacgtcgaaggcctcagccagggtgctaccgcgccgatgaccgcagccaacgccggcgatgtgttcgcaccgttccgcaccaagcagaaggagctgggcctgaagctggacctgggcagcttcgcgcacaccttcagcgtgtacgagatcaagcgaccgagcagctacaccgatccgatcacgaacatcttctcgcttggtagcgaacaacgtaaccgcggggtggaatggggcttcttcggcgcaccgatggacggcgtgcgcctgctcggtggcgtggcctatgtgcagccgaagctgacccgcacggccggcggcgtgaatgaaggacgcatagccaccgccgtggcgcagcggcaggccaagctgggcatggaatgggatgtgccgaccttgcagggcctcaccttgaccggcaatgccacggcgatgtcgaagcagtacatcagtgccgacaatagtctgtcggtgccggggcgtacgttgttcgatgtcggggcgcgctacagcaccaccgtggcgggtcgaccgcttgcgctgcgcgccagcgtgaacaacgtgaccaacaaggcgtactggggcatgccgttgctttcaagcctggcgctgggtgcaccgaggacggtgttgctctctgcgacgatggacttctga

SEQ ID NO: 497185 - DNA, 948 bp, Stenotrophomonas maltophilia
atgcgcaccctgtaccccgccatcgaaccctaccgcgagttcaccctgaaggtgagcgatctgcacacgctacatgtagaagagtgcggcacgcccgagggcattccggtggtgtacctgcacggcggcccgggcgccggtatctcgccgacccatcgccgcttcttcgacccgacgcgctaccgcatcgtgttgatcgaccagcgcggcagcggccgttccacgccgttcggcgagctgcgcgacaacactacgcaggacctggtggccgatatcgagaaggtgcgtgagcatctgggcatcgaacgctggctggtctatggcggctcctggggttcgaccctgtcactggcctacgcgcaggcgcatcccgagcgcgccaccggcctgatcgtgcgtggcgtgttcctcggccgcgaaatggagaaccgctggttcgccgaggccgatgggggtgcgcgctggatcttcccggagcgctgggaccgctatcaggcctatattccgcacgccgaacgtggcgacatgattgcggcctactggacgcgcatggatggcccggatgaggcaacccgcgtcgaagccgcgcaggcctggctgggctgggaagacaacgccgccaccctgcagcacgacgtggatgcgcaatccaccgatgatccgctggatacgctggccaaggcccgcatcgaagcgcactacttccgcaacggcatcttcctggaaccggaccagctgctgcgcaacattgatcgcatccgccacctgcccggcgtgatcgtgcagggacgctacgacatcatctgtccgccgcgcagcgcgtgggacctggccaaggcgtggccggaagcgcgcctggagatggtgacctccggccacagcgccaacgagccggccacggtcgatgcgctcgtgcgcgcgacagatgcctttgccgaccgcttctga

SEQ ID NO: 497186 - DNA, 393 bp, Stenotrophomonas maltophilia
atgcagggcgaagcgcgcggtacctttgaagtgaacctgctgccgatcagtggcaacgacggcccgatcggggtgatgtcgatcgacaaggtcttccatggtgacctgcagggcagcagtgtcggccagatgctggccttccgcagcccggtgcagggctcggccggctacgtggcgatggagcgggtgacggccacgctggccgggcgccacggtgggttcaccctgcagcacaacggcttgatgacccgtggcacgccgcagctgagcgtggtggtggtacccgattccggcagcgacgggctgctcggcctggccggcacgctggagatcaccatcagcgagggccgccatgactaccggttgctctacagccttccggaagaaccctag

SEQ ID NO: 497187 - DNA, 525 bp, Stenotrophomonas maltophilia
atgtcccagctgccttccctaccccctcccgcgctgccgctggtgtcctcgctggtgcgccattacgaggaactggtggagtacctgcgccgccgtttccgctcgccgggtttggctcgtgaggtggtgcacgatgtctgcgtgcgcctgctggaacgcccggccgcctacgatgcacggcaacccatcgcgctgctgcggcggatcgcgcacgatacggcggtggatcgctgccgcgccgaggatctgcgccggcactgggtggaggcgcgtgccgagctgcccgatgacgcctgcccgcgccccgggcctgagcagcaggcgcagggacaacaggcactgcaacgattgggcgccaccatcgaacgcatgccctgccgccgccagcaggtcttcatcctgcacaagatccacgaactgccacaggctgaggttgcccgccgcatgggtatcggccagaaggcggtggagcgccacctgcgcctggccatggtcgattgccaacggtcggctggcctgcgatga

SEQ ID NO: 497188 - DNA, 852 bp, Stenotrophomonas maltophilia
atgagcccacaaccgccgccgtccacaccgcaaccgccggtccaacccgcaaccaccgaccaggtgctggaccagcatcgcgatgccctgaaggaacgcttccccatgcccagcgcggatgcgctgcagcgtcgtcgcggtggacgtgcggcgaagatcgtcctgccgctgctgctgatcacggccacgggcgtgttcattgccgacccggcatggcaggtgcacgactatcggagcgcggtgggcgaacgccgcggcatccgcctgcccgatggcagccatctgctgctcgacgccggtacccatctgcaggttcgcaggcacatccgctcgcggcaggtggtgctggtgcagggccaggcccgtttccaggtgcggcactcgacctggcgcccgttcgaggtcgaggccggggcggtgcatgtgcgcaactacggcacggtgttcgacgttgaccggcagggtagcctcagcgaggtaaccctgtggcgcggcgaggtgggcgtgcgtgtggacggcgggggcgccgagcagcgcctgaagccggggcagcgtgtgctggcccagccaggatcgttgtctccgccggaagcggtggacccggatcgagccgactggacccgtgggcggttgcagttcgaccgcatgccgttggccgaggtgctgcgcatcctgcagcgctatcacgaccgtcccatcgtgctggacgacccggtactggggccgctgcaggtgtcaggcgtcttcgatgccgaccgcgccgaaaccgtactcgcgctgctgcccgagatcctgccggtacaggtgcacaccgcttccgatggcagcctgcatctgcgcgcccgcgattga

SEQ ID NO: 497189 - DNA, 2430 bp, Stenotrophomonas maltophilia
atgacccgccctgttccgcctgccgccctgcgccggctggcccctaccctgctcgctgcctgcctctgtgcggccctgcccgccactgcgcagaccgctgcatccgcgcccgtcgagctgcacctgccggccggcccgttgcaggcctcgctcactgcgctggcgcggcagagtggcatccagctgctgttcgccgccgacagcgtgagcggccgcagcgccccggctgttgatggccgctacaccccgcgtgaggccctgcagcggctgctggcaggccaaggcctggcgatgcaggaacgttcgccaggggtgttcgtggtgagtgccgcgccagcgccggcgaagccgcgcatcccggcccgggccgcatcatcggcgccgtcatccgcctcgacgacgtcgctggcccgcgtcacggtctcggcctcgaccgcgcgcatgccgcagggcgagaccgccatgcccaataccatcacggtgctgacccgcgaggacatcgcccagcagctggcattgggctcggatgtgtcgcgggtgctgtcgtcgcagatcccggcgtttgccccggcgcgcgagaagatgtccaactacggcgaaaccatgcgcggccgcggcatcctgtacatggtcgacggcgtgccgcagtccacgccgctgcgcgatggctcgcgtgattcgcacaccatcgacccggcgatgatcgaacgcatcgaggtcatccacggtgccaacgcgctgcagggcatcggcggtaccggcggcatcgtcaacatcatcacccgcagtgcgcccagtgagccgggtgcgttcctgctcgacaccaatgtcagctacagcgctgccctgcccagccgccacgacgacaatggccagcgcggctcggccctggtgggcgtgcgcggcgagcagttcgacctggtcgccggcctggcctatgagaagcagggcctgtaccacgacggcgagggccgatcgatcggcaccaacgcgcagggcgagctgatggactcgacctcatcgaacgtattcgccaagctgggctggaacattgccgacggccaccgcctgcaggtcatggccaaccgctatgaactgcgcgggctggacaactacctggccatcaacggtgactaccggaccggtcgcccgaccatttcggttcccggcgatacgccgctcgatccgccgatgaaccgctcgcgttcgctgacggtggactacagcgccgccgacctgctcggcggccgtttccaggcgcaggccttcgcggtcgatttcgaaggccgctacggtgccagccaatgggatccttggggcaacaccggcgccaatgccgcctgggaccagacccagaacgaatcggacaagcgcggcttcaagctgacccagagctggagccgcatcgccgacaccacgctggacgtgaccctgggcctggacggcctgcgcgaccgcacccaccaggtgctgctggccagtggcatgaactgggtgccgcagaccacctaccagagcctgtcaccgctgctgcagctgcactggtggccgaccgatcacctgatgctgtccggcggcctgcgttacgaaaagggcgagctggaagtgggtgactacaccaccctgccccgctacggcgcacgcaaggtggccggcggcaagccgaccatgagcgagaccctgcccaacttcggcgcggtctggtacatcaacgatcgcctcaacgcctacgcctcgtattcggaaggctacaccgtggccgacgtcggccgcgtgctgcgcgcgatcaaccgcgacggacaacgcgtggacagcctcgtcgacctgtcaccggtggtgtcggacaaccgcgagatcggcctggagtacgacgatggccgcttcagcggtgacattgcctactacacctccgaatccaagctgggctcggtgctgatctacgatccgggcatcgatgcctatgcggtgcagcgccaggccacccgcgtggaaggctttgaaagcaaccttcgcctgcggttgggcaatagccgcctcggactgggctatgcacgcgccaacggccgctacgacgccgacgttgacggtcgcctcgacagcgacctggctggtgtgaacatcgcgccgaaccggctgactgcgttctgggaacagagctggacgccgcagctgagcacccgcctgcaggccagtcacgccttcgaccgcgacttcgacctgcgtggcgcgcaggtggccgagttcaagggttacaccaccgtggatctggtcgcgcgctatacgctggacaagcatgccttcacgctgggcgtgcagaacctggcggacaggcagtacatcagctactactcgcagaccacgccgtcgaacccgagctatttctccggccgcggccgggtgctgacgctgggatggcagtaccggtactga

SEQ ID NO: 497190 - DNA, 1029 bp, Stenotrophomonas maltophilia
atgaatggattcatgcgaacactgcttgtggtgctgctgttgtcgtgcgcgaccatcacccacgccgaagaaccaagcgaagatgaagcaagcgaacgcgctgaagtctcccggcaggcacagcaactgctggagaagcaggatttcgccagactggagcaactcgccagtcgttaccgggatacggatcgctacttcagcagtggtgtctggaagctttcggcgtactacgtaggcatcggctatgccttcagcatgagcaaccgtgacccggcctactggcagggtcgcgagaagctcgtgcaggcgtggatctcgcgctaccccaggtcgccgtcggcgcgcctggccatggctgagatgctcagccgccaaggctggagcatccgcggccccggctatgcaaatacggtgaaggaagaggactgggcaccgttcaaggcgctgcagcagcaggccgttgactacctgctgaaatacaaggacatcgccagcacggacccgtactggtacgagtcgatggaacaccgggcgatcgaacagagttgggatgcagaccgcttcttcgcattgcatgacgaaggcatcgcgcgctatccgggctacttcccgctctactttgctgccgtgcgctatttcgctccgaagtggggcggcgatccggctggcctggaagcctatgcacgcagggtcatggctgcggccccaccgcaggaccaatacatgctgtacgcccgtatctactgggtcgcctcgcagcgagagtacgaggaccgtttgttcaccgcgtcgaaagtgaactggccgaccatgaaacgcggcttcgaagacgtgctgtcacgttatccctcgccatggaacctgcaatcattcgcgtacttcgcctgccaggccaatgatcccgtcaaggcccgtgaactgctggcgcagatccaggaaccgatcgttggcgcttggcgggatacggccaactatttccgttgttcctttgctctggatgaacccaacccacatgccgaaggcccatag

SEQ ID NO: 497191 - DNA, 870 bp, Stenotrophomonas maltophilia
gtggccgtggtcgacagtggttcgatcacggcggcggccgaggcgctggaactgaccatctcggccaccagccgcaccttggcgcggctggaggacaagctgcagaccacgctgctgcgacggaccacgcggcggctggaactgaccgaggaaggcgcggcgttcctggagtacgcgcgtacgatcctggccacggtggacgaggccgaggaacagatggccgcgcggcggctgcagccggtcgggcgcctgcgcgtggacgccgccacgccgttcatgctgcacgtgatcgtgccgctgcttgaggggttccgtgagcgctacccgcaggtggagctggagctgaattccaatgaaggcatcaccgacctgatcgagaagcgcaccgacgtagcattccgcattggcgtgctgcgcgattcgaccctgcatgcgcggccgatcggccacagccgcatccgggtggtggccagccccgaatacctgcgccgccagggaacgcccacgcgcgtggagcagctgcgtgagcacgacctgctgggcttcacgcagcccagttcgttgaacgaatggccgctgcaggatgccgatggcgggcctttcgtgatcgagccggccatcgcttcatccagtggcgagacactgcggcagatggcggtagccgggctgggcatcgcctgcctgtctgatttcctgacccgccaggaccggcgtgatggccgcctggtgcaactgttcgccaggcagacgcaggaagtgcggcagccgatcaacgcggtgtactaccgcaacaccgcgctggccgcccgcatcacctgtttcgtggaccacgtgacgcagacgctcggccagcgtccgtttgacgaatag

SEQ ID NO: 497192 - DNA, 948 bp, Stenotrophomonas maltophilia
atgggcagtgcgttggcgcggctgcaggccggtggcttcagcatcggcatcgaagcaccgctggacaatgactggacgccgctgggcgaacaggcacgacgcgccgcgcgacgcctgcccggtgaaccggacctgcagcgccatgcggaactggcacggttggccgaccgcctcggcttccgtgcgctgtgggtacgcgacgtgccggtgtacgatccggccttcggcgatgcggcgcaggtgttcgaggtattcagttacctcggctacctggccggcatcaccaatgacatcctgctgggcaccggtgcggtggtgctgccgatccgtgagccgttgctgaccctgaagtcggcgcgcagcgtgcagcggctgagcggcgaccgcctgttgctgggcgtggccagtggcgaccgcccggtggagtacccgctgttcggtcgcgacttcgacagccgtggcagccgtttccgcgcgcagatcgcattgctgcgcgaaggcgccgccgcgcacctgccgcagggcctggacgtgctgcccgccgatggcccggccctgccgttgttcgtggccggcctggcccaacagcaaccagcatggatcggccagcacatggacggttgcctggcctacccgggcacgccgcaggaccatgtacaacgcgtggcggcctggcgcgccgtggccggcaacaagccctatgccagcttcatccacctggacctggtggacgatgccgacgcccccctgcagcgctggcgcttcggcctgcgtggcggccgcaacgccctgctggccgagctgcacgccatgcaggcggccggtgtcgaccacatcggcctgcagttccgccgcaacgaacggccgttggccgaaaccttccacgaaatcgccgagtacgtgctgccgcacttcccggcccatgccggcgccaccgcgacggcctga

SEQ ID NO: 497193 - DNA, 954 bp, Stenotrophomonas maltophilia
atggatcgtttcacggccatgcgcgccttcgtccgcatcgttgagcgccgcagcttcacccgggcctccgaggacctgggcctgccgcgggccacggtgaccgacgcgatcaagtcgctggaacagcgtctgggcgtgcgcctgctgcaccggaccacccggctggtggtgccgacgctggaaggcgaggccttctatggccgttgcctgcgtctgatcgccgacatggacgatgccgaggccgcgttccgtgacgcgccgccacgcggtccgttgcgcattgaagtgcatggcacgctgggccggcacctgctgtttccgcatttgccggaattcctgcagcgctacccggagatcgaactggacgtcagtgaaggcgaccgctatgtcgacctgctgcgcgaaggcgtggatgcggcgttgcgggtggggacgctggccgacagcgatctggcggcgcgccggttgacgatgctgcgcgaggtcacggtggccgctccgggttatgtgcaggcgcacggcctgcccgataccattgactcgctggagcaaggtcatcagatggtcggctatcgctccagcgccaccggccagctgatccctctggagttccagcaggcgggacaggtgcgttacgtgccgctgccggcgcgggtgcgtgtttccggcgcggatgcattccttggggccgcgttggcgggcctcggcatcatccaggcgccgcgctaccggatggacccgtacatcgcgcgcgggcagctggttgagctgttgcccgagacgccgccgacgccaagcccgttgagcctggtctacccgcgcaaccgcacgccgtcgccacgcttgcgggtgttcatcgactgggtggccggggtgttcgagcagaccggggttgccggccagcggccggcactaccggagcggcacgcgaagctgtccggccgcagggggtag

SEQ ID NO: 497194 - DNA, 315 bp, Stenotrophomonas maltophilia
atgcgcgatcacctgtcggcggagcccgaccgcttggatgtggaggcgcaggtcggctggctgcttctcgagtttggcgcgccctggtgtggccactgccaggccgcgcagcccgcgttgcaggcctttgtcgaagcgaacgatctgccgcactggaagatcgaggatggcaagggcaggcccctgggccgagcgttcaaagtgaagctgtggccgacggtggtgctgctgcacgatggagacgaggtcgcgcgggtagtgaggccgctggacagcgcggacctcatgtcattgcagggcgcgcttcccgattga

SEQ ID NO: 497195 - DNA, 1488 bp, Stenotrophomonas maltophilia
atgcaggacacccccgatgcacatgcccatttcggctggttcaaacgccgccgccatctgaaggtcgatgagatcaccgtcgtcgatacgcccatgctcaagcgcgccgtcggtgccgccgcactcggcaatgccatggagtggttcgacttcggtgtctacggctatctggccgtcaccatcggccaggtgttcttcccgtccagcaaccccaccgcacaggtgatcgccgccttcgccacctttaccgtggcgttcctggtgcgtccgctcggcggccttgtgttcggcccgctgggggatcgctacggccgccagaaagtgctggcgttcaccatgatcctgatggcgctgggcacgtttgccatcggcctgattccgtcctacgagcgcatcggcatctgggcgccggtgctgttgctgctggcgcgcgtggtgcagggcttctccaccggtggcgagtacggcggtgcggccaccttcatcgccgagtattccaccgaccgcaaccgtgggttgatgggcagctggctggagttcggcacgctgggcggctacatcgcaggcgccggtaccgtcactgcgctgcacatgctgctgagcagcgagcagatgctggactggggctggcgcattccattcctggtggccggcccgttgggcctgctcggcctgtacatgcgcatgaagctggaggaaaccccggcgttccgcgcgttcgccgaagaagccgagaagcgcgagcacgaccggccggggctgggcgcactgttccaggtgcatggtcgccaactgctggtgtgcatgggcctggtgctggtgttcaacgtcaccgactacatgctgctgacctacatgcccagctacctcagcgtcaccatgggctatgccgagagcaagggcctgctgctgatcatcatcgtgatgctggtgatgatgccgctgaacatcgtcggcgggttgttcagtgacaggctgggccgccgaccgatgatcattggtgcctgcatcgcgctgctggtgctggcgattccgtgcctgctgctggtcggcagcggcaacgacgggctgatcttccttggcctgatgctgctgggcctggcactggtgtgcttcaccagttcgatgccgtccacgctgccggcgctgttctatacgccggtgcgctacagcgcgctgtcgatcgcattcaacgtgtcggtgtcgctgttcggtggcaccacgccactggtgaccgcgtggctggtggaacgtaccggcgacccgctggtgccggcctattacctgatgggcgcggcggtgatcgggctggtgaccatgctgttcgtgaaggagaccgccggcctgccgctgcgtggctcaccgccggcagtgggcagcgacagggaagccgctgcgttgttgaagagcgatgtaccggtaacggtggacccgaccttgccaccactgccggaggctgcggagcctgagcaggtgaagccggcctga

SEQ ID NO: 497196 - DNA, 621 bp, Stenotrophomonas maltophilia
atgcacggacctgcgacgttccgctccagttccatctgcctggtgcttgccgcgctggcactggcgttgtcctgcatgccgacgatggccgcgtcgcctgccgccaagcgaccatcgccgcccagcctggtgcaggccttccacgccgccgaagccaacctgcggctgattcccggcggcgacattgaatccgacttccgcccggtttggaccgctgttgccgatctcgatggcgatggccgtgccgaggtcgtgtatttctacacgtccgactattccggcggcagcttcgcccaaagcaacgttgttgcggtgatgacggcgctgacggcaaacgatccgcgcggccgggagaacccgaacagcctgtcgccggtggaagcagaggactatgccgccatccgcaggtatggctatgctgacgacgcggctgaacagattccaggcgccatccgtgccatccgcatccagggtgatcgcatcgttgtcgatttcactgtcagtgccggcgcgacggtctgcgaatggaagagcccgaaccgccacgtctgtccgccggacggaaactacacatggacgctgcgttggacgccggggaagctgactcacatcaggaaatag

SEQ ID NO: 497197 - DNA, 1596 bp, Stenotrophomonas maltophilia
atgtcgcgccgtcctgaagacatccacgccgccaagctgcgtggccagatgccacctgcaccgcagctgcatgtgcgccacgatggcatggccgcgcgcatcgcccgccacgactggtcatccacgccgttgggtgcctgcgaacagtggccgccccacctgcgcgccaccgtcgacctgatgctggcccatggtttcccgatgatcgtgctgtggggtgagcagctggtgcagctctacaacgatggctatgccgagattctggccgacaagcatcccggcgggctcggccagcggacccgcgagtgctggcccgaggtctggcatatcaatgggcccatctaccagcgcgtctggcagggcgaaaccatcacctacgaggacaaactctatcccctggcacgccgcgggcggttggaggatgtctggttcaccattacctacagcccgatccttggcgaggaagggcgcatcaacggcgtgctcgtgaccatgttcgagaccacagcggcgcatgtggcccaatcggcacgcgagcgcgaagagcagaagcggcgggaggcggaccggcgcctggcattggccttcaaggtgctgccggtgggcgtctgcattgtcgacaccgaagggcgcctgcagctgtccaacgaccagatgcgtgcctacctgcccagcggcaaggtgccctccacggatgaggtgaacctgcatcgctggcttggctggcatgcggacggcagcgccatcgggccggaggatttcgccatcgcccgtgcgatgcgcggcgagaccgtggtgcctgggctggagttccagtatctgcatgacgatgggcgcgcgcgctggacccgggttgcggccgcgcccctgcgcgatggcgacggtgaggtcagcggcgtatttgccatcgccgtggacatcgacgatctcaagcgtgccaccgagcgccagtctgtattgctggccgaactgcagcaccgggtgcgcaacatcatgtccaccatccatgccattgcctggcggacccgcgaatcggtcagcagcgtggatgaatacgctgaacggttgtgcgggcgactgatgtcgctggcgcgcacgcagagcctgctgacccgcggcgccaatgccggggtctgtctgcgtggcatgctcgatgaggagatcgcggcgcagacgccggcagcggcggcctaccgcctgcagggcgaggatgtgctgctgccgccgaaggcggccgaagtactgtccctggcgatccacgagctggcgagcaatgccctgcggcatggcgcactgacccatgaggatggccggatcgaggtgacctgggatctgcaggttcaggccggccagccatggctgggtctgcactggtacgagcgccatgccgaagtggaggactgggagcagccccggcagcgtggccttggccgggcgctgatcgagcagcgcgtgccctacgaactcgccggcagcggcgagctgcgctttggcccgcagggcctggacgcctggatccgctttccgctgcgcgagcgagacagcctgctgcagaccgatgctcccggcgcggcggcgggcggttccggcaggtaa

SEQ ID NO: 497198 - DNA, 765 bp, Stenotrophomonas maltophilia
atgaaaatgatctcccgttcggtgctcgccgttgccgcctcgctggctctggtcggtgccgcgcatgctgccgatatcgtcggtgccgccagtgccaggaccgatgccgagctgtacgtggcggttggcgaatcgcaggtcaatggcggcccgcaccgcgctggcaaggccggcatcggtgtcggtaccgtgtcccaggccaagccggtggacttccagggcctgagcgcctactcggcacccaccaccgtcaatggcgtgaaggtacgtactctggccatgccgatcaccggcgcaccgggcagccacgccggcatgggccacttcaacttcgtcaaggtcggcagtggtgatgtctggtttggcgaatggtccaaggatggcgccgccggtggcttcaacaaccgccaggtctacttcgttggcgaccgcgccggcaccacgctgcccgccggcgtggcgtcctacaccgtggccggcctgaacaagttcaacggcagcaacctgctgagcggcaccttcgacgccgacttcggcgccggcaccctggatggtgcgctgtccggcaatggcctgaccctggccatcgttgccaacatcaacagtgccgatgcatcgttcgccggttcggccaacgtcaatggcagcgtcaacggcaccacccagggccagttcttcggcgccaacgccgccaccctggccggcatcgccaccttcgccggcaacagccagtacgacaccgccttcggcggcagcaagaactga

SEQ ID NO: 497199 - DNA, 957 bp, Stenotrophomonas maltophilia
atgaccacgtccgaaccctcgccgcgtcaggccaggcaggcgttgcgctgggtgatccagtgcagtgcaggcccgctgccggaacgccagcaacgagccctgcagcgctggctgcaggccgatccgcgccatgcgctggcctggcgccagcagcaggccttctggcaagggttggatgccgccgggcccgacgtgctggccgcgctgcccgggctgaccgcagatcggcaggggctgcgcccgatcgcaccgcgccgccgcctgccgtggctgctggccagtgcagccgcagtggtgctgatggttgccgctgcgccacacgcgctgttgctggcacgcagtgacctgcgcagcagcgatgcaccgcgcgtggtgcagctggaggacggcagcaccgccgtactcgatgcgggcaccgcattggcggttgcgttcgatggccagcagcggcacctgcgcctgctacgcggccaggcctggttccaggtggcccatgaggcgcgaccgttccaggtcgaggcggcgggcggcctggtccgtgacatcggtaccgccttcagcgtgtcgatgctggataccacggtcaccagccaggtcagcgagggtgtggtcgacgtgcgtccgggcgatggcagcgtacagcgcctgcatgcggggcagtcacgcgtgttccgtgacggtcgctggctgcagccaatgcagctggaagatgccgagaccatggcgccgtggcggcgtggcgaggtagtgatcgacgatcagcccgccgcgcaggccatcgccgatctggcgcgctaccgctgtgccccggtctgggtactgggcgggcagggtgcaagcgtacgggtcagtggcctgttccacctgcagcaaccggagacggccatcgacgcggtggccgcgcaggcaggactgcgcgtgcagcgcttgcccggcggcgcgctggtgctgtggtga

SEQ ID NO: 497200 - DNA, 867 bp, Stenotrophomonas maltophilia
atgaagcgtgtcaccggtacttatagcgccccgcgcccgcactgggtgggcgacggattccccgcccgctcgatgttttcctacaacacccacggccagcacctgagcccgttcctgctgctggactacgccggcccttataccttcgcccccagcgataccccgcgcggggtcggccagcatccgcatcgcggtttcgagaccgtcaccatcgtctatgagggcgaggtcgcccaccgcgattcaaccggcgccggcggcaccatcggcccgggtgacgtgcagtggatgaccgcggcctccggcatcctccacgaggagttccacacaccggagttcagcaagcggggcggcacgctggacatggtccagctgtgggtgaacctgcccgcgcaggacaagatgggtgcaccgggctaccagaccctgctcgacgcacagatcccctcggttgaactgcctgaaggcgccggccgcgtgcgtatcatcgccggtcgcttcgacggtcatgccggcccggcccgcacccacacgccgatgaatgtctgggacatccgcctgcggcagggccaccacgccgaactgccggtggccgatggccgcacgctggcgctggtggtgctgaagggcacggtgcggatcaacggcggccagccggtcggcgaggcacagctggtcaccttcgaccgcagcggcgaggacgtgttcgtcgacgccgacagcgacgccaccgtgctgctgctcagcggtgaaccgatcgacgagccggtggtgggctatggcccgttcgtgatgaacagccaggccgagatcgcgcaggcggtcaacgacttcaacagcggccgcttcggccagatcgcgcactga

SEQ ID NO: 497201 - DNA, 636 bp, Stenotrophomonas maltophilia
atggcgtggatttactgccgagcggcttctactgccgggcctgccctggtgggtgccgaccgttggtcggcactgaggctggcccagccatccacgcatggcgtggatctactgccgagcggcttctactgcccggcctgccctggtgggtgccgaccgttggtcggcactgaggctggcccagccatccacgcatggcgtgcatctactgccgagcggcttctactgcccggcctgctttggtgggtgccgaccttggtcggcactgaggctggcccagccatccacgcatggcgtggatctactgccgagcccgccgccgggtgctctcctgcacccggcggcgccgtgtcggtggtcctcaccgctgatggccgctccctgccctccgtgccatcctggctggggccgctgccgttccgtggcggctggcccgatgctgttcgttctttcggcccggtcgcatccacgcatggcgtggatctactgccgaccttggtgggcagcaacgtgtgccgaccaaggacggcacctaccggcgctgcgtgccctcgtcgcgacttgcctgcgggaactggaaggcactgttggcgtcataaccgctgttggcagtgttgccacgcgccggcgggttga

SEQ ID NO: 497202 - DNA, 12384 bp, Stenotrophomonas maltophilia
atgtcgcacccgctcccgtccgctgttcatccggccgcgccgatgcgccgcaatcatccgatggcgtgggccatcgcggtcgccctgggcagcatggtggccccggccagccaggcgcagcaggcgttcagcccgggctggttcgccgagcggggcgcggcccagggcagcgcggcacagagtggccggatgcccaacggggtgccgatccagttccagttgcctgcccagcagcaggatgcagcacggcagaagctgcagcagtcgatcgacaacctcggtacggcggcgcaggcgattgccctgcagcagcgcctgcaggaacaggcgcggcaggcgcgccgcgaggctggcttcatcgttgcggatggcctgggcaaggatggcctgagcgtcgaccagaacccgctgacccgcggctggctcaatgcgcgcgacgcgatccagtcgcagggcagcgacgggcgggtgcaggttacggtcgagcagaccgcggacaaggcgatcctgaactgggagaccttcaatatcggcggcaacaccacgctgaacttcctgcagaaccctgactgggcagtcctgaaccgcgtcaatgatccgcaggcgcggcccagccagatcctgggccagctgaaggccaatggcacggtgttcgtggccaaccgcaacggggtggtgttcggcaacaacagccaggtcaatgtacgcaatctgctggcggctgcagcacggatcagcgatgcgcagttccgtgacaacggcctgtacagccccgacgccagcagcagcgcgctcagcgatgcatttggcaaggtgatggtggagcagggtgcccgcatcgcgacccatgagccgaccagcgcgacgcgcggcggtggctacgtgctgctggccgggcacagcgtggagaatgctggccatatcgaggcgcgcaagggccaggtgcagctcgctgccggtgacagtttcgtgatccggcgcggcgtgggtacggcgaccaataccagctccaccacccgcggcaatgaaatcgcgccgcgctttgtcgctggcagcacggcgggcagcgtgcgcaacaccggtctgctacgcgcccgcgagggtgacgtgaccctggccgggcgcaacgtcgagcaggccggtgtggccgtggccagcaccacgctggcgcagcgcggcaccgtgcatcttctggcttcgaccagtgatgccggcagcagcgtcacgcttgccgatggagccaccacggcggtgctggtcgaggacgatggcaaggccacggtgctggatacgcagcgcaacagcctcatcaaggagtcggcagagcaggacgcgatccgcgccggcgcgcgctcggcaaccttcgacaatctgtcccagcacaatgatcgccgggaccagtcgcgggtggagatcgtctcgggtggcaacatccatttcagtgcggattcgctgacggttgccacgggcggccagatcatcgccgacgcggcagcccgcagctacgtagacgacgcggcacgcgtggatgtttccggcgcagtgggcgtacaggtgtcgatggaaagcaacaatgtccaggtcaaggtgcagggcaacgaactgcgcgatgccctggacaaccgcgacagcggcaagctgaccagcagcgaggtctgggtcgaccgccgcaggctggtccacgttccggccggtaccgggggctacgcgggtgagcgctggtacgcggcgggtggcctgctggaagtgggcggctaccttgacaatcaggggcactcgatcggcgaatgggccgcgcagggaggcaccgtcctgctgggcggcagggaagtgatcacgcatggcggctcacgcatcaaccttgccggtggcagcctggatgtgcagagcggcgtgatccggcagagctgggtgcgcggcgtcgatggccaggtctaccgccttgatgacgcgccggcggagatgctcttcgatggcctgtacagcggccatgaagtaaagcaggagcgctggggcatcaccgagaccttccgtgatccgattgtattcgcggcgcagcgtgtcgataacggatacacggtcggccgcgatgcaggacgcctgatcatctccgcaccgaccgcggtgctggatggaaaggttgagacggctaccttccagggcgcgcagcagaaccgcaggccggataccgcgctggagggttatgcgcaggcgcagacggcggtcgcgcgcaatgcgcagctgtacctggggcgctacgacggccagggccgcagcggtgtgttcgactcggatgtgcgcctggatgacaaggctcggacgaaggccgcgtggtcgctgctggccccggtcaacgaagagcggcgtggcaccgtgtggctggatatcgcagagctgagtgcccagcagtggggacggatcgacctggcgaccgctgatcgcatccgcatcgacggcagccttcggcttcaggcaggcggacagctcaacctgaccggcagcgaggtggaactggcaggcgacatcggcatcgccggcggccagctgtcggcgggcaacctgctggatgtgcagggccggccgacggcgctgctgcacgatggccgcgcccgcaccgccatcgccgacggcacgcggatcgatctctccggtgaatggagcaatgcgtcactggcgatgccgcgcgacgcgagcggtgcctggacggatggcggccgcctgagcctgggcaatagtcatgacgtggccgtgggcgccaaggcaacggttgacgtcgaggccggtgctgcgctggacctgcgcggcaaggcccatatcggcaaaggcggcagcgtcagcctgcaggcgaacagcagtacggtgacgaccgacggcagtggccgggtgcaactgggcgagggaagccggttcagtggtcgaggacagggcggtggttccttctcgctggggaccggtggccaggtgtgggtgggcgatgcggacctggcgggcacatcgctgcgactggaccccggcctgttcggcagtggcttcgcgcagtacgacatcaatggccaccacggtgtggaggtggccgatggcgcgcggctggtcgctaccctgccaggcctgcgcctgacccaggacgcgcggatggcgaccgaccgggcgtccgcactggcagcgtgggacgcgccgctgtacagcgccgatccgtcgagcgggcgcgtcagccagcgcgcgggtgcgagcatcagcctgcgttcggagcgcaacagcgtgggcggtgaccttcgggttggcaaggatgcactggtggcggtcgatccagggcagacgatctcgctgctcggtgcaggcaacatcgatgttgaaggcacgctgcgcgcgaagggcggccgcatcctgatcgacgatgtgcgcccggagaacgcgctgtacgccgggcagcgcaccgaacgcacctggcgtttcgccgaaggcgcgctgctggatgccgacgcagacgcgatgtcgctgcccgattccagcggccgcctgcgcgggcaggtgcgcgcaggtgggcgcatcgagattggcggggcgctggactgggagaccaccgcattcgtcgacaaccgaccaccggaagccttcgtggtggtcgaacgcggtgcgcgcctgcaggcgcggggcgcgtcggccgaactggacatcgatggccagggccgcgtgcgcgtggacagcgacggcgggcagatcgtgctgcgttcggccaacgcgctctacctggagggcgggatggacgcgaccgccggtggtgccggcgcacgcggcggcacgcttggcctggcctttggcgggagcatccatgcacgtggcgccagcgacgaggtactgcgagcgcgtgcgatcagcctcagccagcacagcgcaccggcgcagccactgccggccgcattggaatatggccacgccgcgttgtcggtcgagcagctgcaagccggcggtttcgacaacctgtccgtgttcggtgacatccgcgcggtcggcgacgtcgacctgcgcctggcccagagcctgcgcatccacggccagggcacttcgagcctgggcatggccgtggatgccgggctatcgtctgggctgcgactgagtgcgccctacgttcgcctggcgcaggcacgctggcgccagatgccgggcgagaacctgcagggcaccgccgcggtcgcttcgtccgggccggaagatcacgcgctggcggtgcaggccgagctgatcgacatccgcgacgtcacctggctgccgggtttcaagcatgtggcgctggaaagccgcagtgacgtgcgcctgaccaatggcattgccagcagtggcaacaccagcgcgttgatgacggctggttcgatggacgtgaccgctgcgcgcctgtaccccaccacaggcgcggtcggcacgctggtggccggcgcgtcggcgcagaccgtgcagaccgctgattactgggccgatccggatgccgtgctgcgcatccacggcaccggtgcggccacgaggccggcgccggaatcggcgctgggtacgcttcgcctggtggccgccacggtgcagcagggcggcaacgtacaggcgccgatgggcacgctgcagctgggtggccttatccagaacggaaccgtcggtagccgggtggaactgctgccaggcagcgtcacctcgatcagtggcgccggcttgtcgctgccctatggtggcaccgtcgatggtgtcgactggcgggtcggtacgcgcagcctgggttcgctgacgccggccggcatctcctccatgggggtgaccctgaaggcgaatgagatcgaggtggcgccgggggccctgctggacatgtccggcggtggtgagttgaccggtgccgcctttgtgtcaggacgcggtggctctgtcgacgtgctacgaacggcgttggccgacgccaatccgcgctatgaattcagtgcgtcgggcaacccggtgtatgcgatcgtgccgggacgcgccgggacatttgcccccagcggcgaggaaggattcgccgcaccggccgtgggccagcagatcaccgtgccggcgggcgtgcccggcctggcggcaggcacctacacgctgatgccggccagctatgcgctgcagcccggtgcattccgggttgagctgggcgccaccggcacctcgggcatcgcgcaacccatcgcgaccggtaccggcacctggcgtgtgtccggacagcagcgcacggcgctgggcgcggcaatctcgccgttgctcaccgacatcctgctgacccccgccgcagtagtacgccggcactcgggctacaacgaaacctcctacaacagcttcgcgcaatcggtggccgaccgccgcggcgagtcgcgtggctggcagaccatcgatgcgctcgggttgacccttgcgttgggcgaaggcgcaggtcgtgcagacacgcctgccatccgcttcgccggcaccgcgcggttcggcgccgccaccgacaacgggcgcggcggcacgctgacagccacgttggccagcccggcggtcggttcactggagatcgtcgacggcggtgcgcaatcgcaggcgcgtgatcgcggtgccaccttcagcgacgacgcgctcaatgccttcctgccggcgcggatgatgatcggcgggcagttcaaccaggaggcctcgcaggtggcggtgaccggccaggcgcgcagcgtggcgatccgttccggcgtcaccttgaacgcaccggaagtgctggtggcagcggcctccggtggcagcggcgtgctggtcgaggccggtgcgaccctcgatacactgtcgttcgcatccgccaacgcgaatgccagcgcgaccctgccttaccaggtctccggcggcctgctggcggtgtccaaccagcgcctgaacctgatcaccggcaccaccggggtggaggccggtccagtggcgatcgacatcggggggtgccagacggcgtgcgacggccagacccggctggtttccgatggcagcatcgcggtagcgaccgatggcgcgctgcagatgcgcgactcggccagctatggcacccgtcagctcggcctgagcatggcggcgctgaacctcggcagggccgaagcgatcgccctggccgctgcggcaggggcgctgcccagtggcatgaccatgaaccagtccgtgctgcagcaactgctgcgcggcaatgatgccaccggcgcgccggcgctggacacgctgagcctggtcgcgcgggactctgtcaacgtgttcggcagcgtcgacctggacgcgcgcgacagtgccaccggccgcagtggcctgcagacgctcgtgcttggtgcgcaggccatccgcggctacggtgctgcgactgaccgggcgcgcatcctggtggacacgctggtctgggacggctcattggcggcgagtcaagcgccgggcagtgacgcgtcggtgccgccggccgatccgatggtggaccggctcggcgcggggcagctggacatctttacccgccagctgcagctggggcgggcgccattcagccgtcccagttctgaagtacctgcgaaccggcaggtgctcggattcagtgcgctgaacctgagtgcttcggagcagctgtcgttctccgcgcagggcacgctggacgtgttccagcagcgcggcgactatctggccgacaagggctggcagtacagcggaggcagcctgggtatcgatacaccgctgttgacggccgatcccgccgcgcggctgcgcgtgcgcaccggcggcgacttccgcctgcaggggggcaccggcaaggcgggtggcgatgcactgggcagtgagctgagcatcgacgccaaccggatcacgctggacagcacggtcgcgctggcgtccggacggctgtcggcgaacgcacgccagggcatcacgcttggcagccgggccgcgttggatctggccggacgcaaggtctcgctgtacgacgtggacaagttcagctggggcggcgatgtcctgctgtccagcgacacgggtgacatccgcgccgatgcggcctcccgcatcgatgtttccgcacgcaacaaccgcggcggacgcctgacggtcaccgcaatggccggccgagccgatctggccggtgttctgcagggtgccgccagtggtcgctacgatgccggtggcacgctggtgccctacgacggtggcgaactggtggtgcgggcacgccagctgcaggacttcgccggcctcaaccagcgattgaccgccggcggcgtcgtcggcggtcgcagcttccagatcggtgagggcgatctgcggatcggcgacgaagtgaaggcgcgccgggtcgacatcagtgtcgacgcgggcagcctgaccgtggccggccgcatcgatgccagcggcgagcaggtcggcagcatccgcctgtacgcccgcgatcagttgcaggtggacggcacgctggacgcgcacggtaccggccttcgcgtggacagccatggcaagatcatcgacagtccaaaccgggccaccatcacgctgggcagcgccgaaggtgccgtcggcctgggcagcgcggcgcagctggacctgcgtgcgggcagcgatgttaccgtcggtggacgtcctggccagaacgatggcaccccgcgcggcacgctgaagatcgatgtgccgcggctgggcagcaacgacgcggcgattgccgcggccaccggcctgcgcatcgatggcgcggccgacatccagctcaatggtgttcgccgctacgacgatgcgcccctggcaaccaccgctgacgtgcgcggcaaccgcgcgcagctggtcacccagcagtggctggaccaggtggtcgatccgcacagcgtggcctggatcgatggtgcgctggacaacgcggatctgcagcagcgcacgcgggcgctgggcgatgtccgccttcgtcccggcgtgcaggtgctggcgcggcgcagcgacgccaacccggacggcgacctgaccattgccggcgacatcgatctgtccggctaccgctacgggcccgaagccaaccgcgccgatccatcgcggcgtggcttcggcgaatcggcctcgctggtgctgcgggccgaaggcaacatcaacgtctacggcagcatcaacgatgggttcgcaccgccgccgtccacgccggatgagggtggctggcagctgtatgagggtcgcaatggcagcgcggggcaaaccccctttggcggcggcctggtggtgccggtggacggagtgaagctgcagcccggcaccgagttccaggccggcacccgcctgaactatgacgtgccggtcgaatcggtaacgcttccggtcggtaccgtgctgcccgcgccgatggtgatctcgcagaacctgcgcctgccagcgggcacggtgctgggtgcggcggtgaccaccgactccgggcagacgctggcggcgggcaccgtgctgcagcagccgctggtgttggcggccggtgcgcgcctgggggccggcttccgcctgcgcagtgccgtacagatggcggcacaggaatggcccgccggcgcgacgctgccggttgcgttgcgcctggcacgggaagtcgagctcaaggtgggcgcgtacatcccatcgttgaccaaggtggagttgcccggcaacgggccggtgaatctgcggccggccgatgccggcggcaaccaggggcgcaactgggcgctggcgccgatgctggccgagggcaccacctcctgggacctgaccgttgttgccggtgccgataccggggcagccgacccacgcagccggcgctggggcagtgaaggcagcgtggtgctggccgacacccaccagggctcgatcggtacggtcaagaccgaaatcatctgggtgggtgatcgtgcgttgactgagcgggcatcgctggactggatcggcgacacctcctatgcaggccgtccgatcgcggagctggccgacatgttcggcttcaccgaagacgagttctgcgcgatgtcggccgactactgcggcccggccccccgccaggtggccgcgcagggctcgctggattactggggcgacgagtcctacgtaggcacccctgcgaaggacttcgccgcgatgtttggcatgaccgaagacgagttctgcagcaccgcgcccacctactgcgccggcggcggcacgcagaccgaagtgaccacttacggcaagcgcgcgggcacgccggcgtggagcgtgctgcgcaccggcaagggtgacctggaactgctcgctgccggtgatgtcgtgatgaagtccggcttcggtgtgtacacggcgggcactcccaccacgctgggcgagggccgcgacgctgccttcaattcgccccgcgcagcagcccccaggaacaccgcactgctggggccgaacctggtgccgggcagctatgatgccgcgttggccggctaccgggcctggtatcccgatcatggtggcaacctgcgcgtcgaagccgggcgcgatatcgtcggtgacgtctggaccgggcgcgcagagtcggggagcagcgatcgcgactgggcgctgtactccagtgccgcggtcggcaattggctgtggcggcagggaaccggcagcaccaccggcgtggagccggtgccgaccagctggtgggtgaactttggcgcctacaccaacgtgtccgctgctgctggcgcctctccgcggatggtcggcttcaccggtttcggcacattgggcggcggcaacctgacgctggaggccgggcgtgacgccggcgtgcgcgatgcgataggtgacgcgctggactcgacgatcgcaccgcgctcgggagcgatcatcgcggcggtgggatcgaccggccgggtcagcgatggccagctgcacctgaccggcggcggcgacctgcaactgcgtatcggtggcgcactgaatccgaatctgcgggcgacgttctccagcctcaatgcctccagggcgggacagaatctcgacctcaacggtaccttcagcaatctgcgtggcagcctgcagctggatgcgggacgcatcggtgcaatgggcgtcaccctggaaagctacgcgacgctgggccagctgcgtgcggccgatctgttcgccgccgacgccgctcgcccgatgggcgggccggtgctggtgctgggcgacgccgccgcgcagctgcaggcgcggggcgatgtggtgctcggcggcgtcgccgatgcgggccgggttccgctggccaactacagcgcggtgctacaggatgatggcgcgcgcgctgcaggcagtacgtggttctccctgtggaccgccaacacggccgtggatctgttcagtgccggtggtgacctcgcgccaggcctcgccgggccggaaaacgtgacgggcagcaatctgtggcgcgagcaggtccagcttgttgtgcgtggcggtgatgatctgctgaattactggctctatccttcgcgcttcagcgcgattgctgcgcagggtgacatcaagctggaccggatcagcaccacgccggggacgcaggatgtgatcctgctggcaccctcggcgacaggacggctggacgtcctggccggtggcggcatcttcgcccagcctggcgcgacccagatcgcgcgctcggccagtgacgcgcgcctgccgggacccttcgacccggcattcatggccgagcagggggattccgcaggcaatgtgacccgctcgcggcacaacctgtcggtcgacggcaacattgcatcaccggacgcgtcgcttccgctgtttgcgttcggtccgaatactccgctgtcctccgtgtctgcggccctggcgccgagccgtttctacgcggtgcagggcgacattatcggtctggccaccggcgcccggcgcacgctgaatcccaacgcggggcagcgcacgcagttgaactggttcgaggccgccggcgccgtgcaactgcgggcaagccgggacatcctcggggtgtcgatgaccgcgttgaacacctcgcccaccgacatcacggtggtggcggcgggccgcgacatcgtgcatctgaacgcgaccatcgccggccccggcaacaccgagatcagtgccggccgccagctgcgccaggaggatgcgggcagcatcgtcagcctcggtggcatcgtgcagggcgacacccgtcccggcgccagcatcgcgctgacggccggcaaccagcagatcgacttcgcggccctgcgtgcccgttatctggacccagtcaaccttgccgatcccgcgcaatcgcttgcatcgcagccgggcaaggcagtcaaggtctacaaccaggaactgaagcagtggctgcagcagcgcttcggcgtggctgccgacggcgacggggcgctggccgcgttcgatgcgctgccgcaggaacagcagcgcatcttcctgcgccaggtctattacgccgagctgcgcgaaggtggaagggaatataccgatgcagaagggccccgcttcggctcctacctgcgtgggcgcgaagccatcgccacgctgatgccggacaggaatgcggccggtgcgacgatcgaccgtaccggcgacatcgtgatgtacggtggctccggcgtgcgtaccgaggcgggcggcaacatcgagctgatggcaccgggtgggcagatcgtgatcggtgtgcagggcgcggtgccacctgccagcgccggccttgtcactcaggggcagggcgatatccgcctgttcagccaggacagcgtgctgctgggcctgtcgcgggtgatgaccacgttcggcggcgacatcctggcgtggtcggagcagggtgacatcaatgccggtcgcggttcgcagacgacgctgctgtacacgccaccgcgtcgcgtctatgacggctggggcaatgtgatcctgtcgccgcaggctcccgccagtggcgcaggcatcgcgaccttgaaccccatcgccgaagtacgaccgggcgacgtcgacctggtcgcgccgctgggcaccatcgacgcgggcgaagcgggtatccgtgtctccggcaacatcaacctggcggcgttgcaggtactcaatgcagccaacatccaggtgcagggtgagagcaagggcctgccggtgttggccacggtgaacgtgaatgcgctggcttcggccagtgcggcagcgaacagcgccagccaggccgcacaggatgtgatgcgcaagagccaggatgatgcacggcgcaaccagccgtcggtgatcagcgtgcagatcctcggcttcggcagtggcaccagcagcatcaacccgccggcgcgtggcaacactgccaacagcggttatgacgccaacagtgccttccagttcccgcaggcaagtcgcgacgagggcacgcagcgccggtag

SEQ ID NO: 497203 - DNA, 1842 bp, Stenotrophomonas maltophilia
atggcagtactgggtgctgccattggcatgcagcacctgcccaagccgtcccttggcgaagcgctcgtcggcggcacaggcggcaggcgccacgtcatagctgtagcccacgtccagattggggtccagataggcgatgccgatcaggcggttgagtgcatcatagtgataggtggcggtgacgccgcgtgcatcggtggccgtcttgcgattgccggcggcatccacggtgaagctgctggcaccgctgtccgggctgacttgcccggtcagatcaccgaaaccgttataggcataagtggtgtgcagacccttcgggtcggtgacctgggtgacctgatccagcgcgttgtactggctgcggatctccgccgccacgccgcccacgtcctgcagggtctgcgccaagcggttcaacgggtcgtactgctggctggtcacgcgctgcagtgcgtcggtcacggtctgcgggttgccgttggcatcgtaggcaaagccggtggcgtgattgctcgcgtccttcagtgcggtcagctggccgagcgtgttgaacgtccgtgccagggtgcggcgcagggtaccgcctgcatcgagcgtgtcttccttgaggcgattgccggcattgtccagcgtgtagtgaatcgtgttgcccgcgttgtcctcgatatcggtcaagcgcagcgccgcatcgtagacataggaaacgctgctgccgtcgggctcggtgatctgttgcacctggccggtcggccagtagctgatctgggtgacccgattctcggcagtggtcgcgccacgcacggtgaccgaggttggccagccgcgggcatggtaggtgtagtcggtgaccgcgccgttggcatccttgaccgacaacggccgcccgaacgcgtcgtaggccagagtctcgaccgtctggcccagcgcattggtcacactgcgcaggtcgcccttgcgataggtgcaggcgcctccgatcgcgcaccctgcatcatccgccgagtaataggcataggtaacggcatcggccacatccgtgcgcgggccatccacactcttcagcagcccctccaccgggcagctgcctgccgctgccacatcagcggcttcgcagtacgtgtagctggtgatgcgcgtctgaccggaagcggtgtcggtcaccgtgttggccgtcggctggcgtcgggaattgaaggccgtgcgggtttcgcggctaccgatccgggtggtcagtaccgcattggtttcgacgtcgcgcgccgtggtcgccacacgctgctcgggcaagccgaccgcttcggtcacggtatggatgctgacggcacgaccgcttaccggatcggtgccctgcgcataggtgtgcttggtctggatgccgcggcgatcggtgtaggtatccagacgccggcggaagtcgacactctggtcgtagtaggtccggctgacggttccctgcgaatccgtcaggccggtcaccttgcgcgacggagcgctatcgccgccgggtgtcagggtgtagtcggtctgccgccccagcgcgtcggtcaccaccgcaccgccattggggctgtaggccagtgtcacgccatcggcaccgccggcatgctgactggagatcacacgaccgatggaatcgtaggtgaaggtgctgtagcggcgaccgtcctcagcggtgatgcccgtcaggtgctgggggaaagcctggttctcgtagtgatatgtccgcacaccgccacccgcataggtcaccgtggcgacctggttctgcggcgtgtaggtataggtggcgagcgcaatgccttcgaccagcaccgaactgatcaacgcctcatagtcgtttga

SEQ ID NO: 497204 - DNA, 1194 bp, Stenotrophomonas maltophilia
gtgatagaagcgcgtcagcgcgatccagcccagatcaaagtcctgcgcgatctcatacttctcgcccgttttaacatcacatgggttgccgacattgccgtcgcaggtaccgccgttggaggccgggtccttgtcgggaatcggactcatgttcgccgctgtatcgttgcggggcatggggcagctaccgttgccgccgtccttgtcgcacttctgcgacttcgaggtgatggtcgcaacgaattcctcgttgacgcaggcgttgtgcttgttggaccactgcgtaagtggaacagggcaatcaagccggcgtttgcggccgaaggccatctggctcacgtagggagcgcagggcgattcggccgtgttctccccgatcatatcggtgatttgatagaacctggactcgactacgccttccatttcgggcacgccggagaaccagtcaccctgtggtgtaacagcagcacccggacacacagggttacttgcctggacttcagcgagataactcgcgaccatcgcctcttcggtcgaaaactccgctgtactcagataggtccagtctggatcggagggttgtgccttccccatccagtaggtgatcgacgtatttccgttcaagtccacgactttcgacttgatcttgtcgacagactgccaaccgaactggaactccggcgggaacggactcggtgcgggcaggctcttgatcgcctgcaccgcctgctgctgggtcttgtactgcgtcgaattgccgccgggctgcgaaatacgccaggtgatcttgctttcctgcgcctgtacaacagccggcgcaatgcagccaacggcaacgatcgccagcacggcacacaaaatggtcttcagtcgttccaacatccctgttctccttcctggacgaacacagcgccggcgggaacgagaacgcggagctgtgccccgcgtcatgcttcggatcgtccctggtccggaatgcggcagtgccacatgccgcctttatcgttgaggacgcttgcacgttcaagtgtggagccgcgtaaccgatcacagattcaagcatccaacgccattcagcggtctacgccccgtccccatgactttctgcacagggagtcggtgttatacctcactacattaccaacacgacctgtcgcgaggtcggcaggctgtggcactccgctgcagacctga

SEQ ID NO: 497205 - DNA, 1962 bp, Stenotrophomonas maltophilia
atgcactcccccaccccgcttcgcccccacctgctccaggcatttgcccggtttaaaagccctgccctcaggaccgaccaggaggcggtgctgttctcgctcaaatgcctgctcgccgcgtcgttgggactgtatgtctctctgcggatcggcctgaaccgcccgttctgggtggtcggcacggtctatctggtgtcgcagcccctttccggggcaacactcagccgcggcctgttccgcctgctcggtaccgtgggcggggccgtcgccaccgtcgcgctggtgccacgtttcgccaatgcacccttggtgctgagcgccgcactcgccacgtggatggcgctgtgcctgtacctggcgatgctcgaccgcacgccacgtgcgtacgcgttcctgctggccggctataccaccagcctgatcgggtttcctgcggccatggtgccgggagaagtgttcaccattgccgtcacgcgggtgcaggaaatcgccatcggcatcctggccgcaacgctggtacatggactggtgctgccgcgccgggtttcgatgcgcgtgcacgcacgggttgctgccgtgctggaagatgcggaacgatggacacgcgacatgcgcgccagtgcatcggacacggtgctggcgacggaccgctcgaaagtggccgccgacctgctcgagctgcatgtgctgtcgatccacctgcccttcgacagcgcccacggcgtcgcccaggtgcagatcctgcgtgccctgcatgaccggatgctggacgtactgatgctgtccagcgcggtggaagattccatcgctcggctgcgttcaccgcaggccggcacaatggatgcaagcggctggcgcgatctgctgcaggccagcctcgccgctcaacaggccgagctcgacctcgcccactccgactgccgcgtgctgcaggcacaactgcacactgcccgccccgactggcgcctgcatgtgcctgaccgtcttgcgcggaatgtgcagggcgcagtgattcaccgggatcacaggaacgccgcgcgcagcgcgctgggcgcgttcgtcggcatcctgctgagctgcgtgctgtggatcgttaccggctggtcggaaggcgccacggcggtgtccatcatcggcacagcgtgcgtgctgttcggcacgatcgaagcgccggcaccacatgtcatgcgctacctggtgggatcgtgcatcggcgttgccgtcggcctggtctacggtctgctgatcttccccgcgctgtccgatattgtcggcctgattgcctcgctcacgccggtgctgctgctgtgcggatcgttcctggcccggccgcccttcatcatggccgccctgggcgtggtgctgaccttcccgctcatcgcaggcctgggtgcgatcaatacggtcaacatcgtcggcgcactcaacaacagcgttgcgttgttcatcggtacggcaatcgcactgtgcagcatgcagttgttccagaccgccgatgcgggccgtaaccgcgcacggttggagcgttcgatccgtcgggacatcgcacgacatgccgccggccatggtgatgtgacccgcgcctggctcagccgcatgctggatcgaatcgggctgctcgctcccaggttgcagggccgttccagcgccgcgcacgacctgcgggcattgtttgcggacgttcgtgcggcacgtgcatccagccaactccgcgcgctggaaaggcggctgcacaacccgcaggttcgggcgcttcatgcagcgctggtcgaacgcatcgctgcacatttcagggttcgcgcccactcggcacgcagtgtcgacatccatcttctggaactgctggaccgcatgcgcgaggcagcggcggccagcagcggggccgatcagaggcatctgtcgcatctgctctgcgggttgcgccgcgacctgctggcatccccgctcacccatcggcactga

SEQ ID NO: 497206 - DNA, 1233 bp, Stenotrophomonas maltophilia
gtgacccgtgcctccctctaccgccgcctgagcctgcgcacccgcatcacgatctcgttcgtgctgttgatggccggtgccatgggcttcatcgtactggccgaacaggtggactacgaccaggtccgggccgctgtcgtcgcgcggacccaggacaatgaagtacgccgcctgcaggacgaactcgcccgtggtcggcgtcccgacctgccctccggcagcgcactgttcgatgcccaggacgtgcctgtcgtgctgcgccaatatggcccgggatatcacggcgaagcagcacccaacgagtggcacctgcgcgtgttcgacagtgccggccaacgttactacctgctgcaggacgcagcgccctatggctatctggaatacctgatcaatgcctttgcggctctggtcatttcgatctgcgtgcttggcgccttcctgatcggtcgcaaggtagcgacccacgtcatcgcgcccatcacacgattggccgatgcggtgcaggacggccacaagccctttccctaccaggacgcacgcgatgagatcggcgtgctcgcgcgcgcctttgcccgccatagtgacgagctcgaacggttcctgcatcgcgaacagtgcttcagcggcgatgccagccacgagctgcgcacgcccttggccatcatcggtggtgctgccgagacgctggcctgccagcttccggccgacagccacctggttcccagtgccgagcgcatcctgcgcaccacccaggagatgcagcgccagctgacctgcctgctgctgctctctcgcgcccccagcaccgtgccacgcaacgaggtggccctgcgtgcgctgattgaatgctgcatggatcgctgccagccctggctttccagcaagccggtgatcgttgcgtttgatgcccggcatgacaccgtgctgcacaccaacgcggatcttgcgcgcagcgtgatctggaaccttctgcgcaacgcctgccagtacaccgaaagcggcgaagtccggatcaccctccacgacgccgcactcatcgtcgccgacacggggcccggcctgccctccagtatcgatccacagctgttccagcgcttcgtacccgctagcgtgcacagcggcgaggggctggggttgtcgatcgtgcagcgcatcgtcgagcacctgggttggaggatgacggtgcattcatcgcagcagggatgccggttcagcctggagtggcccctctga

SEQ ID NO: 497207 - DNA, 267 bp, Stenotrophomonas maltophilia
atgccggaacacgtccactggatgttcgagctgcgcgcagctcaccttcccgacatcgcgcgccggatgaaatcgtcgagcgcgctcgccctgaatcgcctggtggggcgtcgatgtacggtctggcagtctggctactttgatcatgcagtgagggcggaggagtcgctggcgcagcaagcgctgtacatcctggggaatccggtgcgcgccggtcttgctgggcagcttggcgagtatccgtatgcatggtcggcctggttgtga

SEQ ID NO: 497208 - DNA, 2388 bp, Stenotrophomonas maltophilia
atgcgcatgatgcagttcacaccgaagattgcttccacttttgtccgatcacggctgagccagattattgccaccgcattgattctggccggtggagcgtcgtgggcgcaggcccagtcgatcggcccagggcagacgctcgtgatcacgccgggcagccctcgcgaaggcacccaagtatcgttggctggtggaacgctcattgttcgcgacgcgaacgtaggcaggatcagttcggcttcaactgcaggtggtcagccgtcaagcatccaactgtacggcgcaacgctcaacaacgcctcaacaagcccgagccaggttgcaaacagcaatgccatccttgataactcaacagttctcggcggcatgacgctctcttcgcaacgacattcccccgagcgcccccgcgcttcaatcacagcaaacgaaagccagatcagtgggcgttctttcgcactcaatgcaaacgccggcggcaccttgaatgccagcaggacacaattgaccagcgacatgattgccattcgaattggtgctgctgcggtcaaccttcggagtggatccagcgccattggcgaagaaaatggcatcaggatgagctattccaccgtgctcgctgccgagtctcccgacagctcctactggggattgctcgtagatgattcgcggctggaagggcgagccggagccgcattgtcgcttgctgctgggacgcaccctgaagtcatgcgagtcgccctgcagaacaatgccgttctggtcggaggcaatgggaatatcattgagatcggtagcgatgctgcctatgacatcaccgcccgcacctccacgctcaagggcgatatcaccatcgccgataccgccaccggcgcgctgcgcttcctcgacggcctcgacctcaccggccgcatcctcggcccggccgatgtcaccgtcgaccagggcggccgctggatgctgtccggcgacagcaacaccggcaacctcaccctgggtgcgggcagcgacatcctgctcgggccgggtgagttccgccagctgaccgtcaacggcaactatgtcggccagggcggcacgctgcacttcaatacggtgatggccgccgacgatgcgccgacttcgaaggtgcacgtcaccggcgatgcaagcggcaacacccggatcgtggtcaacaacatcaatggcgccggtgcgcagaccgtcaacggcattccgctggtgcaggtggacggtgccagcaatggcaagttcactctgcagggccgtgccatcggcggcatgcacgagtacttcctgcacaaaggctcgccgggcgccgccaacggcaactggtacctgacctcggtctacaccggcaatccgtgcgatatcaatccgtcgctgccggagtgcacgccggtggatcccgtggacccggtcgaccccgtggacccggtcgatcccaccgatcccaccgatccggtccccgtgctgcgtccggagccgggcgcgtacctggccaaccaggccgcggccgtgcagatgttccagctgcgccgccatgatcgcggcgagcccggtttcgaccgcgcccgcaccggcacctgggtgcgcgccgggcgtgaccagctgcaagccaacgtggccggccaggtcgatgcccgtacccacatcaacaccctgcagctgggcagcgatgtctggcgctggggcgatggccgtggccaggtcggcgtcatgctcggcaccggcgaggcgaccacacaggcggtgtcgacgctgagcggttatggcacccgcggcaaggtcaagggcaagtcggccggtgtctacctgggctgggttcaggatgcacagagcagtgccggcctgtatgtggacggctggctgcaggcggcgcgcttcgacaacgaggtgcagggcgaaggcatcgcccgtgagacctacgactccaggacccgcagtgcatcgttggaagccggttatgcctgggccatccgcagcactgaggccagcacgctgtaccttcagccgcaggcgcagctgacctggaccgactacgacggcgacagtctggttgaaaacaatggcaccacggtcgaagacggtcgcggcggcggcctcaacagccgcctcggcctgcgcctgtttggccagagcacgctgcagggcaaccgcgtgcagccgttcctggcagcgaactggctgcgtggccagcgcgatgaggccatgcgcttcaacagcgagtcgttgagcgcgaagacgccggagaaccgctacgaagtgcaggccggtgcccagctgcagctgggccagcgttggagcgcatggggtgacctgcgtgtgcagcgcggcgacagcggctaccgcaaccatggagcccaggtgggtctgcgcgccgcctggtaa

SEQ ID NO: 497209 - DNA, 2160 bp, Stenotrophomonas maltophilia
atgcccgttgccacacccctcttccatcggctgcccctggccgccgccatcgccctgaccctgccgctgcccgcactggccgccacaccgaagccgaccgagctggaccgcgtgcaggtgaaagtcagcaccgccacccgcagcgaacgcctgctgtccgatgtcccgatccgcaccgaagtgctgcgcaaggaagacatcgcgttgcgcgcggccaccgacttctcccgtgccgccgagctgatcaacggcctgcgcgtggaaagcaactgccagaactgcaacaccagcgaagtacagctgctgggcctgcccggtgcctacaaccagctgctgttcgatggcatcccgctgctgtccacgctgggcagcgtgtacggcctggaacagatcccggccgggttcgtcgaccgcatcgaagtggtcaagggcggtggctcggcgctgtacggcccgggtgcggttgccggtgtgatcaacctgattccgccgctgccggcgcgcagcggtggccatgtgcaggccggcgtggatgtcctgaaaggcacgccgcagaagaacgccgacgtacggctggacctggtggccaaggaagcagacgccggcctgtcggtgattgcccagcgcaactggaacagcggcatcgactacaacggtgacggctacaccgaaatcacccgcaagaacctcaaggtcggcgggctgcaggcctggtacgcaccgacgccgggaacgcggctgcgcctggacctgcaggtgaccgatgaaacccggcgtggcggcaaccgcctggaccagccggaatacctggccaacatcgccgaatcgctggatacgaaataccgccgcggcagcgtgtcgtgggaccaggaaatcaatgccgacgtcgatttccgcctggcctacgccttcgccgacattgaccgcgacagcttctatggcggtctgggcgacgtagtcaccgatccgtccgcgccgggctatgacccgtcgcagctggacccgaacgtggccggcagcgcggcctcgcgttcgtggcgccagtacggccgcacccacaacccgctgcactacatcgacagccagttgaactggcggttgggtgcgcacgcgctggccttcggcgtgcagtacaagcacgaggcgctgcgcgacgacaaccgcaccggtgacggccagcgtcttgcggtactggaggatgcgaccttccacaacctgggcgccttcatccaggacgagtggagcctgcgcgacaacgtcgacctggtgttgggtgcacgcgtggacaagagctcggaactggacagcgcggtgttctcgccgcgcatcgcgctggcctggcaggccacgcccaacctgaagtggcgtgccggcatcgccaccggcttccgtgctcccgagatcttcgtcgaggacgtgcatgtcgacacgctgggtggcgaacaggtgcgcgtgcgcaacaccgatggcctgaaggaagagcgcgcgttgaccaccctgttcggcttcgactggcgctcggacccggccaatccggtgtggagctgggatgccactgcctcctatgcacgcatccgcgacaccttcgcgctgggcgagatccagcgtggcgatgacggacagctgagccagctgcgctacaacgcctccggctccaacgtgctgggcgcggaaaccaacctcggctggcagccgtcgccgcagtggcgcctgaccgccggtgcctcgtggtaccgctcacgcttccgcgaaccgcagcgcatcttcgacgacaccggcgatggcggcgacaccgtgatcgaaagccgcgactacctgaagaccccgcgctggaccggcctggcccagctcagctggatgcccgccgagccgtgggaaaccttcgtcgcgctgcgccacaccggcccgatggcggtgctgaacaaccggctgggcgagctgcaccgtacgcgctcgttcctggtcaccgatctcggggcgcgctggcaccggcatctgggcgcgcaggcgcagcaggaagtgtcggtagccgctggcgtcaagaacgtgttcgatcagcgccagaaggatctggaagtgggcgcgctgcgtgacagcgactatgtctacgggccgcgcttcgcgcgctcgtggtacgtcaacctgcgctatgcgttctga

SEQ ID NO: 497210 - DNA, 828 bp, Stenotrophomonas maltophilia
atgaccagtacatcccccgttgatcagagcgcgctgtggaacggccccggcggtcagatctgggttgcgcagcaggccatcctcgacggcctgttccaacccctggccgacctgctggtcgacgaactgcccgacaccgtcacgcaactgctggatgtaggctgcgggaccggtgccagcctgctggcctcagccgccgcacgcccgtcggcgcactgcaccggcctggacatctccgcgccgatgctggcgctggcccgtcaacgcgccgaggcggcaggactggacgcagacttcatcgtcgccgacgcacagcagcatccgctgcccaccgcgcacttcgactggatccaatcgcggctgggtgtgatgttcttcgaagacagccaggccgccttcgctaacctgcaccgtgccgcgcgaccgggtgccggcctgcgtttcatcgcctggcgcagcgcagcggagaacccgttcatgacaacggccgagcgcgccatcggcgatgcactggatcttccgccccgcgcgcccggcgcaccgggccagttcgcctttgccgatggcgagcgtgtgcagcacctgctgcaggccgccggctggaatgacgtggaggttgttgcggtcgacctgccctgctcgctcgcccgcgaagacctgccgacctatgtcggccagctgggcccgttgggcctggcactgcgcaatctgcccgaagaccgggccacctcgctccggaacaaggcggtagcggcattcaccccgttcatcgagggcgaccgcgtacgcgtggatgccgcctgctggctggtccgcgcccgcgcctag

SEQ ID NO: 497211 - DNA, 546 bp, Stenotrophomonas maltophilia
atgacgttgctgggactattggccatcggcgtgtgcctgcggatcgcgatcagcgatctgtatgcccgccgggtgcccaatgcctggctgttgtctgcgtccatcattgccatcgcattgatcatcgcggggcagttcagcacgccgcgccagccgtggcctgcccacgcggcgggcgcggcgctcggcctggtggccctgctgccgttctatgccatccgctggatgggcgccggtgacgtcaagttcttcgcggtactggggctgatgctgggctggaaagccctgctgccgatctggatggtggccagtctcgcggccggcctgcacgcggcggtgatcattgttggccgccgcctgggcgtgatgctgcccacaggccttcagatgcaggtcaaccgcgccagcagccaatggcaatcgcaccccgccctgcgcgacatgcaggccgcgcgccagggacgacatggcattccctacgcagcgtacctggccatcaccggcatcggctgggtcctggcaagcgtccatggaggtgtggcatga

SEQ ID NO: 497212 - DNA, 1038 bp, Stenotrophomonas maltophilia
atgctcaagttgacccgcatcgctgccgtcgccctgatcgggctggccgtgctgctggcggtgatcgccttgatgatcgggcgcaagcaggccgcgccggccacggttgccccggttgcgcagagcgaagcccaggcgatcaccgtggtagaggcggtggcacgactgccggccggtgaaccgatctctgccaatggagtgcgccttgcgcagcggaccacggcggtagccggtgctgccaccagcatctcggccgtggtcggcaaggtgccggtgcaggacatcgccgagggcaccgccatcagcagcggcgccctggcacagggattctcgctgcagctgcgccccggcgaacgcgcgctggccgtcccggtggacgaactggtcggcgccggaaaccgcatcctgccgggtgatttcgtcgatgtcttcctcaacctgcgcaatgcccagcccaacgccagcggtccggcagaggccgcgcagacccgcctgctgctgtcgcggctgcgcgtgctcagctacggtcaacaggacatcgctccggtcaccggcgatgccgtcgccggcaacgaaggcgatacccgcaacgatccccgcgccgccgacatcaccggcaatggcagcaatcatggctcgggcaacgaggccacccagccggcacgcagtgcggtgctggcagtgccggtggccgatgccaaccggctgctgctgggtgcgcagcagggaaagctgttccttgccctgcgcaacccggccgatacggggcaacccgaccttgcactgtttccacaggcgcgtggcgtgatcgatcccgtgcgtggcctcgatgccgaacagcagctcgcactgcagcggccggagaaccacgccttcgccggcatcgatggtgatgccctggccggccgcggcaacagcgcagcccgcagcaacccgcagccgccggtgcatgcgccggcggctcgacgcagcgcaccgcgtgcgtcgggcatcgagatcatccgtggcgacagctccgccccccgcggttccctttga

SEQ ID NO: 497213 - DNA, 957 bp, Stenotrophomonas maltophilia
atgggcacgggcctgctgctgggtgtactgagcatcatctcggtgctgctggcgcttgcggtatggctgtggggcaccgccagcaaccgggagcaacgccaggcttcgctgcagcacgccgagcagcagctggctcgcggaggcgccagtggcggagccccggccggggcatccgtagccgccgccaacgacccggcgcgaccggcaagtgccgggcgccgggtgttgccgctggacggcctgctgcaacgtgcgggcctgcagacgggttggaagctgcccatcatggtgctggtgccgggactggtgctttcggtcgtggccatgctcaggctcggtacggcgtggatgttccccctgaccctgctgctgtacctgctggcctgctggctgtgggtcatgcgccgcaccacgaaactgcgtgcacagctgctgcaccagctgcccgacttcctcgacaacctggtgcggctgaccgcgctcggcaacagcctgcaggctgccttccaggtggcatcgatgcagaccagcgcgccgctgcgcggactgctggacaccaccgtgcgctacgcgcgcagcggcatggacctggaccgtgccctgagcctggcggcacagccctaccggatggatgtgctcaaggtgctgtccgtcgtgatcggtgtcagcgtacgcatcggcggacgctccgatcagatcctgcagcgcatgggcgatttcatgcgcgacctggagcaggcccagcaggagctggccgcgaccacgtcggaaacgcgcatgtcagcctgggtgctcggcctgctgccaccggccagcgcggtgctgatggccatatcgagccccgaattcttccagccggtgctgcacgatccgctgggtcacaagatcctgttgatcgcgctggggctggagctgtttggcgcgttcctgctctaccgcctggccaagtcgctatga

SEQ ID NO: 497214 - DNA, 891 bp, Stenotrophomonas maltophilia
atgcctgccctgcgcacctcctgcctgttgctcgcccttgccgccgtcgccagtggttgtgcgtcgacaacgccgaagtacctgcgcgcgcccagcctggccgcgcccgaaccggcgccgcaggacagccgcaatgcctacctggaactgatcgggcgcatgcagcagcagggtgcctggtatgcctcgctggcccacgtcgatgccttccgccagcgctatggcgacccgccggcgttgcgcctgctgcaggccgacgccctgcgcgagaccggccaggccgacgctgccatcgccctgtaccacgagctctccagtggcccgcaggccgctgccgccgcacacggcctgggcctgatcgccgcgcgccgtgacgatgatggcggcagcgaggaggcactggcccgagccacgcagctgcagccattgaacaccgattacctgggcgatctcggctatgcacgtctgcgtgcaggtcagttcgaacaggcgcgtgaaccgttggccaaggcgctggagctgtctccaggcaatcccaaggccaccgccaacctcgccctgtgggcggtgctgcgtggcgacaccaccacggcagagcgcctcgccggacaggccaatctcaacgaggacacccgccgcagcatccagcaacaggccgcgcagatccgtgcccgcctgcagcagcgccaggccgccgcggcagctgccgcagtcgtgccggcccctgcgcgtgctaccgccagcgatgccggcagcaaccggcccggcgccacgcgactggcggcggaaccacgccgcgacagccgcgatgagcgcgatccgcagcgcctgccgccctcgatgctggaacgcttcagcacctccgatcagccgaacggaaacactccatga

SEQ ID NO: 497215 - DNA, 459 bp, Stenotrophomonas maltophilia
atgagcgccatgcccctgacccgacacctgttgcctgcactggcctgcctgctgttgaccggcggcgcgcaggcgcagcagcaacccctgaccgggcagatgcttggcggcagcacgcccgctgcgccggcttcgcagccgctgcagtccgagtcactggccaccgtggacctggcgaccccgccggcaccggtgccgcaggcggcgcctgcagcggtcgccatcaccgacggcaacgctgcagccgcgcgacccggccgcagccagatcggcgacaccacgcgcgacctgttccgcctgcaggcatcagggcagcaggccgggcaacgcctgccgatcctcggcgaccaggctacgttgagttacgcccgctacatgaagagcttcgaacacgagatcccggacttctttgaaaccgatgtcgccaagtccaagggatcatcctcatcgggacgctga

SEQ ID NO: 497216 - DNA, 396 bp, Stenotrophomonas maltophilia
atgccgagaatgcgatgcagcccactgttgtgcctgatgctggtcacggcggttcatgcgcagaccaacgtgtataaatgcgtggacgggccacatccggtctatcagcagacaccctgccaggggcatgcggaatggcgctgggaggtgcccgaggagcagtcgctgtcacgcggaccggtgccaaagccggccggcgcgggcagcgcggtgccggcgcgaccgcgcaccgtgcgctcggggcggccgcaggccgcgctgatacccatcagcacggaccccagggcctgtgagcgcgcacgacagcgccgcggggaggtgctggccaaggccaagcgcctggacttcgtacagcgtcggcagctcgatgacgcggtgtacgacgcgtgccgctga

SEQ ID NO: 497217 - DNA, 825 bp, Stenotrophomonas maltophilia
atgagcaattacgtcaccgtcgccgatggcgcccgcatcttctacaaggattggggcaccggccagccggtcgtgttcgcccacggctggccgctgtcgtccgatgcctgggacccgcagatgctgttcatgggccagaacggcttccgcgtgatcgcccacgaccgtcgcagccacggccgttcgagccagacctgggatggcaacaacatggacacctacgccgatgacctggccgcggtgatcgaggcgctggacctgaaggacgcgatcctggtcggccattccaccggcggcggcgaagtggcccactacatcggccgccacggcagcaagcgcgtgtcaaaagtggtgctggtcggcgccgtgccgccgctgatgctgaaaaccgacgccaatccggccggtaccccgctggaagtattcgacggcatccgcaagggcacgggcggtgaccgctcgcagttcttcaaggacctgagcacaccgttcttcggtgccaaccgcgatggcaataccgttacccagggcatgcgtgattcgttctggctgcagggcatgctcggcggcgtcaagggccagtacgactgcgtgcacgaattctcggaagtggactacaccgaggacctgaagaagatcgacgtgccggcgctggtggtgcacggcgatgacgaccagatcgtcccgttcgatgcctcggcgaagctgtcctcgcagatcatcagggatgccgagctgaaggtgtacgccggtgcgccgcatggcctgaccgtcacccacgccgaccagttcaacgccgacctgctcgcgttcgcgcgcagctga

SEQ ID NO: 497218 - DNA, 333 bp, Stenotrophomonas maltophilia
atgcagcgcctgttcgtgatgttccccgaccgcgggccgggcatcggcctgctgtggctgcggctgtgcgtggccgctgcattgtgcacgccgggcacgcacgcgggctggctgtcggcgctatgcctgctggcggtggtgatgcttgcactgggcgtattgacgccgctggcggtagtgccggcaacactgggcctgtatgcacaggcactgccgtggccactggtggtgttgccgctggccttgctggcgctgggccctggcgcctattcactggatgcgcggttgttcgggcgccgcctgctcggccgtcggcctcccccattcgggtag

SEQ ID NO: 497219 - DNA, 1458 bp, Stenotrophomonas maltophilia
atgttccgttcccgtccgttggcccttgccatcctccttgcggtagcaccgctgtcggcgtctgccgccgagcgcgccgacctgctgatccgcaatgccaccgtggtcgatgtcgagcacgccagcacgctggccgggcagagcgtggtgatccgtggcgaggacatcgtcgccgtcggtccggacgcgcagctgcgcagccaatggagtgcggcccgccagatcgatgccaagggcaagtacctgattccgggcctgtgggacatgcatgtgcacttcggtggtggtccggcgctgatcgaagagaacaaggcgctgctgccgctgtacatcgcgcatggcatcaccacggtgcgtgactgctccggcgatctgcccgagcaggtgctgcagtggcgtggcgagatcgccaagggcaccttgttcggcccgcgcctgctcagttccggcgcgaagatcgaaggcatcaagccggtctggaagggcacgatcgaagtgggcagcgaggccgacgccgacaaggcgattacccgcctgcagcatgacaaggtcgatttcgtgaagatcaccgacagcacgctgaagccggaactgttcctgtactcggccagcgctgcgcgaaaggccggcttcaaagcctcggggcatattccgatggcactgaccgtggagcaggcggtcgatgccggcctggcttcgatcgagcatctggactacgcattcaaggccggcagcaaggatgaggcgcagatcgccgctgactttggagccggccgcatcgaccgtgccgaagccaaccggcgcctcgacgccagcttcgaccgtgacactgcgatgcatgcctaccgtgatttcgcaaagcgcggcgtattcgtgaccccgaccctcaacggtggccgcatcctcgacttccttgaccaggatgaccacgccaacgatccgtacctggcctacatcggccctggcctgcgcgcgacctaccagtggcgcgtggaccgcgcagccaaggccacgccggcgcagattgaagcgcgccacgcgcagtaccaccaggtggccgcggtgctgccgctgctgcaggaggcgggcgtgacgatcatcgccggtaccgatgcgggcttcctcaattcgttcaacttcccgggcatcgcgctgcaccaggaactgcagctgttcgtgaaggaaggcctgaccgcaccgcaggcgctgtcggccgcaacccgttccggtccggcctggttcggccagatggaccgctacggtggtgtcgcacagggcaaggccgccgatctggtgctgctgaccgccaacccgctgcaggacatcgccgccaccgggaagatcgacagcgtgatcctgcgtggcagcgtgtatgaccgcgctgcgctggacaagatgttggctgataccaaggccaaggtggcggcgtggaatgccgaggcggcgaagacgcagtga

SEQ ID NO: 497220 - DNA, 1194 bp, Stenotrophomonas maltophilia
atggcgccattcttggcattccgggagttcccgatgaccctccagttcgtccatggcggtgtcgaccgcgacggtgcgccactgcatttccatatccgtgatggccgcatcagcgggctcaatggcgaggcggcgccggccgacgcggcagaatgcgtcgacctgcagggcttcgcggtgctgcccgggctggtcgacggccacattcacctcgacaagagcttcgtcggcgaccgttggcacccgcaccagccggtgaacagcctgcgtgagcggctggcggtggagaaggcggcggtggcgggtgcggcaccgatggtggaccgtgccgaggcgctgatccgccaatgcagtgctttcggtacggtggcgatgcgctgccatgtcgatatcgacggcagcaccggtctcggccatctcgaagcggtgcgcgaggcggcactgcgctgcgccgacatcatgcggatccagctggtggcgtttccgcaggccggggtgatgtcctgtcccggcaccgccgccgtactggagcaggcgcttgccgcgggcgtggaggtgctcggcggcatcgacccgaccacgctcgatggtgatgccgaaggccagctggcgctgctgttcggcctggccgagcgttacggcgtgcagctggacatccatctgcacgagcccggcgaaaccggcctggcccagctgctgcgcatcgcggcgcggacgcgggccgccggcctgcaggggcgggttgcggtcagccatgcctattcgctgggcgacgtgccgctggcgcgcgcgctgcaggtgggcgaagcactggccacggcgggtgtggcgatcatgagcaacgcgccgggcgatcatcctttcccgccgctgcgcgcgctgcatgatgccggtgtgcgcgtgttcgcaggcaacgacaacatccgcgactgctggtggccgtacggtaacggcgacctgctgcagcgggcgatgttgctgggctaccggtccggcttctacaccgatgccgacctgatgctggcgctggacatggtcaccacccacgccgcgcaggcgatcggcctgccgcagcatggtattgccgaaggccggccggcgacgttcgtggccgtgcgtgccgaccacggcccggccgctgtggccggggtgccggtggagcgccgcgtggtggtcgacggccgctggctgtag

SEQ ID NO: 497221 - DNA, 627 bp, Stenotrophomonas maltophilia
atggatgtcagggggtggagtgtgattgccgtgctggccattgcaggttgcagtggcaggcaggcggccagcgtggaggatgccgcggaggcggccagcgccgcgcccgtgccgtcccagcccaacgcaacggccgatgcgggctcaacgcacgggcaaacggcatcgatgcgggtgacggccaagcaggggcctccggatgcggagggtcacttcctcgagggcgagcgcatgctgctgaacgagggtgcggtgtccgcacagaagagcgaggcggtgctgggttccgacaaggccttcgcgcaggcgatcagccagttcgagcgcgatgcagccggtcacctggaagtgcaggacctgacccggctctacagggcggccgcgacccggctcatcggcaacgacggcacgctggtgtcttttgcctgcggctacagcctgtgcgttggcgagatccgcagccgtaccgatgaggatttcagtgcctggtccgaggcgatcggcatggacaaggtggccccggtctacagcctggccacggcgccgatgacatggggcagggaccagcatggcgggcgcttcgtgttctcggtggatccggccgccaacggcatcacgggcccgtag

SEQ ID NO: 497222 - DNA, 702 bp, Stenotrophomonas maltophilia
atggacttatgcctgaaccgaatcaggctccgcccggtggtcgtcgcgtttttgcaatcttttgaatggtctggcgaagcgggcattgccatcgttccggggatgatgaccccgtaccccacatccctcctccccccgctgcgccctgtgtcgcgccgccatctgctgcagctgcaggtggcaccggtcaccctgcgcccgttccagcgggccgatctgccggcctggcgcctgttcgacgaccgccgccgacgcgggcgccgccatccggccggtatcgacgaagaagcccgcttccttgcccacatgcatcgctcgcggctggagcaggacaacgaccagctgctgctgggtgtgttcgatgacgagcacggcactgtcctggaccagctgcatgtccgcctgcagtccctgcatacgcgctgcgccgagctgctgtcgctgcagcactggcacccgcacgtggatgcagcgctgcgcgcgctgtgcccgttcctgttcgaggatgtgggcgtgcaccgcctgttcgtgatgctgccaccggactgcagtgacccgttcgccactgcgctgcacgccttcggcttcgagcacgaaggcctgttgcgcgaccatcatctggatctggatggctggcaggaccgccagctgctggcgctgactgcaccggtctggcgcagccgccagcagccaccgggttag

SEQ ID NO: 497223 - DNA, 774 bp, Stenotrophomonas maltophilia
gtgtccctgcgccccttcctgctgtcgtccctgctgctgttgtccgcctgtgccagtgcgccgccgccggcccattccgatgcattgtggcgattgatcgaacgtgactgccggggcgccgaaggtccacgcggcgactgcctgcgcgtggagacggccgcagaccgccgcgatgtgctggtcaaggatgcgcacggcgactaccagttcctgctgatgccgctggacaaggtgagcggtatcgagagccgcagcctgtaccagcgtggtgcaccgaactacttcgctgccgcctggcaggcgcgcagccacaccgaacaggccttgcggcaaccactgccgcgcaacgtcgccagcctggcgttgaactcgccgcacggccgctcgcagcaccagctgcatatccacgtggattgcctgcgtgccgacgtgctgcaggcgctggacacgcatgctgccgccctcggcagccgctgggcaccgctgccggtcctgctgcgcggccatcaataccaggcacgcctgctggcgggcgcggaactgaccgccaatccgctcaatctgctggcttacgacctcgcaggcgtggacgatgttggtcagtggagcctggtcgtggccggccgggacgccgtgcagggcggcccgggtttcatcctgctggcgacccgggtggacgccggcaccggcaacgaggccagcgccgaagaactgcaggaccacgcctgctcggtgctgaccggcgcaggcgacgcgttggagcgggtccgctaa

SEQ ID NO: 497224 - DNA, 2820 bp, Stenotrophomonas maltophilia
ttggcaacggaattacgcctgccgatgaaaacgtttacaaagccgcttgcactgtccctggccctgtctgccgcactggccgccccggcctgggccgaccctgccgcgttcactgtgctgaccctggaacaggccccgaccgccgaggcgatgccggccctggccgcccagctgaagaccctgcaggtggacgcggtgagcgtgcgccaggtgcagcgcggcatcggccaggtcgatccgctgcaggtgctggccgatggcctgggctacgcgtaccgcttcattgctgccggcaaggatgatggccagacccagcgcggccaggccgtgctgacccggctgccgatcgctgctgaatccggccccgaccagccgggcctgaactacctgcgcctggacgacggccgccacaccgtggcggtctataccgatgccggtgcaggtgcggcgcagctgccggcgctggtcacccgttcgcggctgggtgcaccggcggtgctgctcggcgcggtggccggtgaatcggccaaggccgcaggcttcgatccggcgcgtgtcgcgctggaagccgatgccagctatttcagcgatggcttccaggccgccagcagtgcgccgttcaaggtggaaggcagtaccctgcgcgccaccctgctgaccctggcctacgccgacgacacgcatggcgacaggccgtggatggacaccaccctcaacgccgacgcgcgcgctgcgctgctgctgaaggcgatgaccgaggatgagaagttccagatgctgcacagctacttcgggctgggcaaggacggtggcccgctgccggaaggcgcagtcggttcggccggtttcgtgccgggcgtggcgcggctgggcattccgtcgcagcagtcggccgatgccggcgttggcgtgaccaatccgggtggcatccgcccgggcgatttcgccacggcgatgccgtcgggcccgtccaccgcatcgagctggaaccgtgaagtcgccttcgccggtggcgccacgatgggccgcgaggcatggcagcagcgcttcaacatcctgctgtcgggcagcgtcaacctgcagcgcgacccgcgcaacggccgcaacttcgaatatgccggtgaagatccgctgctggccggctcgatggttggcgcgctgatccagggcgtgcagagccagcacgtgatctcctcgatgaagcacttcgcgctgaacgacatggagacccgccgcaacttccacgacgtgcgcatcggcgaacaggccatgcacgagtcggacctgctggccttcgagatcgcgctggaagccggtcgcccgggcgtggcgatgtgctcgtacaacaagatcaacggcacctacggctgcgagaacggctacctgatgaaccaggtgctgaagcaggaatggaagttccccggtttcgtgatgtccgactggggtggcgtgcacagtggctcgaaggcggcgctggctggcctcgatcagcagtcggccggtgaagtgttcgacgcggcagtgttcttcgacgaaccgctgcgcctggccgtgcacggcggcgtagtgccgcaggcgcgcctgaacgacatggtggcgcgcatcctgcgcacgatgttcctgcatggcaacttcgacaacccgccgcagcaccagaaggtggatgccgaggccggtttcgccgtcgcccagcgtacggtggaagaaggcagcgtgctgctgcgcaatgagggcaacctgctaccgctggccgacagcgtgaagcgcatcgtcatcatcggcggccatgccgacaagggcgtgatcggtggcggtggttcgtcgatggtgggcgtgaccgcaaagggcaccaatgcggtgccgggcgtgatgccgaccacctggccgggcccggtgatcttccacccgtcctcgccgctggaatcgctgcgcgccgcgcgcccggacgcgaccatcgagtatgtggacgggaccaatgccgccgctgcggccaaggccgccgcgcaggctgacgtggccatcgtgttcgccacccagtgggccgccgaatcggtggacctgccggacatgcagctgccggacaaccaggatgccctgatctcggcagtggccaaggccaacccgaagaccgtgctggtgctggaaaccaatggcccggtgcgcacgccgtggctggcgcaggtgccggcgatgctgcaggcctggtacccgggcatccgcggtggcgaaggcatcgccgcgctgctgaccggccaggtcaatccgtcgggccgcctgccggtgacctgggtgacggacgaatcgcagctgccacgcccgcacatcgacggcctcggcttcaagccggccaagccgtttggtgatgtgttcgatttcgatatcgaaggcgccaacgtcggctacaagtggatggcggccaagggcctgaccccgaccttcgccttcggccacgggctgtcctacacctcgttcacctatgaaaatctgaaggtgagcgtggagggctcgcgcctggtcgccagcgtcgacatccgcaacaccggcaagcgtgccggtgccgacgtggcccagctgtacctgaagcttccggctggcagcaccacgccgatccgcctgatcggctatgacaaggtgaacctgcagccgggcgaacagcgccgcatccgcatcgaagccgagccgaagaccctggcccactacgatgcacaggcgcgccagtggaagatcgacggtggcacctaccaggtccagctgtcgcgcaatgcggccgaaccgctgcagagcgtggacgtgcagctggtggagcaggtgctgcgctga

SEQ ID NO: 497225 - DNA, 927 bp, Stenotrophomonas maltophilia
atgagccaggacgcgatcgcgcgcgaagccgcacgctggtggctggatggacacgatggcacccgcgacgagaacgcgttcgaccagtggtgccaggccgacccccgacatgccgcgcagtaccagtatctgcagcacctgtggcaggcaggcgcgacgctgcccagcctgcagcggcaacagcagcgcaggcaacgccgtcgcctgcgcgaagccggcattgcggttctgttgctgtgtgcgctgggtctctacagccgccatgcctcgccgccggtggcgcaggtactgcgtacggccgctggcgagatccgcgatgagacccttccggatggttcgcatgtcctgctgtcacccggcagcgaagtgaaggtgcgcatcgatgggcagcgccgccagctccagttgcagcgtggccaggcctggttccaggtcgccgccgatgccgaccggcccttccaggtacacactccgcagggcaccgtcactgcactggggaccgcattcgatcttgccgtgcagggcaacagcagcgtggtcaccgttaccgagcatcgcgtgcgcgtggacagcggcaacgccagcatgctggccaacgacggcgagcagctgcgcttcgatgggcagtcaacagccgatgcaacaaccaccgccccgggaacactggcctggcgcgaacggcgcctgcactgggtctcggccccgctggccgacgtcacgcagggcctggaccgctggcacggcgggcacacatgggtcatcggcgagcagctgcgccagcagccggtcaccctgcttggcagtgccgacggcgcagccagcaaccgcgaccagttggccactcagttgcaggtgcgcgtgctgcgcctcggcgacggcgtacaggtgtggctgccgccacgcagggaacggcgtgatggaccctga

SEQ ID NO: 497226 - DNA, 801 bp, Stenotrophomonas maltophilia
atgtggcgttctagccgtcgctggctgcccgtatgcctgctcgcgctggcgaccgtggccagcgcgcagccgatgcctggctcagtgatcgacctggccaacggccagcacctggacgaagccgcgttcgtggcgcgtgcggcggacgcccggaggctgctgctgggtgagcgccatgacctcgccggagaccacgccgcccagcgctggctgctgcaggcgctgcagcggcggcgcccgcagggttcgctggtgctggaaatgatcgccagcgagcgccagccacgcctgcagcgggtgcagcgctggctggccaagggcaaccaggccgaaggtgcacgcctgcaggaactgctggaatgggatacacgttggccgtgggccgcgtatggcgggctggtacaggatgctgccgatgcaggcacgccgctgttcggcggcaacctgtcgcgtgccgaggtcaacgcgctgctcgcgtccaccgagggcgtgcggttcccggtggccgctgcccgccagcgcctgtcggcggtggtgctggcccagcacgcagacgcagcaccgatgctggaagggatgctggccgtgcaacaggcccgcgacacacgcatggcacaggtgctgctcgatgcgcccgcgccggcgctgctggtagcggggcgctggcatgtactgcgcggtaccggggtaccgggctacctgtcaccagctacgcctgcgctggtgatcgcattggcttcgccgggtgaaaccgtcgatgcgacggatgctgatctgctgtgggtgctggacgatgagtga

SEQ ID NO: 497227 - DNA, 804 bp, Stenotrophomonas maltophilia
atgtcgagtgttggaccggtaccgataccggtggtgttgatcctgatgtgcacgttgctggccatgaccgttgcccgtctttggccgcgcagggcagtgggaatgccgctgccgtcggcagcaggcatcgtgctggacatgctgctgatcggcctgctgtgtggtcgtgtcagttttgttgtgctgaatttcgcgctctatcgttcggagccctggagcattctgcaggtcaccgatggtggctatcacctgatggtggtgctggtggccgggctgtcgtggggattatggcgtctgcggccgtggcgtcagttgcgtgcaccggtgctgacgagcgcactggtaggtgtgttgttctgggtcgctggtggccagttgctgtcggcatggcaggagcggcagatgccgttgccggcgctgcaggtggcggaccttcaaggcgatcgtatcgatctgcagcagttccgcggcaagccgctggtgctgaatctgtgggccacatggtgcgggccctgccgccgtgagatgccggtgctggcgacggcacaacaggcacatgatgacgtgcagttcgtattcctcaaccagggtgaaaccctggatgaggtccagggtttcctcgccggcgaacgactgatgctgggcaacgtgctgctggatgatgacgctgctgcttccaccgtgctcggcattcaggcgtatccttccacgctctttttcggtgccgatgggcgcctgcgtgaactgcacctgggcgaactgaccgcagccggccttgaacacaaactgcgccggctgcggtag

SEQ ID NO: 497228 - DNA, 648 bp, Stenotrophomonas maltophilia
atgacgttgcgtgctgcactgttttttctcgtcacgcacgcgctcgtcattgcctttgtcggcccgcaggacccggtcggctcctacctgatgctgatcaccgccccgctgctggctgcactggtctgcgtacggcgtgcacgcgtcagccaggcggcctgccagtggcgactgctcggcgcggccgtcggcctgttctctctcgcgctgctggccctgctgtaccgcaaagtggccggcctcgcccctgcgcagatgaccgcctcaacactgatcctgtacgtgttctaccggatccccctgacctacgtcgctgcaagcccgggcggcgggaaccgctacatccgtgcggtggacctcgggatcattgccctgctttggctgctgtactacctgcatgcgcgggcgatggcgccgctgaacaccgccttgtggacgcagtgcctgaacaccatgagcggcgtgcagaacagcctggtgttctgcttcgcactgatccgtttcctggccgaggacgatccggaccgccgcgattttttccggacgctgacgatctacgcgctgggctacttcctgctggccttctacatcaatacctatcaacctatcagccgcaggtgcccgacggcaattggggcgacctgctga

SEQ ID NO: 497229 - DNA, 825 bp, Stenotrophomonas maltophilia
gtgcccgacggcaattggggcgacctgctgatcagtggactgttcgtgctgctggccatcctggcgggcagccatcgtcgctgcccggcagtggaggcatcccgcagcctgcggcgcatcgtcgatgccggcgtaccactgatgctgcccttgctgctgatgctggtggcgcttctggtcgcgcgcctgcagccgaccctggccacggtcggcttcatcggctccctgctcggctatgcgctgcgcagcgtgctgagccaggtcgagatccagcgccagcgcgatgaactggaaacgctggcgcggcgcgatccgctgaccggactgggcaaccggcgcagcttcgatgagtcgctggatcgggcccaccgccgcgcgcgccgccagggccagggcctggcggtactgatgatcgacatcgaccacttcaaacggctgaacgacacctacggccatccggaaggtgatcggcgcctgcgtgccgtcgccggcatcctcgatggctgcctgcaacggggcgacgatctgctggcccgctacggcggcgaagagttcatcgccgccctgccctcgcccgatgccacccacgccctgggcctgggcgaacggctgcgcgcttcggtcgaagccgcagccctgcccgcccccgtggccaccgtcaccatcagcatcggcgtggcctggcaggcacccggcgaagacggcgatccgcgcggcctggtcgaacgcgccgaccaggccctgtatcgcgccaagcatgccggtcgcaactgcgtacgcggcgacaccgaaaccaaggaagaacagtccggtcgccgcgcctag

SEQ ID NO: 497230 - DNA, 246 bp, Stenotrophomonas maltophilia
atgatgcatgggcacggctatggtcgcgaagccgtggcggcggtgtggtcggcggcctcagggcgcctgcgctgtgctgcgttccgctatccggtggccgagcagaaccggtccagccgttccctcgctgagtccctcggcggacttcctgtagcacgtgagcagggcgtgaagtacacggcaatcgtctaccgcattccggctgcaatgcacggagttgcgacggacgtcgcggaatcccgctaa

SEQ ID NO: 497231 - DNA, 1089 bp, Stenotrophomonas maltophilia
atgttccctcgctttgccagccttctcttcctggccgtgtgcagcagcagcgcgctggccaacgacaccgcctatcgaccggccttccacccggaccagctgaagggaccgcccgcagggcgcccgaacgaagtgctggtgctgggcagcccgcacctgtccagcctgccggagaccttcacgccggcgatgctggaacctctgctgcagcgtctggaagcctggcggcccaccgcgatcgcagtggagaacctgtccggcctgcagtgtgacttcatgcgccgcaatccggcccgatacgccgacagcgtagcggactactgcgtcgatccggcaccggcgcaggccgccaccggcctggacgtgcccagcgccaacgtggagatggaacgcctgcttgcggattggccgaaggcgccaaccgctgcccagcgacgccgattggccgcagtgttcctggctgcgggcgagagcagctcggcagtcgtccaatggctgcggctgcccagggaagagcgacgtgcctcggacagcctgacaccggagctggtgcagttcctcgacacgcgcatggcacgccgcaacgaggccggcctggtggccggcgtcctcgccgcgcgcctggggctggagcggctgtgggcggtcgacgaccacactgcggattcgcctacaccggaatcgcagcagaaggcctacgctgccgccatacgcggtgcctgggacaattccttcgtcaaagcgcgcagggcggccgatgaacgactggaagccaatcttgctcaaccggatgggttgctcgcgatgtatcgcgcctacaacgcacccgaggccgcgatgctggccttcaacagcgatttcggcgcgacgctcgtcgaaccctcgccggaaggcttcggccgcaattacgtgggctactgggaaacccgcaacctgcgcatggtcgccaacatgcgcgacgtgctcggccagcacccgggcacccgcatgctgaccatcgtcggtgcctcgcacaagggctactacgaggcctacctcaaccagatgcacgatgtgcagctggtcagtgcggacgcagtattgcgttga

SEQ ID NO: 497232 - DNA, 303 bp, Stenotrophomonas maltophilia
atgaaggtctggaacccggttgcgatgcgggcctacgccccggccctggtcggttggtgcctggccctggcggccgggctccggctggaggaggtgcgtgaggaccgtctcgcccaggcaatgttgccggtgctgcaggcgagcgtggtggcgctgttggccctcaccctggcgtgcacggtggcagccagcctggtgctgtggcggcacaggcgccgggatcaccgtcgcgttgatgccggcactacagaggcgcagcatccatcagcaggaaccggcatggcgcgcgctggaaggcattga

SEQ ID NO: 497233 - DNA, 246 bp, Stenotrophomonas maltophilia
atgagggctgtgttgctggtcgcgctggcattgctcgcggggccggcactggccacaccggtcccgccgtccgcatggctggaacgccagcaggccgccgctgccgatgaggcggatgcggcagcggccaaggcggtcaaacccaaggagcgctgccgggtggtgaaggagtggaaggccggtgaaaccgtggcccagcaccgcatctgtgacgatccgccgaagaagccggctggaaaggtgtag

SEQ ID NO: 497234 - DNA, 210 bp, Stenotrophomonas maltophilia
atgtctgatcgcgagaccggtaccgtcaagtggttcaacgatgcaaagggcttcggcttcatcagccgtgaaaacggcgaagacgtgttcgtgcacttccgtgccatccagacccagggcttcaagagcctgaaggaaggccagaaggtcaccttcactgtcgtgcagggccagaagggcctgcaggccgacgccgtgcagccgacctga

SEQ ID NO: 497235 - DNA, 762 bp, Stenotrophomonas maltophilia
atgggttgggacatcacctaccatccagtcgcggattcggagatccgtgacatctatttccgtgctctggaggacgtgacgctggtcgaggcgctgcaacagcggttccggatcgagccgttctacatggagcagttgcaggaacgcatcgacgaggctcgctcgatcagcgccgacgtgcctttcgagaaggggcacgctttgtacctggcgatcgtggccggccaccttcggcggtatcactatctccgcgggagcgccctttcgtttttcatcgacgatccggtggtcgcgcggtatttcgcggactggcggcaactggtgccgttgcagtgggcggatgctgccgccggcaaccatctacgtgaaaactatggtggtggcgtgttcatcacgcatgcccggctgaagcaattacgcgctgattatgcagtggacagcgcacttgctgcgcgcctggaggagctgttctccgatggacgcctggtcgttttctggcgtgttgtcgatgaagcgatcgccagcggatgcggattgctggaggccagcgaggtggtcgagccgaacccgatggatctcaatgcatcgaccagcttgagcaatctgctgaactgcgcgccggatggcgcgatcctttatgcggaagccgcggcggcccagctggcggagttcgtggcagcgcacccggatatcgcatcgactgccgctgccgcgcccggtgcgccgaaacgacggtggtgggagcgactgtttcggcgctga

SEQ ID NO: 497236 - DNA, 1128 bp, Stenotrophomonas maltophilia
atgtcgcgccgcctgttgttgctcaccattgcactgctgatgttcccgcagttggcacagaccctgtacagcccggccctggccgatctggccgaacgcttcgccctgccgccgagtgccgccagccaggccatgagcctgtacctgttcggcttcgctgcaggcgtgctgctgtgggggcgcctggccgatcgtatcggtcgtcgccctgccctgctatgcggcctggccgtgttcgcactggccgcctgcggcggcctgctggccagcaccttcggccaggtcctgctggcacaggcactggccgcgctgggtgcggcggcggcctcggtggtaacccagaccgtactacgcgaccacctgcagggacccgcgttggcgcaggcattctcctggatcggcatggccctggccctgagcccggccatcggccttgcactgggcacgctgctggtcgccgcccatggctatgtcggcgtacagtccggcctgctgctgatcgctgccctgctggcagtcgcatgcctggcgggcctgcgcgaaagccgccctgcacagatcccgcacgcgcccatgctgccgctgctgcgggaactgctgcgcgatcgctggatctggtcacacgcgttgctggtgatggccttcaacgtggcgatgtacagctggtatgtgctcggccccttcgtgtttgcgcgcctgcactggccagccacctggttcggcgccagcggcgcggtgctggcactgggctcggcactgggcgcgtggggcaatggccgcctgctgcgtgcaggcgttgccgcaaccacgcgtatccgcatcgccgcagtactggttctgacgggaggcctgctggccgcgctgctgcatgatcaccctgccctgatcgcggcgatggtgccggtggtgacgggcttcggccttgccattcccaatgtgctcggccaggccctgcgcggctatccacactgtctcggcagcgcaggcgcgctgttcggcctgctctactacctgttgatcggtgcggcaatggcgctggtcggtgcagtgcagatgctggcaccgaccgttatcgcgtgtggcctgctggccttgtggctgcaacggcggcgtcccgctgcagcctag

SEQ ID NO: 497237 - DNA, 294 bp, Stenotrophomonas maltophilia
atgatcaccatcaccgccgaacaggcccgcgccaacgtcgatgccgccaagcgcccgatcgaactgttctaccgcgatctcgacaacgccatccagatcggctcggaaaatggccgccgctacatcgtgttcggcttcagccaggtgatggccagcgagcagctcgtcgaagacgtggtcgcacagctgctgaagaatggtttcggtgtcgaacggttgttgagcgattccgaacagcactacatccgcatcagctggggaactgccgcgccgtcgcgcctcagcgccggctga

SEQ ID NO: 497238 - DNA, 603 bp, Stenotrophomonas maltophilia
atgagcaacctcgatgcctggaacacggttcctaccctgcgcggccagcacgtaaccctgcagccgctgcagatggaacacgtgcccggcctgcgcgatgcgcttgaaggcagcggcctggaccagctctggtacacccaggtgccgtcgccggaacaggccgagacctatgtacgggccgcgctgcaggcgcagagcgaaggcaaggtgctgccgttcgtgatccgtgatgcggctggcggaatcgtcggcagtacccgtttctatgacatggatgccggtgtgccgaaactcagcctcggctacacctggtatgcgccgcgcgtgcagcgtaccggcgccaacaccgaagccaagctgttgctgctgcagcacgccatcgaaacgctgggctgcatcagcgtggtgctggaaaccagctggttcaacgccacctcgcgcactgccatcgcccgcctcggcgccaagcaggacggcgtgctgcgcaatcacaagcggcatgccgacggcacgccgcgcgacaccgtcatcttctccatcatcgatgcggaatggcagggcgtgaagcgccacctgcagtaccgcctggacagccacgcatga

SEQ ID NO: 497239 - DNA, 2127 bp, Stenotrophomonas maltophilia
atgaagtggctcggctcggggatgcaggcccggttcctgctggcgatgggcggagcgatggtcgtggtggtcgccatcctggcggtgctgctggggcgccagacggcgatgcagagcgaggtgcgcaccctcagcggtggcgtcatccatgagttgttcgaccgcagcgtgcgcagccgcggcgaggcgatggcacgcgagttgtccgatgcgctggccaacccgctgtattaccgcgacctggaccaggtcggcgtgctggtgcgcagcacggcgcgacagccggtggtgcgctatgtactggtgttcgacgagcgcggccggctggtgcacgacggctcggtcgaggtcccgggattcggccagccgatggccgatcccctggcacccaaggctgcggcggcgcaggccttgctggtgcaggaatcgccgaaggtgctggacaacacgatgccgatcatggttggcaaccagcgcatcggcggcgtccgcgtcggcatggcgctggacgaagtgcagcaacgcgaacaggcggccaacgccacccttggcgagcgcctgcaactggtcggcagccgccacctgggttggttgctgctgatgctggggttgctggtggtgatcggcgtggtggtgatcctgtacgtgcagcgcacgctggtcgcgccgatccgcgatctggccgcggccgcgcgccgcatcgaggccggtgactaccagacgcccctggccgagaacacccgtgacgacgaagtgggtgagctggtgcgcggcttcgcccgcatgcgcgatgcgatcgcccgccatgaccgtgaagtgcggcgcatggcctataccgacgcgctgaccgggctgaccaaccggctggcattccgcgaagcgctggaccatcggctgatggcggcgcgtgccgccaatcaccggttgggcctgctgttcgccgacatcgacgatttcaagcgggtcaacgacacgcttggccatgaggccggtgacgaggcgttgctgcagttcgcacagcgcatcggccgcgccgttgcggaggcaggcggcgacgaggccctgctggcccgcttcggcggtgacgagttcgtgatcctggtgggcgacggtgatgtggccgccaacgcgcggctgctggccgaagtgctggtgcgcgagctgggcaggccgctggtggtgcagggcagggagctgttcctgggcacctcgatcggcgtgaccctgttccccgacgatgcggccgatgcgaccaccctgttgaaaaacggcgacatcgccatgtaccaggcgaagatggccggcaagaactgctatcgctactacagccgggcgatggaccacgcggtcgaacgtcgcgtgcatatggaacaggagctgcgcggggcctgggagcgcggcgaactgcgcctggcctaccagccgatcttccgcatgcgcgaccgccgcatggtcggcgtcgaagtgctgctgcgctggcagcatccgaccttgggcacgattccgccatcggtgttcatcgaggtggccgagcagagcggcctgatcgagatcatcggtccgaaagtcctgcgtgcggcctgcatggaggcctcgcaatggccacgtggcgtggcaggcgacgacctgttcgtatcggtcaacgtgtcaccgcggcagctgcgcggcggcgaactgccggcgctggtcgcgcagtgcctgcatgagtccgggctgccagcgtcgcgcctgcatctggagctgaccgagaccgcggtgatcggtgacgagatggtcgccgcgcagctgctggacaagctgcaccgcaccggcgtgaaggtctggctggatgatttcgggaccggcttctctgggctcagtcatctgcgccaggtgccggtggacggcgtgaagatcgacaagagcttcgtggccgacatgcagcgggatcccgacgacctcgcattgaccacggcgatcatcgccatggcccacgcgctgggcatcacggtggtggccgagggcatcgagcagcaggcgcagttcgagctgctggcgcagcgcggctgcgatctggggcagggctactggctgagccacccggtcaccgccaccgaagtggtgcggatgatcgaatcgggcgtttga

SEQ ID NO: 497240 - DNA, 942 bp, Stenotrophomonas maltophilia
atgacctcccccattccctgcggtcgtttcgcgccctcgccgaccggcctgctccatcccggatccctgctcgccgccttcggcagctggctgctcgcgcgacataacggcggcctgtggcggctgcgcatcgaagacgtcgatccaccacgcaccgtgcccggcgccgccgagtcacagctgcaggcgctggcagcgttcggcctggtccacgatggcccgatcctctggcagagcacccgcggcgaggcctaccaggccgcgctggacgtgctgctggccagcgaccaggcctttgtctgccactgcagccgcagcgacctggccgccaacggcggcatccaccatcgttgcgtcgcccggcaacctcgaccggaccctgccgtccgcttccgcgtgccaccgggcagcatcgtgcacttcgacgatggcctgcgcggcccgcagcagcaggacgtgcacgccgaagtcggcgacttcgtgctgcgccgcgccgatggctgctgggcctaccagttggcggtggtggtcgatgacgccgcgcaaggagtgaccgaagtggtgcgcggcgccgacctgctcgactccacggcgcggcagatcctgctgcagcaggcattggggctggcggtgccgcgctactggcacctgccgctgctgctggatgcgccgggccacaaactgtccaagtcgctggcggcgctgccggtggacagttcgcacccgctgcccgtgctgcgccagctctggaagctgctcggccaggcacctggggcgctggaacctgcgcacgacctggatacgctgctggccaccgctcggcagaccttcgacccggcacgactgccgcggaccgacatcctgttgccagccggcgcactttccgcgccgatgttgcagaatcccccttcccccacccgacacccggacaacactccatga

SEQ ID NO: 497241 - DNA, 186 bp, Stenotrophomonas maltophilia
atgttgcgcaacaagggtttgcgtgctgcgcagcatggccatcggcaggggcggcgggtgtgcgccgccgaggccggcgcggccgccggcgcggcttaccaacccatatggtggccgccattgatgtccaggttgctgccggtgatccacgaggcttcctccgccaccaggaaggacaccccgtaa

SEQ ID NO: 497242 - DNA, 162 bp, Stenotrophomonas maltophilia
atggatcgcagcagccagctcaacgcctacgcggcactgacgggcgggctggacctggcccgttcggttcactacctcgcgctttcggcacgcctgatcgaacaggcccccgttgccagcgagcaggacaagctcgaaccctggctgcatccgcacgcctga

SEQ ID NO: 497243 - DNA, 2073 bp, Stenotrophomonas maltophilia
atgacaaacggatttgcaaaagacgggctttcccccgaagaccttgcctggcgcgtgcaggcgcgcactgcgctgcaggaacggcgctatgccgaactggatgcgttgcttgctccacatgagctggcctggctgcagggagagaatgcgctgcccggcatccgctggcggctgcgcaacctgcacgacgccacgctgacgttggaagcccgcctgcaactggcccagcagtgggcttcggccgcccccggcagctactacgcctggctttgcctgggcgcctgctggcaggacgctgccggcgaactgcgcagcgccgacgttgccgcactggtcgaagacagccagtggctggcggcacagctggcccgcgatcatgccgtgcacgcctacctgcaggcgataccgctgtcgccacgacctgcgttggcgctggatggcatcaagcgcatcaccagctacctgcgcgaaccgaactggctgcgtgcgctgcaggccgggcagcccgccgcatccgatgacgccgcgctggccgagcactaccctcaagcctggccaaaggcattgcagctgctgtcgcgcttcggtacgccgttgcagacgctgccggatacgctgcccccattgctgcgcgagcgcagccaggacgatttcgacgcaccactggcgtactggatgcgcctggtgctggagcagcgcccggacgatctggccacgctggaagacaccctgtacttcctgtacccgcgctggggcggcagccatgaggcgatggagaacttcatcgagggtagctggtgccgtggcctggaactggcgcagagcaacgcgctgcggtggcacaaggagcaggactggatgggcgatctgccccaccgtgaggatgccgaggccgtggccgcgcacgagcgcgcctacacgcagatcctcgactggcacctggaccgccacctgcgcgcgcaggtgctggcccagcgcgccgggctgcgctaccggcttggccgcgttgaagacagcgaaggcgtcgtgcagtgggatccggaccacatgcaggcggtgcttgaagatctgcagcaggcatggacattggaccgcgatgtggtcctgcatgaggggctcagcaacctcgaggcctgcacctggttcgcccatgtcgacggtgccgaagcactgttcgcacaggtggtggactatgccgcgcgcgaaggcgattcggcgatcggcctgctctgggccgccaccgccatcgagcatggcctgctcggccaggccagcgacccgacacgcgccagtgtcctgctgcagcgcgcgttgaagcttgcgcagcaggacgacacctcggcggtgacgttcgccgccaatctgttctgcgatgtctcacaggccgccggcctgtcgctgctgcagcgcatggcggacgatggcgacgccggcgcgatgtcggcgctgtgcgacctgtacaagggccgcctcggtggccgcgaccaaccgcagttcgccgatgtggaaaaggccgcctactggcaggagcgtgcggtggaaggcggcgacctgatcgccacctacaacctggccgtacgcctcgtcgccgcaggcggcgcggagaatgaagcgcgtgcgcgcgagctgtacctgcgctgcctggatgaggccgaggccggcgagcgcgtgtggggcccaacctgccgcaacctggcctgcctggcattcgatggccggaacgacgcgcacaagcgcgaagcggtcgaacgcgccttgattccactgtggtggcgcggcgacgacgacgacaagctgtgggctgccggctatctggccgacatctaccacttcggtaacggcgtcccggccaatgcattcctcgctctgacctggctgcagcgtgccagcgagatcgatccggagtatgtggacgtggtacgcatggcaccgctgatcaacggcgaaggccgctggttcggtgccagccgcgcacgcaagcagcaggaacaggaccggcagcaggtggacagcgccacttgggccctgaccttcggccagcgcagccaggacagcaacctcactgcagtctga

SEQ ID NO: 497244 - DNA, 582 bp, Stenotrophomonas maltophilia
atggcagggcgaccgcgcgaattcgacagggaccaggcgttgcgcaaggcgatgctgctgttctggcagcacggctatgaaggcacgtcgatgtcggcactggtcgaagcactgggcatcgcctccgcacgcatctacgccgcgttcggcagcaaggagcagttgttccgcgaagccgtcgcgctgtacgaggaaggcgagggcggcttcgcgccgcgcgcgctggagcaggccacgctgcgtgaggcgatcggctccatgctgcgcgaagccgtgctgacctacacccgacgtgggcggccgcacggctgcctggtggtgtcctcggccagcagcgtctcgcccgatggcgaaggcgtgcgggactggttggccagccatcgtcgccagcgtacggcggcgatcatcgcgcgcctgcagcaggcgcagtccgaaggggagctggccggcgatgtggcggtgcaggcactgggcgatcacttcgctacggtgctgcacggcatttcggtgcaggcccgtgacgggatcagccgcgagcgactgctggcgatggtcgatgtggcgttggggccgctgccctga

SEQ ID NO: 497245 - DNA, 1056 bp, Stenotrophomonas maltophilia
atgcagaccctcaagggccccagcctgcacctggcgcagttcgccggcgaccaggccccgttcaactcacttgccagcattgccgagtgggccgctggccacggtttcaaggcactgcagatcccggcctgggatgcacgcctgttcgacctggccaccgccgccgacagccaggactactgcgacgacatccgcggcaccctggctgagcacggtctgcaggtcagcgagctcaccacccacatcctcggccagctggtggccgtgcatccggcctacgatgaactctgcgatggcttcgcgccggaagcactgcgcggcaacccgaaggcgcgcagcgaatgggcgcagcagcaactgcacctggccgcccgtgcctcccgccggctgggcctgcaggacatgggcaccttctccggctcattcgcctggccctacctgttcccgttcccgcagcgcccgccgggcctgatcgacgcggccttcgatgagctggcacgacgctggcggccgatcctcgatacctgcgaggacaacggcatcaacctctgctacgagatccatcccagcgaagacctgcatgacggcaccagcttcgagcgcttcttcgagcgcgtcggtcagcaccagcgctgccgcatcctgttcgatcccagccacttcgtgctgcagcagctggactacctggagtacctggacatctactacccgctgatccgcatgttccacgtcaaggatgcggagttccgccccagcggccgccaaggcatctatggcgggtatgccgactggaccgaacgtgcaggtcgcttccgctcgctgggcgatggccaggtcgacttcaagtcgatcttctccaagctggcccagtacgactaccaggggtgggcgacgctggagtgggagtgctgcctgaaggaccaggaagccggtgcacgcgaaggcgctgcattcatccgcgaccacatcattccggtcaccgacaagatcttcgacgacttcgccggtgctccgatcagcaccgcgcagatgcagcacatgctcggcatcgcctga

SEQ ID NO: 497246 - DNA, 894 bp, Stenotrophomonas maltophilia
atgaccccttcccttcccgctggcgctgccggcgacgacgccctgcgccaccactacctgcgcatcgatggccagcgcgtgcattgcgtctccgccggccacggcgaaccggtgctgttgattcccggctggccgcagacctggtatgcctggcgccatgtgctgcacgccctggcccaggccggtttcgaagccatcgcggttgatccgccgggcatcggcgaatctgaccgccctgcccacggctacgacaccggcagtgccgccgccgtcctgcaccagaccatgcgggcgctgggccacgagcgctaccaggtggtcggccatgacatcggcatgtggatcgcctatgcactggccagcgaccagccgcaggcggtgcgccaactggcggtcaccgaagcggtgattcccggcctggcgccggaaccgggcatcttcgccgcaccggccgacaacatcttcctctggcatttcatgttcaaccaggtggccgacctgcccgaggcactcatcagcggtcgcgagcgcgcctacctggaattcatgttcgaccgctggtcgtaccgccgcgacgcggtggctgccgatacctacatcgccgcctacagccgccccggcgcactgcgggccggcttcgcctggtaccgcgcgattccggaaaccatccgccagaacaaggaacgtgcgcagcgccggctggcgatgccggtgctggccatcggcgccgagcacgccaccgccgatgcgccgatgctcaccctgcagccacatgccgatgacgtgcgcggcagcatcgtgccgggctgcggccatttcatcatggaagaagcgccgcaggcattccttgcacagctgctgccgttcctgcaggaggcacaccatgcagcttga

SEQ ID NO: 497247 - DNA, 927 bp, Stenotrophomonas maltophilia
atgcagcttgaaccggcgctgcagcagttcgtcgacgccgtggcgtcgcagccattgcccgacgacctgcgggaactgcgtgcgatcagcgagagcgcgctgccccagctgcagggcgcgccgcagccggttgcgcatgtgatcgaacatgcggtgatcgcacgcgacgggcatgcattggaagtccgcctttacacaccggaagggctgcccgatggaccggcgccggccctgctgttcgcgcatggcggcggctggttccagtgttcgctggcggtctacgacggtccctgtcgcgctttggccaatgccggcggctgcgtgattgtcgccgtgggctaccggctggcgccggaacatccgttcccggttccactgcatgacgtcgccgacgcctggcactggttgcaggacaacgccaggcgcctcgggctggacccacagcggctggcgatcggtggcgacagtgccggcggcaatctggcagccgcctgctgcctgcggctgcgcgatctcggcctgccgcagccacgccaccagttgctgatgtacccggcactggatgccggcatgggcagcgactcctatcgcgagtacgccagtggctactacctcagcgccgaactgatgcagcgttgctggcaggcctatctcggtgatcctgccacaccgccggcactggcctcgcctgcccatgcaacggatctgcatggactggcaccagcctcggtactcagctgcgagcacgacccgctgcgtgatgaggccgaacagtacgcacggcggctgcaggcggcaggtgtcgactgcacgctcgagcggctgccggggatgatccatgcctgcatccacctgcacgcggtcagtgccagcaccgacgtggcggcacattgtgccggcgcgctgctgcgccgggccctgtcctga

SEQ ID NO: 497248 - DNA, 174 bp, Stenotrophomonas maltophilia
atgaacgtgcgcagcaaccgccagaacgatccgaagcagggcgtgcaggaaagccgccaggacaggaagcaggacgatgtggccaggcagcggccggggcagcgcgatcaagaggtgcgcgatacgcattcgcgcagcccgcagcgcaaggatggcggccaggagcctgcctga

SEQ ID NO: 497249 - DNA, 843 bp, Stenotrophomonas maltophilia
atggacagtaccgccaccaccgccttcgatgcccgcgtcgaacgggtctgccgccaccttcaggcgagcctcgacgaaccttcgctgcaggagctggccgacatcgccggctgcagcccgacgcgcctgcatcgtatgttcaagcaggccaccgggctgacccccaagcaatacgccgccgcgctgcgcgccgaccgcctgcgcaccggactggaacaacaggagcgcatcaccgatgccttccacgatgccggcttcggttccagtgggcgcttctacgagaacgcaccgaagttgctgggcatgacgcccaagcaatggcgcgcaggtggtcgcggcgaagtcatccacttcgcgcttgccgaaagctcactgggcagcgtgctggtggccagcagtgccaccggcgtggttgcgatcctgctcggcgacgatccggagacactgctgcagtcattgcagcaacgcttccgccaggccgaactggtcggtgccgaccagggctatgagcaactggtggcacaggtggtaggcctggtcgaggatccttcgcgcggcgccacgctgccgctggatatccgcggcaccgcgttccagcaacgggtgtggcaggcactgcagcagattccgcgcgggcagaccgcctcatatgcggatgtcgccgcgcgcatcggcgccccgcgctcgagccgtgcggtggcccgcgcatgcgcgagcaacccgctggcggtggcggtgccctgccaccgcgtggtgcgccgcgacggcgacctgtccggctatgcgtggggcgtagcgcgcaagcgcgaactgctgcgccgggaaaaggcctcgactgcctga

SEQ ID NO: 497250 - DNA, 1026 bp, Stenotrophomonas maltophilia
atgtccgattccctcgctacctcccgtatcgtgctggcctcgcgtccgcagggcgcaccaagcgcggccaacttccgcctggaacaggctgcgctgccggcattgggggatggcgaagtgctgctgcgcaaccgctacctgtcgctggacccgtacatgcgtggacgcatggacgagggcccgtcgtacgccgcgccggtggcggtgggcgcggtgatggaagggcagaccgtggccgaggtgctgcagtcgaacgccgagggcgtaaccacaggtgagttggtgctggcgccgggtggctggcagacccatgcggtgctgccggccaaggcgctggggcgtcggctggatccggccggcctgccgttgagtaccgcgctgggggtatatggcatgcccggcttcaccgcctattccagcctgcacgaaatcgcccgtttgaagccgggtgagacgctggtggtggctgccgcgaccgggccggtgggcgcgaccgtcgcccagctggccaagctgcagggcgcgcgcgtggtcgccatcgccggtggcgaagccaagcgtgcctacctgcagacgctgggcgtggacgtggcgctggatcatcgtgcggccgactttgccgaacagctgcgcgcggcggtgcccgcgggcatcgacgtgtatttcgagaacgtgggcgggcacgtgctggatgcggtgctgccgctgctcaacgacttcgcccgcattccagtgtgcggcaccatcgccacctacaacgagcggggcatcgagcagcccggcccggaccggttgcccgcactgttcagccagatcctgcgccagcgcctgaccgtgcgtggtttcatcgtgcacgacttcaaccacctgtggccggacttcgaacgcgagatgcggcagtggctgcgcgaaggtcgcatccagtaccgcgaggatgtggtggaagggctggagaatgcgccggaggcgttctttgggctgttgcaggggcgcaacttcggcaagctggtggtgaagctggattga

SEQ ID NO: 497251 - DNA, 576 bp, Stenotrophomonas maltophilia
atggatgacgcaccttctctaccccaactgcagcaatcgctgcgacgcctgcactggctggttgccgggctgtccgtgttattgctgggcctggccgcagtcacggcctggctgctttcgcagcgcgatgccccattacacgtcgatcatttgagcacgcggcagctgcaggtactcgacgagcacggcgtggtgcgggtggagattggccaggacagcgcagaagacgggcgacgaagccgcgccgcgggcatcctgattttcgatgcttccggcgccgagcgaggcggcctgagtacattcgaggacgacagcgtcgctcttgccctggatgccccgaagggacagggcgaggaccgttggcgggaccgggccggactccgtgtggacgccgacggctccgcgcaactgctgctgaccgacaatctgacccgcggcgcagtacgcctgcattccaagggaaccggcggcggagggctggacaccttcaaatgggatatgaacagcggcacgctgcatacgcgaacgcttacctttgacggcgacgagcgcagtcaacgcccgttcgagcggtag

SEQ ID NO: 497252 - DNA, 207 bp, Stenotrophomonas maltophilia
atggtcattaccgttcaacgcaacgcccggcactggtccgtgctggatccgcaggtgcatgacgcaacccgatatgcgcggggcgccgaggctttcgatgtcgccgcggcgcgggccctcgagcaccaccgtcgcaccggccagcgcagcacggtgcgggtcgaggcgctcggcagcgcggtggatgccctgcacgtaggagactga

SEQ ID NO: 497253 - DNA, 438 bp, Stenotrophomonas maltophilia
atgcacaagctgaccgatcgcatcgaggcggcctgcacgctgccgctgctgcatatcaccgaccccaccgcccaggccatcgtgcaggcaggcgcacgcaaggtgggcctgctcggcaccgccttcaccatggaacaggacttctaccgcggccggctgcaggatcgcttcggactggaggtgctggtacccgaagccgatgatcgtcgcagcgtgcacgacatcatctaccaggagttgatcgctggtgtggtcagcgagcactcacgacaggtctatgccggcgtgatcgcgcgactggtggcgcgcggtgccgaagcaatcattcttggctgcaccgagatcatgctgctggtacgcccggaggacagtgcagtgccgctgttcgataccaccgccctgcatgcgcgggccgccgtggacacggccctggcttga

SEQ ID NO: 497254 - DNA, 768 bp, Stenotrophomonas maltophilia
atgtccgagccgaacccaccgcgacgccctctggcaaccttcctgcgcaccgccccggaaggttcgcccgtgcctgcgaccgatgcgcgcacgcaggaaccggaagaacacgcgtcgcctgccatgcaggtgccagccgggcccgccgaagcggcgcatgtggcggcggagatgcaacacgacgatgcgcctgtcatcgttgatgacattgcggccatcgcgtcggcaccggttgcagtgccggcgacgacggccgccgttgacgcgccgagtttccttggcagtgcgcgcccccgcggcctgccggcaccgcgctggcactggctgctggttgcagggctggcgctgctgctggtgctgcagagcgtgctggccgaccgtgcgcggctggccgccgacgctggcaaccgtgcttggctgggcacgctctgcggcctcctgcgctgcagcctgccggcctggcatgaacccactgcctttaccatgaccagccgcgagatccggccgctgcccggccgggccggcgtgctgcaggtgcaggccagcatccgcaacgacgctcgctgggcacaggcctggccggacctgcgcctgtcactgtccgatgctgatggccgggtgatcggcagcggtgtgttcacgcctgcgcagtaccttggcgagaaccccggcgccgcgctgctggaaccgggccagagcgcgcgcgtcgccttccgtgtgcaggagcccgccgcatccaccgtcgcattcaccttcgacttcctctga

SEQ ID NO: 497255 - DNA, 966 bp, Stenotrophomonas maltophilia
atggcctttgctccgaccctgaaaacctggttgctcgtgctgccggcggtggccgtgctgggcgtggccgggtatcgggccagcggccatgccgggtcggtaccggtgaccgcaggcgaactgccgacggcgcaggttgcggcggacgatgcggcgcccctgccggtcgtgccggaagcgttggcgcgtcgcctggcggcgttcgagcgcggcaacgcgctgccttcgggcctgccgctggacctgcgcgcggacatcgaggatgcgaccgatctgtacgcctacgcgcagcgcctgcgcgtgcaggccgacgacggcaatcacgaggcgcgctggatgctcagccgggtctacgactactgcgcgcagtacgccatcgatccgggcggttatcggttggacaacaatgtgctggccgggcttggcctgaccgctgcaccggcgatggtgcaggcgcgcgagcgcgtggcgcagcgctgtggcggcttcgtgccgggcgacaagctggggtccgcgctggtgctggccgagcgccgcaaggcagccacgcagggcaacctcgcagcggaagcatcgctgtttgccgaaggcgagccgctgaatgacagtcccgagtaccgccgtgacctggtcgagcgggtgcgcacatcgcgcgatccggaggccttcatggccattgcaccgggcatgggcgtgcgcgcggcgggcgaccaagcgctcactggcctggtggcgggagaacagctcagtgaactggcgtggcgggttgcggcctgcgagctcggtctaccgtgtggtgccgacagcgtgctggtcaacagtttttgcgcgaatggagggatctgttcgcaggatgggacgcaggatttccgggatttcgtgtatgacgctgcggtttcgcggcaaggtgcggggaaaatgaagcagtggatcaagcgattggttggaaagaggggcgggcaatga

SEQ ID NO: 497256 - DNA, 537 bp, Stenotrophomonas maltophilia
atggatcgacgcctgcccctgacgatgctgatgctgctgtcgctgttgctgttgctgccatccgccttcgcaggtgaactcagtcccagtgatgcgaaggctctgcgcgaagatgtgcgcgccatgatggctgcatacgcccgcggcgatgcggacttcctcatcgaacgtacccatcccagcctcaagcgactggccggcggcgatgacgccttccaggcgatcacccgtgatgcgttgaagaagcagcacaacgccggtgtagtgatcatcagcgaagatgtaggtgtgccgacccggacctatgctgccggagaggaagaagtctgcttcgtgccacgccaatccctgatacgggtgcgtgaaaccccaatgcgcagcaccacgttcatggtggccgtgcgccgcgttggtggttccggctggacgtatctggatggcaccgggctgcagggcaatccaaacctgcttcgccaactgctgccagcgctggaacccgacgtgaccttacccaagcgggagaccgaggcgctgtag

SEQ ID NO: 497257 - DNA, 597 bp, Stenotrophomonas maltophilia
atgcacagcctcattgtcatcgcccaccctgaacccggttcgctgacccatgcgatggcgcatcgcatcggcgatgccatcactgccgccgacgcccgcaacaccgtggcctacgccgatctgatggccgaaggcttcgatccgcgcttcaacgcccaggaccaggccttgttccgcagcactggcgcggtaccggccgacatcgccgccgagcacgcacggctggaggccaccgatacactggtgctggtgttcccgttgtactggtggtcgttcccggcactgctgaagggctggatcgaccgtgtcttcaccaacgaatgggcctacgcacaggacgcgcagggcaagctggtgaagaagctgcagcgcctgaacgtgcatctggtggggctgggcggtgccgacgcagcgatggtcgaacgacgcggctacgatgcggcgatgaagacgcagatcgacatgggcatcttcgactactgtggcgcacgcgtgctgacgtccgacctgctgctggatgccgataccggtgcggctggagcgcatctgcagaccgcgctggcgatcggccgtaaaataggcactccgatgcgctga

SEQ ID NO: 497258 - DNA, 1677 bp, Stenotrophomonas maltophilia
atggaagcgacgatggtagcggggaccctggaggatagtgtgcggcggctgcacgaagctgaaatattgaaacgatataacgtatcgccattgtgggccgccgatggcccgacgggacatccgatgactgcacgcattccacgccgctggcttcattcttcgttgctgctcgcgctggccgcacttggcggctgccagcccaacctgcgcgccgaggctgtttccaccgccgaagccggtccgctcaatgtgatcgtgatgatcaacgacggtgccggctggggtacctgggacgctgccgcctactggcagtacggcagccgtgaaggcgcaccctatgcggatttcccactgcgcctggcggtgaccacctttcccttgaacgcgagcagccagccgaccggtgacaacgcgcagacgcttggctacgacccgggcaaggcctgggatgacgcgccggttcctgcgcaggacctgccctttgcgggctaccagtacctggccgcggtggctaccgacagtgcggcggcgggcactgcgctgtcctcggggatcaagacctacaacaacgccatcaacttcaacaacgatggccagccggtcgagttcaatacgctgcgcgccaagcgcctgggcatggccaccggcgtggtcacctcggtgccgttcgcgcatgccacgccggccgcgttcgcggcgcagaacgaatcgcgcagcaactatcacgccatcgcacaccagatgctggcgcagggccacatggacctggtgatgggcacgggtggcccgggctacagcgtcgacggccgcgcctgccatgaaggtacggacgccgcgaaggcggagggctgtgcgaatccatgggagtgggtgtcgcagcaggattggcagcagctggaagcgggcagcaccatcggcggcaatccggcgggaccgtggcgcctgatccgcagcaaggaagcgttcgccgcactggcgcagggacggttgccggccgaccggccgctgatcggtgtaccgcgcgtggccaacacactgcagcaggcgcgccagctgcaggtgctgggcaaggatgcagccacgccttcgggagtgatgaagatcgacagcgtgcccgatctggcgacgatgacgcgtggcgcactgcagttcctgcagcagcgctcgtccaaggggctgtacctgatggtggaaggcggcgccaccgactgggccgcacataccagtgcgtgcggcaccgaatggcattacggccagtgcagcgatcagccgcagtatggccggctgatcgaagagaccgtggagttcaatgacgcggtggaggcggtggtcgactggatcgagcgcaacggtggctgggagcgcaacctgctgatcgtcaccaccgaccacgacaacagcatgccgatgggcccggatgcacaggacgtggctttcgcgccggtacgcaacaacggtcgcggccgcatgcccggaatcagcttccgccccaccggcaaccactccaacgcgctggtgccgctgtgggccaggggcgccggcgcggagctgctgggcaagcgcgtgcggggcgtcgatgccggctaccgtcagcacgtgcgctggaacgacggcagctacatcgacaataccgacgtggctgccgcagtgcaggaagtgctgcagcgtccacggtaa

SEQ ID NO: 497259 - DNA, 144 bp, Stenotrophomonas maltophilia
atgaacatcttcggcggcttgttgttcctgcagggccacgtggccagcgccgagctggcacgccagctggccagcccgtccgcacctgccccgcagtccgcgcggcaaccggccgcgccggttcagccgccgcgagcccgttga

SEQ ID NO: 497260 - DNA, 1524 bp, Stenotrophomonas maltophilia
atggaccgtcgccgcttccttcgtaccctgctcagcagcagtgcctgtctggccctgggcaccaccgcgctgcgcagcgctcccgccttcgccggcgacccggcgcggttcgcgcagggcatgcaggaacacccttggctgctcggctggcgcagcgtcggcagcgaaagcctcggcccggccaccgtgcagttgcagggaaagctgccgtcaggcctggctggcacgctgtaccgcaacggtccggcgtggaccgagcgcgatggcttccgctacgaccactggttcgacggcgacggcatggtgcatggctggcgcttcaatggtgatggcagcctgacccatcacgggcgcatggttgccacgccgaaattcacccgtgaacagaaggccggccgcttccagtatccggccgccggcaccagcattcccggtgcgctggcggtacgcaacaacgatgatgccaacgtggccaacacctcggtgacgatgatcaatggccgcctgttcgccctgtgcgaatccggttcggcgttcgaagtggacccggattcgctgcagacgcttggccctgtcacctggcgtccggacctggcggcgctgccgttctcggcgcacccgctgaccgaccacgacgggagcctctggaacttcggctcgatcagcctgatggggggccatggcctgctggtctggcacatcggtgcggacggccagctgcgcagcgcaaatgtgatcgaaacacccgagcatggctacctgcatgccttcgcgatgaccgaccagcacctggtgttcgtgatgatgccgttcgatttcaccggcgcaggtggcagcttcttcgagcgcatgcagttcgcaccgcagcgtccggtgcgcatcgcggtggtcgccaaggatgcgccggacaaggcgcaatggttcgaggccccgttcgcggcgatctaccacttcggcgacgcgttcacccgcgatggcggcatcgtgctgcgcgcagtgcgccacgacgacatcaacgaggcgcgctcgccgatgaaggaagcgatggccggtgatggcgcacacgcggccaacagtggcgccagcctggtcgagctgcatctggacctgcgtcgtggacaggcccgctggcagacgttgggcatcagcgcggtggagttcccgttgttcgacccgcgctcggcgaacacacgtggcgcacggctgtatgcgccgaccatcgacggcacggccactgcgccgtacttcaacgcggcggccgcgttcgagatcgagcacgggcgccgccagctctggaactacggggcggacatcatggccgaagagcatgtgttcgtaccgcgcccgggcagccgcaacgccgatgacggctggctgatcggcaccctgctcgatccggtgaaccagcgcagcggcctggccgtgctggatgcgcgccatgtggatgacggtccgctggcccaggcgtggctgccgtatgcggtgccactgggcttccacggcaccttcgccgcgcgcggctga

SEQ ID NO: 497261 - DNA, 423 bp, Stenotrophomonas maltophilia
atgatccgcaccgccctgctcagcaccgccctgactgccctggccctcgccggcagtgcccacgccgccgacctggccgtgaccgtgcacgacgtccgtgtgcagaccggcaccctgcgcgttgcgctggtcgacagcgccgctgcctgggacggcaaggccaggcccgtgcaggcccagcaggcggcgcccagcggcgacagcgcccacttcacgttcaagggcgttccggccggcagctatgcagtgctgctcacccacgacgagaacgacaacggcaagctcgacaccaacctggtcgggatgccggtggagggctacggcttcagcaacaacccgcaggtgatgcgcaagccgaccttcgacgaggcgcgcgtcgacgtaccggccgccggcaccgccatcgacatcaccctgcgctga

SEQ ID NO: 497262 - DNA, 1101 bp, Stenotrophomonas maltophilia
atgcccagcctgttccgccatctgttgcgtcccctcagcctcgccggcctggccaccgtgctggtggtgggcctgtcattcgcggtgcagcgcaacggtgccgggctgagcctgctgctgcttgccgtgttcctgctgctgttcgtggtgcacggctgggcgtcggtgccatcccgcgtgcgcgctgtcgcggcggtgttgcaggcgttgctggcggtcgtgctggttgcgctgcagccgcgtaccggcaccgcaccggtactgctggtggtgctggtggcgcagctggccgagcattggccaccgcgcttcgtgctggctgttgcactgctggccaacctcgccatgtatctcgtgctgcgccacagcggcttcagccagccgctgctggtggtgctgctctatggcggcttccaggcctttgccgcactgaccgcacactatgcccgcagcacggcgctggcccgcgatgacctggcccgcgtcaatgccgacctgctggcgacacgcgcgctgctggccgacagtgcacgcgacgccgagcgcctgcgcctggcccgcgaactgcacgatgtggccgggcacaagctcaccgcgatgcgcttgaacctgcgtgcccttgcggccgaccctgtgctggccgggcgcgaaggattggtgctggccgagcagctgtccggcgagttgctggccgacatccgccaggtggtgcaatcgatgcgcgatgatcgcggcctcgatctggccaccgcattgcacgcgctggccgcgccgttcccgcgcccgaagctgcagctgcagatcggcgagtgcgtgcgcgtggttgacccgctgatggccgagaccgtgctgcgcctggtacaggaagcgctgaccaatgccgcccggcatggcaacgcagacaccgtatggctgacgatcaacgaggaggattcccggttgcgtatcgacatccgtgacgacggccagcgcgccgaacgtatccgcgagggcaacggcatcgccggcatgcgtgagcgcctggccgcagtgcgtggccagttggaactggcccgcaccgcacagggcggcatgcacctgaccgcctgggtgccggcatga

SEQ ID NO: 497263 - DNA, 639 bp, Stenotrophomonas maltophilia
atgaacggcagcgcgatccgtgttgccctggccgacgaccaggcgctggtccgcgccgggctgcgtgcgttgttgcaggggttgggcgtggacgtggcgctggaggccgaggagggccaggcgttgctggacgcgctgtccacccagcgcgtggatgttgtgctcagtgacatccgcatgcccgggatggacggcatcgaagcagtgcgccagctgcgcgcgcgcggcgatgcgacgccgtggctgctgctgacgacctttgatgaaagtgatctgctgctgcgtgccagcgaggccggcgcacagggcttcctgctcaaggacgccgcacccgcagacctgcgcgaggcgatcgagcgcgtcgccgcaggtgaaaccctgctgctgccggtcagcaccgagccggtacgcgcccgctaccgcttccacgatgaagcaccgcccaccgataccttcggggaacgcgaggtggcgatcctgcgcttgctggccggtggctacagcaacaaggagatcgcgcgcagcctgttcctggccgagggcacggtgaagaactacgtgtccgccatactcgacaagctgggcacccgcgatcgcacccgtgcggtgctgaaggcgattaccctgcgcatcatctga

SEQ ID NO: 497264 - DNA, 372 bp, Stenotrophomonas maltophilia
gtgaacccgatcctgcatgtggaaatcccggccagtgacctggaccgtgccatcacgttctaccagcggtggctgcaggtcgcggtggacgaacctgtcgtgctgcacgactgccggatggcctacctgccgttctccgatgaggccgccggtgccagcattgcgctggtgctcggcgcggactaccggccttccgaacagggggcgcgcgtctacatcggcgtcaatgacctggatgcgagcctggagcgagcactgcaagcgggcgccgagctgtgcttcggccccgccgacgcgggcgactggcgcgtggccgagatccgcgacagcgaaggcaaccacattgcgctgcaggcgcgcgcagctctgtag

SEQ ID NO: 497265 - DNA, 2520 bp, Stenotrophomonas maltophilia
atgttcaagaacgtcctgttccaactgcactggctgctgggcatcaccgccggtgccgtattggccgtgatgggcctcagcggcgccgtgctgtccttcgaggacgaactgctgcgggcggccaatcccggcttcgccgaaatcgccgagcaccatgccgacggccagcttccgcttcaactcagcgaactggtgccgctgctgcaggccggcggtgatcgccccctgcagcgcctgcgcgtggacgccaccgggcagcggccttcggtggcacgcttcgctggtggcaaggagcactgggtctacttcgacccgtacagcggcgagcgcttcagtgccttgcgtgggcaggcgttcttcgatttcgtcgaggacctgcatcgccacctcgccgccggcgagcgcggcaagtggatcaccggcagctgtgcgatcgcgctgctgttcttcaccctgtccggtctttacctgcgctggccgcgccgctggtggcactggcgcagctggctggcggtggaatggaaacgcagcggccgtggcctcctgtggagcctgcactcggtggtcggcacctggatgctgctgatctacctgatgagtgcgctgaccggcctgtggtggtccttcgactggtatcgcagtgccgccaatacgctgcttggcgtcgcaccggccgccaagcacaaggtcgccaccggcgccaccctgaacctggagcgcatcgaagccacgctgtatgccctgcccggcgtgcacaccggctacatcgacctgcgcctgccggaaaagcctggccaggcgctcaacgtgcgggtgatggctggcgatccgtcacagcgcggtggtcaccatgaccgtgcacatgatctgctgcagctggatccggccagcggggcaatcctcgattcgcgcccctacgcgcgccagggcgccggcgcgcagctggccaccagcgtgttcgcattgcactcgggcagctacttcggcatgcccgggcgtgtcgtggtgatgctcagcagtctggccatgagcctcttcttcatcaccggctggatgctgtacctggaccgccgccgcagccagcgtgccgcgcgcgggctgcgccggtcgctgccggttgccaccgatgatggccgcgcaccttggctggtcgtgcatgccagccagagcgggctgggcgagcagctggcctggcgtgccgccgcgcagctgcaggccgctggccatggcgtgcaggtactgccattggcccgggtcgatgccccgcagctcgcgcgcactgcgcaggcattgttcgtactgagcaccttcggcgatggcgaaccgccggatgcggcacggggcgctgcgcggcggctgctggcacaagcgcccgatctgtcgggcctgcagttcggcctgctcgccctgggtgaccgccagtacccgcattactgcggctttggccgccaattcgatggctggctgctgggcaacggcgcacgtgcgctgttcgagcgcatcgatgtcgatgccgccgcgataccggcgctgcgccagtggcagcaacatctcggcgcgctgaccggcatcgccaccgatgacagcgtgttgccggccgcgacgcagatgcacgagtggcgcctgctcggccgtgaccgcctcaatccaggcagcatgggcggcgccatctggcgcatccgtcttgcgccaccggccgatgtgcagtggcaggcgggcgacatcctgcacatcgcgccccgccacaacgcgcggcacgccgctgcggtgctgaaggcacatgggctggatccccagcagccgctgctgattgacggccagccgcgcacgctgttggcgctggccagcgagcgcgagctgcccgatgccgatgctgcgctggcggtgcaggatgcgtgcctctggctggcagggctgccactgctgccggggcgcgagtactccatcgcatcctgtacggataacagtgcggtcgaactggtggtgcggctggtccatgacgaaaccggacgcaccggcctgggttcgggctggctgtcgctgcatgcgccggtcggtgccagcatcgtggcccgcgtgcaccgcaaccccggtttccatcgcgttggcggtgcgccgatggtgctgatcggcaatggcaccggcatcgcgggcctgcgcagcctgctgcgcgaagccgcgcatgcaggtgaacacgggcactggctgctgttcggcgaacgccagcgcgcgcacgacttcctgttcgccgatgagatcgaagcgtggcaggccgatggccatctcgcgcgggtggacctggcgttctcgcgcgatggtgagggcggctatgtgcaggatcgcctgcgtgcagcagccgatgccctgcgcgactggatgcagcgtggtacggtcatccacgtctgcggttcgctgctgggcatggccgaaggcgtggaccaggtgctgcgcgaagcactgggtgatgaagaagtggaaacgctgctggagaccgggcgctaccgtcgcgacgtgtattga

SEQ ID NO: 497266 - DNA, 564 bp, Stenotrophomonas maltophilia
atgaagtggcaacggccagcgctgctgtggacagcggtgctggccgccggccttggcctgtgggccgggcatcgattggctcctgcgccggttgcgcctgaggccatgccagcggcgcctgctgtggcggctgcggcacctgccctgcaggtcggcgacagcctgcccgcgctgtcgctgcccgatcttgaaggccggccgctggacctgcgccagcacgctggcggtcgcccgctgttgatcaatgtcagggccagctggtgcgcgccctgcgttgaagaaatgcccgaactggcgcgtttcgcacatatccagggcgagcacggtgtgcaggtgctgggactggcgctggatacgccggaggacgtgcgcggtttcctgcagcgggtaccggtggattatccgatcgtgatcgagaccccggggccgcgcgatgccagcgtgcagctgggcaatacacagggcctgctgccctacagcgtgctgttcgatgcgcaggggcggctggtgaaggcaaagctgggaccgttcgcccacggcgagatcgacagctgggtgaagtga

SEQ ID NO: 497267 - DNA, 2373 bp, Stenotrophomonas maltophilia
ttgaagactctgtttgcgcgtggcgccgccctgtgcgccctgatgtggctctcgctgcccgccttcgccctggatgagaaggacctgctgccggtggaccaggcgttcgcgctgaccgcgagtgcccccgaacgtggccaggtgcaactgcagttcaagatcgcgcccggctattacctgtatcgccaccgcaccagcgtcaaggccgacccggccttcaatgccggcgcgctgcagatgcccaagggcgacaagcaccacgacgatttcttcggcgaggtcgaaacctatcgcaagcgcctgcaggccaccctgcccggcacgccgaccgaggccgccggcaccatcagcctggaagtgcgttaccagggctgcgcagatgccggtgtctgttacccgccgcagaagcgcgtggtgcaggtcaccctgcccggcagcggtgcacaggccgcggcccctgccgcgcgcgccggtgcggccagtccgttcaacaacccgctggccggtgccggcaacagcggcggcctgcgcctgccaggtgcggccagcaacagccaggcgctgccgctgccgtcggaacaggcgttcggcttcgatgccatcgccagcgacggcaacgccctgctgctgcgcttcagcccggcaccgggctactacctgtatcgcgaccgcacctcgctgaagctggaaggcagcaccggcgtgcaggccggcacgccgcgctggccggccgcgcagtcgcatcgcgacgagcacttcggcgatgtctcggtgtacttcaaccaggtggaagtgccgctgccgttgcggcgcacggttgccgacgcggttgacggcaccctcgtggtgaccttccagggctgccagaccgatggcatctgctacccgccaatgacccgccgggtgaagctgtcgatcccggccggcaaggtcagcgccagcgccgaccaggcaccgccgcgcaacgaggtaatcagcccgttggctgcggcgccacgcgaaggcgccaacggcgcccccctgcgcctgctgccgacggtgcccaatacggatgccgcccccccggccgtcgcaggcaccgtggacggcaatgaattcgccgccgatgcgcgcggtgacaacgcgctgcgtacgcgcccgccggcgaccacgccgaacccggaccgttcgttcgtctgggtgctgctgctggcgctggccggcggcctggtgttgaacctgatgccctgcgtgctgccgatcctgtcgctgaaggtcctgagcctggcgcagagtggcgaaagcccgcagcgcgcacgcagccacgcgctctggtacaccttgggcgtgctggtcgcattcgcggtgatcggtgcgttgatggtgggcctgcgcgcaatcggcaacgccgtcggcatcggcttccagctgcagcacccgggcgtggtggcggcgctggcctacatcatgttcgcggtaggcctgagcctgtccggcgtgttcaccctgggcggcggcatcggcaacctgggccagtcgttggccagccgcagcggcccggccggtgacttcttcaccggtgcgctggcctgcgtggtcggcagtgcctgcgtcggcccgttcatgggtggcgcgattgcctacgcgttcattgccccgccgctgaaggcgatgaccgtgttcctgttcctcggcctgggcctggcgctgccgttcctgctgatcggcttcgtgccggcgctggcgcgccgcctgcccaagcccggcccctggatggaaacgctcaagcacgtgctggccttcccgatgtacgccaccgcgctgtggctgctgtgggtgctgggcaagcagcgcggcgtggacggcatggcgctggtgctgggtggcctgttgctgttcgccttcggcctgtggctgttcgagcgcaaccgctggaccggctcgcgtgcagtgacgctgctcggcgtgctgctggcgatcggcgcattggttccggcctggggcgtgacccagctggcaccgccggcacgcgccgcacaggccgccagcgacaacgtggtggagtattcgccgcagttgctggaccgcctgcgcgccgacaaccgcgtggtgttcgtcaacatgaccgccgactggtgcgtgagctgcaaggccaacgagcgtgccgtgctgtcgcggccggagttcaaggacctgctcaagcgcaccaacgcggtgtacatgcgcggtgactacaccaacgtcgatccgcagatcaccacgttcctggaagagcacaaggccgtcggcgtaccgctgtacgtggtgtacggccccggcgcgccgccgaccgtgctgccgaccctgctgacccaggcggtggtggaggaagcgctgctgcgcaccgcacgatga

SEQ ID NO: 497268 - DNA, 1299 bp, Stenotrophomonas maltophilia
atgctggccctggccagcctgctgctggcgacactggtcagcgtggccgtggttggctggatgcctcggcccgcgccgccaccgatgcggttggaccaggccgtgcaggtgctgcggggggaacaggccgcggcaccactgggcctgcatctggcgacgcaggatgcgccaccaaagggcagtgccagtgactggctcacccagttggcggcgctgcagatgggtttgccggcgaaggaggtgcgcctggtctggagcggacagggcaaggcgcctgatgtgcaggtcatcgaaggcggcgaggtgctcgacggcacggcgcgggtcggtgtactgaaggcgcaggccgcgctgctgaccgcgatgcaatggccgccgtttgaactgggcgtgcgccaggccgatggccgctggcgggtggtcggcagcgatcacagtgatctggcagcttggcggcgacaggtgatactggcgctgctgggcggtgccgtgttgctggcgccgctggcggcgtgggcatcgatccggctggggcgtccactacgacgcttggccgatgccagtgcacgtgtggacctgcaagccgacacgcccctgccggatgatggcccgcgcgaggtacagatgctggccgccgcgatcggcaccggtcgagagcgcctgcgtgcgcaggcccaggacatgacccatatgctggctgcagtggcgcacgacctgcgcacaccattgaccggcctgcgactgcgcgccgagttcgcgcccacaccacaggcggcccggatggtggcggacatcgagcgcatggacacgatgatcgagcaggtgctcgattacgcacgcggtgaactgcagccgttgcagatgcgcccgctggatctggccgcgctgctggaggagtgcgtgcaggcagcgttgctgcgcggtgtcgagatctccatccaggggccggacagtctgccctggcacggcgacgcgttgctgcttcggcgcgcgttcgacaaccttatcgacaatgccgatcgctatgccggggcgatggaactgcggcttgccgtggttgagcgaggggtccagctggaggtgatggatcggggcccaggtatcgccgagggcgaccgagtacgcctgctgcaaccgttccagcgcagcgagcgttctcgtagtcgcaccaccggtggagcgggacttgggctggcagtggccgccaatgtggcgaggcggcacgcgggcgaactgcagctgctgcaccgggagggcggcgggctgattgcgtgcctgctgctgggaaagttcacctga

SEQ ID NO: 497269 - DNA, 741 bp, Stenotrophomonas maltophilia
atgagcacggccattcctgcggaacgccggcaagcactcaacaccggccgcgtccccgccacccatctggcagaatgcctggcagtggattttgccgcgctgctgcaggtggtggcgcctgcgcttgcaccggaggcgctgcaacgcatgcgggacgcctcaggcaagggcatcacgctgcgcatggccctggctgcgcaactgctgcgtgaggcggggcagggggcgcctgcgctctggcagcatcacagctccgataccgtgcgcggctgggcctgctacctgatcggcagcgatgcccgcgcaacgctggcagggaagctgcagcagatgcgcacactggccgatgacccccatttcggtgtgcgcgaatgggcgtggctggcactacgcacggacatcgttgccgcaccactgcaggcgctggagcacctgcaaccgtggtcacaggaaacatcgccgtacctgcgccgcttcgcctgcgaagcactgcgtccgcgcggtgtctgggccacgcacatcgcactgttcaagcagcacccggaacatgcatccgcgctgctggaagcactggccgacgatccggaacgctatgtgcaggattcggtcggaaattggctcaacgatgccggcaagactcagccgcagtggctgcgccagctgtgtacgcgttggcagcatgagcgccacagcgacgccaacgcctacatccgcaaacgcgcgctgcgctcgctccggtag

SEQ ID NO: 497270 - DNA, 339 bp, Stenotrophomonas maltophilia
atgtcgcacaccttcatcgagctctacaccgccacccctgcctggaccacacttccgcccgagcagcggaacgccttcttcgcccgtatcggcgccggcatgcagcagttcgatccggtccgcatcacgccgctggcgatgggccgcattgcctcgggcgtaccgcacggcagcgatgagcagttctatgcggtctggcgctgcgcaagccgcgaggaggtcgacgcgttgatggccggcattgccgctaccggctggcatgagtacttcaccaccacccaggcggtaggcgcgatggacagcatggcccagcaccttgccgacctggccgccttgtag

SEQ ID NO: 497271 - DNA, 276 bp, Stenotrophomonas maltophilia
atgaatccctggagtttcgccgcgcagttcttcgacgacgacgcgatgaagaagaaggtgccagaggtggaacgggaggcgttctggattgcccgccgccatctttggcggcagccacggcacgacatgctgcgctggcatctgagcagcacggcactgacgatctggattacccgcaactggagtgccgcgcagattgccgacaccgcaaggaaggaggacttctgccgcgcatggtcgaaacggcgggcgcccggcggcccgatgaagcggtag

SEQ ID NO: 497272 - DNA, 747 bp, Stenotrophomonas maltophilia
atgaacagactgatctggttgcttctggcgctgctgcccggaagcgcgttggccgaagagggcgtgatctaccgctgtacctccagcagtagtgacgtccctaccctgcagcgcacgccgtgccccaccggcagcaagcagcaggtgctgcgcgtgcccggcccggccaacccgcagccggctgccgctgcacctgtggctgcggaacctgcacccgcccccgtcgaaacacccgcgccggtgccggccggaccggccgttgcccctgcggccccagcgaaaccacgacgtgcggacgaaggacgcaccatcatggaagcgggaatggttgaacgcgaaggtgccaaccagattctcgacagtgcgaccctgcgccgtgatgccgatgcccgtgccgaagcaggcaacggtccaccgaagccgccgcttcccccgatcttccagtgcaccgacggacagggcggtggttatctgcacgagtacgaggcatcacctggtcgctgcgaaccgatgacggtgcagggcctgggcggggtcacgccgatgaacgcggccggctgcgaagtcgtgcgcgaccgctgcgaggaacttcccgaagcacagcgatgcggcagctggcagcagcgcttccgcgatgcccgcggccgtgaacgcttcgccgcaccggaaaaccgcgataccgcgcgcggtgaacgcgagcggctgcaggcggtgttggaggccagcaactgcccggtaccggggtga

SEQ ID NO: 497273 - DNA, 1722 bp, Stenotrophomonas maltophilia
atgctgaagacccacgcgtcgcgccagacgtggttgttcgtggtggtggccctgctggtgctgggggccgggctcggtctccgcgatccgtggccctctgacgaaccacgcttcgcgctggtggccaggcagatggtcgacagcggttactggttgttcccgcatcgcggtaccgagctgtattcggacaagccgccgatgctgatgtggtggcaggcctcgctgtatggcctggttggccactggcgcgtggccttcctgctgccctcgctgctggccgcattgggcacgctgtggtgcgtggtcgatctggggcgccggctgtggacgcggcaggtcgggctctgcgcggggtgggcactgctgttcgcgctgcagttcaccttccaggcgaagaaggcgcagatcgatccgctgctggtgctgttcatcaccctggccaactatggcctgctgcgccacctgctgctgggcccggcctggcgctggtggtggctgggctggttctttgccggtatcggggtgatcaccaagggcgtgggcatgctggcgctgctgatgatcgtgccggcggccatcgctgcagccctgcagtggccccgtgtttccctgcacgcgcgcgatggccgcttctggctggcaccgctggccttcctgctggcgatatcgctgtggctggcgccgatgctgctggccgcgctgggcaccggatcggacgagtaccgcggctacatcaacgacatcctggtgcggcagacggcccgccgctacacgcagtcctgggaccatcaccagccgtggtggtacttcttcggtgtcatgccaacgatgtggatacccgcgttcctggcgctgccatgggcgatcccggcgtggcggcggcgcctgtgccgccgcgatccacgctacctgctgccgctggcctggtggttgctggtcgtgctgttcttctcgattccccagggcaagcgtgatgtctacatcctgccggcgctgccgatgttctgtctggcgctggcgccgctgctgcccgggctgctgaagcggcgcgatgtgcagcgcgtgctgggagggtttgccgcgttgctggcactgggattgagcttggtcggggcgctcgcgttgctgggtgatccgcgcttcgaggtgaaccttgcccatggacgcggattgccgccgggcgcgaccgatgcattggcgtggacggcgctggcgatggcgatctggtcggcgttgagcctgtgggcgtgcgggcgccgacgtcggcacgttgccttggtctctaccctggccggggtatgggtgctgtatagcctggtcggttatccggtgttgaacgattccagctcggcccgtggcctgatgcgtgaggtcagcgcacgcatcggtccgcaggccgagctgggattggtggcatggaaagagcagaacctgctgatggccgatcgcgcggcggccacctttggattcgaagcgcgttggcatcaacagctgcaggcggccgtgcgctggcagcggctggttccgcagcaccgctggctgctggtgaacgaagatgcgatgcaggcctgcattgaccgtgcgcaggccgaaatggcaggcatttccaatcgtcgccgctggtggcttgtgcctgccgatgcggtcgccggcacctgccggccgtcggcggcggaactcgagcacgagcgccgcctgcaggggcccggccttaccgattaa

SEQ ID NO: 497274 - DNA, 1122 bp, Stenotrophomonas maltophilia
atgaaaatcctgtacaccaacttccactatggcgacggtggcggccacaccacgtacatcgtgtccctggcgcgcgccctgcatggccagcacacgctccatgtcgcagcccccgctgacagccgcctgctgcgcacggtggccgaggaaggaatcgccaccccgctgccgatggcctttggcagcggcctgccgaccttgccacgacaactggccgaacagcatgcgctgcgccggctggtgcgggacgagggcatcgacctggtccacgtcaacggtgctcgtgatcaccgcttcgtgatgcagggactgctcggcatgcgccgcccgccgatcatcctgaccaagcacaacagcaagcccacccgtacgcttggcaatgccttcagggcccgctgggccaccgaccgcgtgattgcggtttcggcacacaccgggcgtctgctggagcagggcccgtaccggcgctgcccgatcgatgtggtccgcaacggcgtcgacctggaccgcttcgcgccgctgccggccgacgccggccaggcaatgcggcagcaatggacgcaggacccggacgcgctgctgctggtcagcaacgccggcaccgatgactacaagggctggatcgaccttgcgcaggccattgccctgctccccgacgcgatccggccgcacgtacacatggcggtcgcaggtcacctgcccaacgcgcagcaacgcgcgcaggtacaggccctcggcgatgtcgccgcgcaggtccacttcaccggcctgctggccgatacgcgcccactgatcgccgccggcgacgtcggcttcgtgctgtccaacgacatcgaaacaatttccttcgcctgccgcgaaatgatggccagcgccaggccgatgctggtcagcgactacgcggggctgccggaaaacatcgagcagggagtcgacggctgggtcgtgcccacccgcaacgtggccgccatcgccgcacaggtgcaggcgatgtatgaacaacgccaggcgctgccggcgatgggcatggccgcccgccgccatgcagagcgtgagttcggcctgcagaccttcgccggggcgaccctggccagctatcacgccgccttggccagcacctga

SEQ ID NO: 497275 - DNA, 1215 bp, Stenotrophomonas maltophilia
atgctgactgacaccaagttgcgcgcactcaagcccagggaaagtcccttcagggtggctgacgccaatggcttgtgcatcgaagttcgtccatcaggcgctaaggtctggcgttaccgctaccgccacctgggcaaggcaagcatcgtcactctaggtgagtacccttcgatgcccctgcaggctgcccgagccgagcgggatcgtctacgtactcagttgcgcagcggtgcaaaccccgcacagatggccaggatcgagagagcagtgcagggggagcggtctgccaacactttcagtgccattggccttgagctattggccaagcggacgaaggaagggctgtctcctggatctgtcttgcgggagcgaaggttgatcgagaaggacctggcaggtctggctgacttgcctatcggtgacgttagtgcgcccatccttttggcggcgcttaggaagcttgaacagcgaggggtcgttgagacggcacacagggcaagggcgcatgccggcaggatcttccgctatgccattgccacggggcgagctgatcgaaatcccgcacaggacctcacaggtgcgttggagcaaccaaagaccaagcacttcgccagtgtgaccgagcctgctgcaatcggtgagctcttgcgcgctctctggggctaccagggggcctttgtgacgcaggctgccctcaagctggctccaatgctgttcgtgcgcccaggagagctgcggcaggccaaatgggctgacatcgatcttgtggctgccgagtggcggtatgtgaccagtaagacaaagacttcgcacatcgtcccgctttccagacaggcggtggatgtcttgcagggcctctacccctacaccaagcgcagtgagttcgtcttccctagtgtccgtactgcccataagccaatgagtgagaacacgctcaatgcggccttgcgcaacctgggctttgattcggacaccatggttgggcatggatttcgtgcgatggcgcgaaccgtactggatgaggtgcttgggtatcgccctgactacatcgagcatcagttggcgcatgccgtaaaggatcccctcggtcgggcctacaaccgtgccacccatctgcccgagcgtcggaagatgatgcaggcttggtcggactatctggatcgcctgcgcgaagaacagcccaaggtttccccgtttctcgctaagcgcgcataa

SEQ ID NO: 497276 - DNA, 3624 bp, Stenotrophomonas maltophilia
atgaccattcgctcactcttcgacccaagcaaggacatctaccggaccatcgagaaggtcatcacctatggcgcctcgcaagaaggccgcctcaaggctgagatctccgagtacgtggtcaccgagagcattgaggagcagtttcgcaagctcctcgatcgcatgcagctcgcgatggagtccggtggcgagaatgaggtgggcgtttgggtctcgggcttttacggctccggtaagagctcgtttaccaagtacctcggcttggcgtttgatgatcagcgcaccatcgacggcactccgttcatcaaatacctgcaggaccgcctgcacaagccgcagaccaaggctctcctcagcaccgtggcgcagcgcttcccggccgccgtggtcatgctggacctggccagtgaaatgctcgccggcgccaccatggaagacgtctccaccgtcctctacttcaaggtgctgcagtgggccggctactcgcgcaacctgaaggttgccgcttttgagcgtatggtcgagaaggacggccgcacgcccgaactccatgagcgcatcgcccaggcgctaccaggtgccacctgggctcgcgtgcagaacaacccactggccatcgatggcttgatcccgaagatcgcccatgagatgtacccggcactcttcccggaggccaagtcattctcgtccagcaccgaaggcttcttccagttcgaagaccagcgcgtgcaagagatgatcgacatcgtccgcgagaagagcggcaagcagaacatcatcttcatcgtcgacgaagttgggcagtacgtagcctcgcgcgacaacctgatcctaaacctcgatggtctggccaagaacctcaagaggctgggcgatggcaaggcctggatcatctccactgcgcagcagacccttactgaggacgatcctcgcgcagcgctgaactcggacaagctctataagctgaaagaccgctttccgattcagatcgacctggaatcgagcgacatcaaagagatctgctaccgacgtctgctcggcaaatcaccggctggcgagactgagctgggcaagctgttcgaagcccacggccaggcgctgcggcacaacaccaagctgcaagacgccaagtattacgacgcggacttcagcaaagagagcttcaccaatctctacccattcctgccggctcacttcgacatcctgctgcacctgctgggtgcactggccaagtccactggcggtatcggcctgcgctctgcgatcaaggtgatccaggatgtcctcaagggtgaaggcggctccaaggccatggccgatcagcccgtgggctggctcgccaccacggtcaccctgtacgacgagctggaaaaggatatccgccgcgccttcacgtctattcatcaagcggttggcaaggtccagattcgcttcccggattcgcagctccatcaggacatcgccaagtccgtcgccgtgctgcagattctgggcaacctgccggtgtcagtgcagaacgtcgccagcctgatgcatccctccgtcacagcagcttcgcagctcgacacggtcaagaaggccgttgaagaaatgctgggcgacgtgcatgtgccgctgggcgaaaaggatggcagcctggtattcctcagcgagaagctgcgagatatcgaacaggagcgcggcgccattgcactgcgcactgtcgacgtgaaacgcatcttcaacgatgcactgcgtgagaccttcgatccgctgccccgtgtcaccctccacggcacgatggccgtcgcaacgggcctgaaggtccaggccggcagcgccatcaccagtctggccggtgatcagagcaccatccagaccgttgtcgagttggtgcctgccagcgactacgagaccgccaagaaccggatgctggatgactcccgcagccgcgcgggccggaatgtcatcgggctcttggctcgcgccaattccgaactcgacgatctggcaaacgaaatctatcgctgccagcgcatcgccgaactgcaccgcaacgagcccgaccaagaggtcaaggactactgcaccggccagctcgaccgcgccgccaagctagcgacccaactgcagagcaagatcaagcaaaccctgcaagcgggctcgtttgtcttccggggccaggctacggcggtatcggcgctggatgctgatctgttggaggccgccaagaagctgctctccgatgtggccgaccaagtcttcgaccgctatgtcgaagccccagtacgcgccggaaccgacaccgccgagaagttcctgaaagtcgccaaccccgcagccatcagcagtgcactggacccgctcggtttggtgcaaaccgtggccggtcgtgcctcgttcaaaaccgaccataaagcgatgatcagcatccgcgactacatcgacaagcgcggcacggtcgatggcaagcgcctgctcgacgacttcagcagcgccccgttcgggtggtcgccggacaccacgcggtacatagtcgcggccatgcttatggctggagagatcaagctcaaggtctcgggacgcgaagtcacggccgctgggcaacaggccatcgatgccctgaagaccaacaactccttcaagcagatcggcgtggccctgcgcgacgagcgcccgtccatcgaaatgctcggtcgggcggcagagcggctcactgaactggtcggtgacatggtgatcccgcttgagcaagagatcagcaaggcggcggccaagcacttcccgcgcttccagcacgattacggctccttggctgaaaagctcagcggccttgggctggcgggtagcgaacgcatccgtactttgaaccaggacattgccgatgtcctgttcaccgatgcctccgacgccccgcagcgcctgggtgccgaaacctccgccatttacgacaatctcaagtgggccctcgaagtgaagcgggtgctcgacaacgggctcgacgccaccctacgtgatttgcaagctcatcgccgcgacatcgaggcattgccggataccggtgtgccaggggagctgcgccgcgaacttgccgaagatctgggaaccctgtcagagcgcctgggcaaagaagacttctacaaacacaccgccgacttcaattcgcagctcacccatctgaagggccgcgtgcgcgatgcggtcatcacgctctccgaccagcaaaaactgcgtttgaaggaaggtgtcgaggatctgcagcgcatccccgagtgggaagagctcacccaggaggagcgcggcaacgccgtgaaccggctggacggactcgccctggctgctacacaggatctggccggactcaagaagctactggcccgcgactacgacatcaacagcactctcgaagaccttaagcgcttcattcaacgccagggtcaggaacggcttcgccagcgcatggaagaagagcgcgccaagaccggcggaaaaggaccggtcaagctcaccaagtcaattgccgtgccggtgaagatgacctctgcggcagacatcgacgcgctgattcaacagctccacgagatcaaggctcagctcgcgctgtatgccgagatcgaagtgtcatttgcgctcaaaggagagtga

SEQ ID NO: 497277 - DNA, 1332 bp, Stenotrophomonas maltophilia
atgctcacggccatcactttggaagacttcaaaagctaccgacaggcaacattaccgctgtctgcactgacggtactgatcggtgctaatgcctcaggtaagagcaatgtcatcgaatgcttgcgactcttgtcctggctggctcaagggcaaaaactttcggctatccggtttgctgtgcaaagcggtgatcaagtcgtgcgcggtaagcttgaggatttggcttatcaccgtggcgagtcctttggtttgggcgcgtatacgaatgccaccgagtggaatcagctcagtatgcgaattggccgccgcacggatggtctgcatatcacagaggaaaccctgactcacacaggtgcttctgtgccgctgtacacaatggatcaaccctcaaatggccagggcactgacgccagagtggcgtacaacaacttcgcaaaaggcggcagaaagccacgtgtgacgtgcactgaccaagcggcaatattcacgcagctaacgagcccagctactttcgacgcggcgcacaaaacatcgcgagagcgaattcctccgattactaaagacttggagcaattgcttgctgccattctttttctcgatcccgtgccagcacaaatgcgtgagtatgcgtttccctctgacaaagacttgcaaggcaacggccgcaacgtctcggcggtgttattcaatctgtgggggcgtgaggaacaagctcagaatgagcctcatgccagcaaccgtgtcgccattctaagtttcattcagagcttgcccgagcaagatatcgccggcctgtccttcctagaggagccgcgcggtggcgtgatggttcagctcaccgagacctttggtggcaggacagatcagcgagatgcttctttgctctccgatggcaccttgcgcgttctggctattgccgctgcgatgttgtcagccccggaaggcagtctggtggtgatcgaagaaatcgacaatggcgtacaccccagccgggctcaccacctgctgcaacaaattcaaaacatcgctagccagcgcaacctgcgcgtactgctctctacccacaatccagccatgctggatgcgttgccggacagtgctgtacctgatgtggttttttgctatcgccaccctgaagacggcgccagccgcctggtgcgcctggccgatgttcctgactatccagaactgatagctcaaggcaccctgggccacctgatgacctctggtgcgttggagcgcttcgtcaagtatcacccaacgggtgatgcacgcaaacagcgtgcgctggattggctggccaagatgcgttcgggagccagcaatgagtga

SEQ ID NO: 497278 - DNA, 486 bp, Stenotrophomonas maltophilia
atgagtgacatcgtcttgctggatacgtcggtgtatctgaatgttttggacgtgccaggcttcaatcaagatcgaggcaacatcttggacgaatttgtagtccgggttgagcaaggcgattatttccttttgccaatggctaccatttgggagactggtgatcatattgccgacctggccgatggccgtctgcgtcgccagtttgctcagtcactcgtcgagcaagttacacaggcgttcaataacaaggcgccctttagaacaacttattttcccgatagcgaagtctttctacgctggcttggcgatttccctggctatgcgcaacgcaataagtcagaccgtcaaactcgtgaaggcgtcagcctcagtgacctctccatcatcaaagaatgggagcaaactcgcgaccgccatgccatgtcgcgtgtgttgatttggtcgctggatcgagatctcgccgcctacgatactggagcgcgctaa

SEQ ID NO: 497279 - DNA, 1329 bp, Stenotrophomonas maltophilia
ttgatagcgctggcgttatttaatagtcaagcctttgattatctctttaaggttgctctaggtcgctttgggttccccgagtttatcgtcggtattttgcagttgcttccctggccctcgattggagatgcacaatcatctcagctggcaagattgtcgtgccgcgcctggtccctcaagcgcacattggacaccatcgaagagacctctcatgcgtttgcgctgcctgccgcgctgcgctctcgcctgggcgattacgaccctcccgctattgaagcagagcttgcccgcattcaggctgagatcgacgccatcgccttcgacctctatggcttttccgataccgaccgcaccgccgtacaggccagccagggggcggcgagcgcagcggacgaactcctcgacgaggaggccgacgacgaagaccgcgtagcgccgggcgaccacacggcgggcctgttaagttggactgtcggcgtggcatttggccgtttcgactggcgcttggccatcggcgagcgcgccgcacctgccgagccggaacccttcgagccactgcctgccaagagcccaggcatgctgccgggcggggccgcgcccttccatgtgcacgaaggcatcctggtggacgaccaagggcacccgcatgacctcgcgcgtctggtggaggaggtattggctcgcgtggatatcgcggtgccggaagacgtgcgtcgctggctgcaacgggatttctttgctttccacctgcagcgctacaccaagagccgccgcaaagcgcctatctactggccgctgtccaccgcatctggcagctacacgctgtgggtttattaccccagcctcagcagccagacactgtatacggcgatcaacgacttcgtcgaacccaagctcaaacaagtcggcgctgacgtgacggctctgcgcaacaagggttctgctcggacccgtgacgacgaaaagcagttcgagacgttgcaagctttcgagctggagttgatcgagctacgtgacaccctgctcaagctcgcgccaacctacaagcccaatcacgatgatggcgtgcagatcagcgccgcgccgctgtggccgctgttccgccacaagccctggcagaaggtgctcaaagacacctgggccaagctggaaaaaggcgactacgactgggcgatgctcgccatgaactactggcccgagcgcgttcgcgagaagtgcaagaccgacaagtcgctcgccatcgcgcatggcctggaggatttgtacatcgagcccgaggtagcgccgaagaagacgcgcggcagaaagaagaccggaggcgatgaatga

SEQ ID NO: 497280 - DNA, 642 bp, Stenotrophomonas maltophilia
atggccagcaccgataccccggtggaagacttcaccaacgaaatcgaagacagccggcacctgtttgcctggtgcctggtccactatggacaggtgcccgaggcgctggcacttgaacaggcacgccaacgctatcccgaccagagccccggccgcgattacgaacacgcgctgatcttccacgacgagccctggcattgggcgatgctgcaggtggcgggggaaggttattggcaccggcgcccggaactggcgcagccatcgctggactacgaagccgaatcggacgcactgtgcctggcccgcagtgagcgggtcccactgctggatgaggacgagtaccttggcgcgctcgcgcatgcgcgccacatgcgtgcatggacgctggtccatcagacgggtcgttcgccggatgaagcgcgccaggaggcgctcggccactacgcgtatcatccgcgccatcatcgcggtcgatttcaggttcatgatccgcgtgatggctggcgtcatgtgatgagcgtattgaatggcgacgattactgggcgcgaccagagttgcgggaaccgccacaggcctattggaacgagtcccgcgcctttgtttcggcgcagggaatccgcttgccggaccctccgggctga

SEQ ID NO: 497281 - DNA, 1719 bp, Stenotrophomonas maltophilia
atgcctggtacgctcagtcgtcgcaccttcctggccaatgccgcggctgttccggcggccacgctcatgcctaccggtgttgccacggcggcgcagcccaccgtcaccaccgggaacctgatcgaagcggagcgcggcgtgatccgctcggccatgcaaggcagcggcatcggtgccgctgccgtctgcctggtcgaaggcgggcaggtgcgctggactgaaggcttcggtcacgtatcaggccagggtagcgcggccgcggacgccagcacgatgttcagcatccagtccacctcgaagaatttcgcggcggtggcggtgctgttggccgtgcaggacggcattcttgatctggatgcgcccattgcccgctatctgccgtcgttcaccgtgcgcagtcgcttcgagcattccccgcaggagcgcatcaccctgcgcctgctgcttgccaaccgcgcgggattcacgcacgaggcgccgctgggcaacaattacgaaccggcgtcaccgggctttgatgcgcacgtccgcagcatctcgcagacatggctgcgctttccggtgggtacgcgctatcgctattccaacctgggcttcgaccttgccggtcatgcccttgagcaggttgcgggcatcggctatccggcctggctgcagcgccggatcttcgagccactgggaatgcacgacagtacggccgatgcgtcggtctacctggcaagcaagggtcgggcactgggaacccaggaaggccatgcgcaggtgccgccggtgacgccgctggtggtgtcgggaggcgtctggaccagtgccgccgacatggcgaagtatcttggcttcctgctcggtggcggccaaaccggcgcgcagcagctgctcgagccccatctctgggacgagatgcatggcttcggcctgggtggtgactacgggctcggcgtaatgcgcagcgaacggctctacggcagtacaccggtgcggctgctgcaccatcgcggcggaggcttcggattcgggtgcgtgttcacctactgcaggcaggccaacgctggatttgccgcgatgttcaaccgcgcgacgtccgcggggtacggcatcggcgagcgtctgctcgaccaattgctgtcggcgcgtttcgggccccgtcagccgcgtgtgccgctatcgtccctggcgccgatcaggttgaaccaggaccagatccagcggatggcgggagactggatagggcgcagcggcaaggcgaagatcgtggttgccggaagcggtgaactgcaactgcatcgtggggcgcaagctgtgggcagacggtttgcggccatcgacgacgaccaactgttcaccgcggacaccgatggagaggttgcgacgtaccgttaccatgcggcgacggagaggctgccggcgcacctggaatgtacgaacggcgaggatggcctggaccagaacgatcccatcgatggggccacagggccgcaggcgtcccattggcgaccctggctggggcgctatcgcatcgaccaatgggggaaaccggcgatgtccgttgtactggagcagcgacagggctggctgtacatcgatggcatccgcctggtcactgaagtggagccaggcctgctgttcaccagcgatggcgaagcggtggatttccgcagctcccagccgacatggcgcaacctgcgtctgcagcgcgtccagcccgtgggccagggatga

SEQ ID NO: 497282 - DNA, 420 bp, Stenotrophomonas maltophilia
atgacgatcgatattgaatcgctcagccttcgggagctgggcgccttggtggttgccgctgaacagcggaaacagctcatttccagccgccgtccggccagcgcggtgcggcggatgttgaaggctgccgcggccgaagccggctacaccctcgaagaactcttcggtggcgaagcttcggaaacacctgcgcccgcccgcaaacccacccgccgtaaatccggcaaagtcgcgcccaagtatcgcgacccggaatacaagcgcctgacctggaccggtcgcgggcgcatgccgcgctggctggcgtccaaggtgtcgatgggccacaaggccaccgatttcctgattcctggcttggccaggccgaccgctggcaagaccagcaccatcggcaagcggactgtcatcaagaagggatga

SEQ ID NO: 497283 - DNA, 408 bp, Stenotrophomonas maltophilia
atggcacacgagggtggcatgacgatcacgccgaaagtcctgtacacagccgcaggcgtggccgtgctggtcagcctgttggcctgggcggtggagtggagcgggatggcctatgtctgcccatactgccgcgtacaacgcactgtcatcggtgtgctgggcgtgctgacattgttcgcgcggccggggagcctcatcgtgccctggttgtcgtacacagcgggcggcttcgcgttcgtggttgcagcgatgcagcacttcaatggctggaagcgcatttccgccggcgatttcagtttcaacgcgcagtggtacatcgacccgtggctgctgtcaggctgcgcgatgctgatcctggtagcgcagctgatgctggtgcaggccgcctgccggcgcagcctgcgctga

SEQ ID NO: 497284 - DNA, 642 bp, Stenotrophomonas maltophilia
atgtcccccatcctcaccgcctttgccacctcccccgaccgcggccagggcctggcccgtgacatgcgcgtgcgctgggcgctggaggaactgggcgtgccctatgacgtgcagctgctgaccttcgccgaaatgaagcaacctgcccacctggcgcggaatcccttcggacagattcccacctggcaggagggcgaccaggtcctgttcgaatccggcgcgatcgtcctgcacctggccgaacagcatgccggcctgctgcccgtcggtccggatgcacgcatgcgcgcagtcatgtgggtgttcgccgcgttgaatacggtggagccacccatcgtcgagcgctcgatggcctgggtgctggagcgcgaacagccctggtatgcacagcgattggtgatgctggacgagcgcgtgcggatgcgtctctcacaactgtccgcgtggttgggcgcggcggcgtggctggacggcgggttcagcgtgggcgacctgatgatggtctcggtgctgctgcgcctgaagagcagcggcctgctcgacgagtacccgctgctggtggcctatgtggcacgggcgacgcagcgtcccgcctatcagcgcgcgtttgctgcgcagttggcggtattccagaacgggtag

SEQ ID NO: 497285 - DNA, 951 bp, Stenotrophomonas maltophilia
atgtcctcgatatgcgccaagcgtacgctggccattcccccacgtacacccacgctcttgaactacctcttcccaatccttgcctgcctgctgtggggcgcgaataccatcgtgaccaagctggcctcgggcgcggtcggtcccatcgatattggtttcttccgctggctggtggcggccattgtcctgttgcccttcgcgctgccgcggctgcgcaacaacctgcagaccgtgcgtgccaaccttggccgcttcctgctgctggggtgcctgggcggggtgatgtaccagtgccttgcgtactatgcggcgcacttcacctcggccaccaacatgggcgtgatccaggcattgattccactgctcgcattggcgttgtcacgcgtgttcatgggccatccggtgcgcggtacctccattgccggtgcggtgatttccactgtcggggtggtggcggtggtctcgcagggcgacctggtacgattggccgctcagggcgtgaaccgcggtgatgcgatcatgctgatcggtgcgttggcctttgccgcctacaacgtgctgatgcagcgctggaagatcccgctgacggtgctggaatcgttgttcctgcaggccaccgccgcgtcgctgatcctgttgccggcgcagctgctggtcggtaccggggtgaacaatctcaccgcggtcggctgcatcgggtttgcggcagtatgcgcgtcgatcctggccccactgacctggatgaccggattgtcacggttgggcgcagcgcgtgtctccggcttcttcaacctggtgccgatcgtgaccgccgcactggccgtgctgctgctgggcgaatcgctcagtggctgggtactggcagggggcgtgctggcggtatccggtgtggtcttcgccgagtacgcagcgaagcgcgcgacgatggcgagtgggggcgaagcgtcctga

SEQ ID NO: 497286 - DNA, 1029 bp, Stenotrophomonas maltophilia
atgacaacggcagtacacagtggcttgaccgatctggtcatggatgcgcagcgctacctgcgccggatcctgcccggcctggcctcggtggtcggccccgtggctgcggcacgcttcatcccgcagaccatggcctcgcgctatcacatcgccgagctgaccctctatggtgaaacgccggcgatgctggcagttccacgcgtcccgggcgaatccagcagccgcgtcatccaggatgtgaaagtgctgcgctcagcggcaaaggccatggtgctgtatgtctcgccgtacctcacccccacccagcgcaggttcctggtcgagaaccatatcgacttcgtggtaccgcacaaccagctgtacgcccccagcctggcgatcgagttccgcgatgcgcccgaccacgagaagaaggcgatttcgctgctgccttcggcgcaggccgtgctcatccacgtactcctgtccggccaggcacgctggtggtcaccgcgtgaggtcagccgtgctgccggatacacctcgatgaccgcgtcgaggctctccgctgaactggtcggtcgcggactggccgaacgctccaccggcggacgcgaacgcttcctgagactcgccggcagccgcggcgaggtctgggcgagagcgcagccgttcctgcgctcccccgtgctgaaggaagtggaggtctgctgggaacaggtcgccgacgttctggcccgacatgctcaatccgccccccaggcagggacggaagcaatgcttgcggtgccgtcgaaagaccacggcatcacgcgcgccctgtacatcgatgcctggcggaagctgggggcactgcctgcagccggccccgactgcacgcgcagtggaacgttgcagatatggtcgtatccgcctgccttcaccggtagcggtgaccgcgtggacccgctgtcgctgtacctgagcctgcagggcaagcgcggctacgacgccgacgcgctggaacaggaggtggagcaggcgctatgcgggacgacacgccgcggctga

SEQ ID NO: 497287 - DNA, 2835 bp, Stenotrophomonas maltophilia
atgcactacaaatacactctgctttcggcagggatcggcgccgtgttggctgccgttttctcgccggctgccaatgcacaggacgacgctgcgaagtctccgaagaacctggaccgcatccaggtgacgggatcggcgatacgcagcgtggatgtggaaacccagcagccggtgcttgccatctcgcgcaagatgatcgagcagcagggcttcaccaccatcgccgacgtcctgcagaacctcacgtcggccggcgcaccagcgctctcgcgttcgcgcacgctgtcgtccggcgaagacgtcggcggcagctacgcaaacatccgcaacctcggcgccacccgcaccctggtgctggtgaacggcaagcgcctgggcgccagcaccagcggcctgcaggacctgagccagattccgatgagcgcggtcgagcgcatcgacgtgctcaaggatggcgcctcggtgctctacggatccgacgccatcgccggcgtcatcaacatcattacccgcaagagcgtcgaggggctggagctttcggcgcagcatggccagttcagccagggcgacggcaaggacagcacgttctcgctcgttaccggcgcgcgcggcgagcgaggtggctacaccttggccctggaataccagaaggccgacccggtgttcgcccgcgaccgctggttctccaagcatggtggtgcggggccgggttatccgcgcgcgggctggagcgacctcagccagaacggctcctggtgtaacccggcgctttacgactgtgccaccggaaattccgtgttcaagacactcaatcgtggtggcgacccgaagaacccgaacgattaccatccgatcacgccggccgagtattccaacggcaacgagcagatgcatgtgcagaccggcatcgagcgccggtcgctgttcctcagctccgactatgcactgagtgaccagatcaccttcaccaccgatatcggctacaacgagcgcatctcggaccagcagattgccggctacccctacgaatcgaccaagttcgggacgccgctggccggcaacagtgcgttcaatccggtcggccatgacatcgccttcaaccgccgcctgtgggagcttccgcgcacgaccgaaagcaagctgaagtcgctgcgcgtggcaccgacgctgtcgggctacttcgaactggccagcaaaacgttcgactgggaggtgggcgcgctgttcaaccgcaacgaggtgaccaagaccggccgtggtgacatgagcctgatcgcctcgcgccaagcgctgggacagtcctttgttgatggcaacggtgtagcacgctgtggcagcgcaggtgcaccgatcgccggctgcctggcctggaatccgctgctgccgtacggcgttgctggcgccggctcgcttgccgacccggaactgcagcgcttcctgttccccacgttcaccgataccggcatcaccaagacccgaagctacttcgccaacatctccggcccggtgctggaactgccggcgggcgagctctcggtggcgatgggctaccagtaccgcaaggaagaaggacgctacgttcccgacgcctttggccagtcgcgccagagcactgcactgggggcacagaccactgcaggcggttacagcctcaatgaagtcttcgccgaagtgaatgtgccggtgctgcgtgaccttccgttcgccaaggagctgaccgtcaacgttgcggcacgctattccgactacagcaacttcggcagcaccaccaacaccaaggccagcttcgcctggcgcccggtcgaggagctgatggtccgcggcaccttcgccgagggcttccgtgctcccagcatctccgacctgtatggcggcctgggcaccagcttcgaaacctacgtggacccctgcggcatcggcgccaccaacagcgtcaacggcaacgcggcctgcaacgccgccggtgttccgcgtggctacgagcagctggcccagggcctgaagccctgcaccagctacccgtgcgccaccccgaacgagttcaccacgggctcgaacccgaacctgcgcccggaagagtccaagagcaagaccgtcggtgtggtctggagcccgcgctgggtcaacggtctggacatcaacctggactggtacagctacaagatcaccaacatgatcatcgaggacaacgtcgatcgcatcctccgtgactgctacgtgctgggcaatgcctcgcgctgcggcagcgtcaagcgtgccgctgatggccacatcaccagcatgttctacggcctgaccaacctcggcgcgatgaagaccgaggggtgggacctgggcatccgttaccgcctgccggagtacgcgttcggtcgcttcacccttgacctgcagaacagctacgtctccaagtacgacgaggagaagcagaactcggccggtgacaccatcatggacggtcgtattggacgcccgggggtgttccgcctgcggtccaatctcggcgtcaactggcagctgggcaacctctcggcccagtacacggtgcgctactactccgggatgatggaaggctgcatgccaaaccggccctgcaccgcgcccgaacgcatcgccaacggcgaaccggatgccgtgcgcagggtcggctcgaatgcgttccacgacatccaggtcagctacaggctgccctgggatggcaccgtggcagtgggctcgaacaatgtgttcgaccatcgcggcccgatcatgttctccaagccgcagagttccttcccctactacggcggcttcgatatcggccgcacggtgtacgtgaagtactcgcagcgcttctga

SEQ ID NO: 497288 - DNA, 453 bp, Stenotrophomonas maltophilia
atgagcacccagtccaccatcgaacatcgcctcaacgacctgatcgagatcgcgcgtgatggcaagtccttctatgaggaagccgcaacgaaggtaaaggatgccgaactgtcggcactgttcacccgtatcgccggggtgaaggcgcggatcgtcgcggcgctgagtggttcggtcgccgccagcggcggcaagccggccgagcacggcaccatggtcggttcgatgcagcagttctacggcaaggtgcgcgccgcgtttggtgataccaactacggctacgtggccgaactggaagaatccgaagaccgcctgctgggcgcgttcaaggatgtgctgcaggacaacgatctgccgcccgcggtgcgccaggaagtgacccagctgctgccggatgtgcaggagtgccacaacgtcatgcgggcacgcaagcacgccatgaaggctgcctga

SEQ ID NO: 497289 - DNA, 2529 bp, Stenotrophomonas maltophilia
atgcgtcgagtcaatgcactttccgcgatgatgttgctgggcacggttgtgggaagtgcgggggcgcagtcctacagcaagaccaacgtcatcacctatcacgatgatctgtcgaagtgggtgcttggccaggtccggacgtcggtcaaccaggacacgggccggaccgagtcccaggtggattatgacccggccaccgcgaagccccagcggatccatgccctcggccagctccagcagaccattcactacaacagcgacggtaccgttcgcgccgtggtggacgggcgtggcaatacggtgagcctgtccggctggaagcgcggcatccccgggaacatccagtatgcggatggttcgacccagtctgccggcgtggatgacaatggctggatacgctggatcaccgatggccggggcaacaccacgcgttacgactacgacgcgatggggcgcatgtcgctggtcgactaccccgacggcgatacggtggactgggcgtccaccacgacacagtttgcccaggtgggcggcgccgagtacggcattcctgccggtcactggcggcagacggtcagcaccggcaatgcgcgcaaggtcacctactacgatgcgctgtggcgcccattgctggtgcgcgagtacgacgcgggcaatgaagccggcacgcagcgggcctcggtgaccgcctatgacacggaggggcgggtcaccttccagtcctatcctgtcgcgggggtcggtacggtccaggacgccggaactggcgtccgtacgacgtacgacgcacttgggcgggtggtccaggtcagccaggattccgagattggcgcgctggtcagcacaaccgagtacctgccggggcggcgcgtgcgcacgaccaatgccaggggtatcccgaccgtcgtgacctacaccggtgcagatgccgcgaagcttgactggccggtacgtatcgaactggcagagggagccgtgctggatatcctgcgggacgtcttcggcaagccgacgtcgatcacccgcagggccagcaatggctcggtgacgtcgacccggcgctatgtctacgatgcggcgcagcggttgtgcaagacgatcgaaccggaaaccggcgccaccgtaattgactacgacgccgcatcgaacccggtgggaagcgcgcaggggttggacctgtccgatgcaggcaactgcaaccaggacagtgccgcggcaagcgggcgccgagtggtgcgttcctatgacggacgcaaccggctcgcatcactgcagttccccgacggcaatggcaaccagcgctggagctactggcccgatggcctggtcaagcaggtcaccacgttgaacgccggggtggagacgcataacagctatgcgtacaaccgtcgcgggctgctcatcggtgaggtgcagagccccatcgatggcgaagcgctggcgatggggtatgcctacgacgcactgggcaacctgtccgcgcatcgctatccctccggcaacgtggtcgcgtatgcgcccaacgcgctgggacaggccgggcaggcgggctcctacgccgctggcgtggtctattaccccaacggggcgattcgtcagttcacctatggcaacggcattgtccactcgatggtgcagaacgcgcgccagttgccggatgaaagccaggacacgcttggcgcaacccggatcctcagcgacggctacgactacgatgcggtcggcaatgtgatggcaattactgacggtgccacgggccgcaaccagcgtggcaaccgcaatctgggctatgacgcgctggatcggctcgtttcggcttcctcgcccatgttcggctcggcgagctacagctatgacgcgttggacaacctcacgcgggtgacgattctcgaccgtgaccatcactactgctatgacaacgcatggcgcttgaccaacgtcaaggtcaacggttgcggagggtcaaccgtggtcggcctggcctacgatgcgcagggcaatctgcgggcgaagaacgggcagccgttcgccttcgacttcggcaaccggctgcgtgcggcggcaggttccgagagctaccgttacgacgctcacggtcgccgcacacagacagattcatcgttcggacggatcacctcgatgtacgaccacgccggcgtcctccgctaccaggcgagcgagcgcgaggacaaacggaccgattacatcaccctgggcggaagcctggtcgccaaggcagcggtgccgatgcggcgttcgccggccgcgaaggacttcgttgggtggtcgcctgtggcctctgccgtccgctacgtcgtcgaggaaagcgtggacggggtgacctggaccacggtctacgaaggcaacgccgcgaactggacgtctgccgcacgccctgccaccagctatgcgtatcgcgtgcttgcctgtggcgccacggggagctgcacgccggtgtccgatgtctcgcatgtccagcgtccgcagggtgacatcgtgcccctgctgtaccagctgctgctgggctga

SEQ ID NO: 497290 - DNA, 381 bp, Stenotrophomonas maltophilia
atggatggagtacgtgctgtatcgcgcccgcgtggcgccatcggcggcaaggtcctgctggcggtggtggcagtgctgggaactggcctggcctcaacggcaaatgctgagccttacaatctggaaggccatcggatcgtatccgtcgcaactggctggggcggggaagggttctacctggtgacgcaaggtgtgcttccagcgggctcggattgtgggggtggcaatcgcttcattctcctcaatgatcatccaatgcagagggagatggtctcgatgctgctcatcgcctggcagaacaagctgcgtgtcggattgcgtgtcgacggctgcacctccggggcaatgcagctgagggccgtgacgatgcctgaggcctga

SEQ ID NO: 497291 - DNA, 363 bp, Stenotrophomonas maltophilia
atgatgatgagtgacgcgacgccgggcttccgcaggaggttgggagcggggttggccttgacgttggccttgtgcctgtctgcaccactgaaggcggagccaaccagcgatcagatgacgattctgtcgctgcggccgtacatggacggcccggcgggaattgtgtacgtgcaagtttcgagtacggctttctgcaataccgatacctttgcaatcgacatgtcccggccgggagccaaggaagcctacgcggcggcgttggcagcgctgacatcggggaagaatgtccggctcgaggcattcaactccaccgggtgcaatggctgggcgacccggctccagtcgatcttcatccacgcgtaa

SEQ ID NO: 497292 - DNA, 201 bp, Stenotrophomonas maltophilia
atgcgtgttgtcaggaaggtgatcgcagtggcggtattcgcgttggcgtgtaccggttcggtggcagtggcagggccggtcgagccctgcgaccagccgtgctggcgggcctatcagatgtgcctggccagtggcaccgatgccggtgaatgccagcaggcgtacaacacctgcgtggtcgatctgtgcatgggcgtgtga

SEQ ID NO: 497293 - DNA, 567 bp, Stenotrophomonas maltophilia
atggacgccgcgcaggcgttgttcctttcgcagggcgtggacgccaccaccatcagcgacatcgtcgccgcggccgacgtggccaagggcactttctatacctatttcgcctcccgcaccgagatcctgcaggcgctggcgcagcgctacacgcggcagttcatggacgaggtcgagcaggcagtgcagcagcaccctgccggtgatggcgcagcgcgcctgcgcgcctggatccgcgccaacatcgagatctacgcgcgcacccacgcgttgcatgacgtggtgtacgccaaccatcaccaccaccagcggggaaatgcggagcgcaatgcgatccagcagcagctgctgggcatcctcgaagcgggcaacgcagccggactgtggcagctgcctgctccacaggtcaccgcctcgttgatctatgccggcgtgcacggtgccaccgacgacctgattgccacaccagcacaggatgccgatgccttcatcgccgctgtggaagcggattgcctgcgcatggtcggcgttccggcagcgccgacgcgcagcggcacacgccgctga

SEQ ID NO: 497294 - DNA, 1473 bp, Stenotrophomonas maltophilia
atgagacgcctccaacggcccgccctggtgctggcggcctacctcggtacattcctcgcttcgctggacatcagcatcgtcaacgtggcccttccaaccctgcagcaggcgctgcagaccgacatggcgggcctgcaatgggtgatcaacgcctatgcgatcgcactgtcggcgctgatgctgtcggccggtccgttgggggatcgctacggtcatcggcggatgtggctgctgagcgtcgccaccttcaccatgggctcgctgctgtgcgcctgcgccaaggacctttcgaccctggtcgccgggcgcgcggtgcagggcgtggcaggtgcgctgttgattcccagtgcgatgccgatcctgagtcacgcatttcccgatccgggccagcgtgcacgcgtgatcggtggctggtccgccttcagcgcgctggccctggtgctcggcccgttgctgggcggtgcgctggtgcagcgcgccggctggcccagcatcttcctgatcaacctgcctttggggctgctggggtttgtgcttggcgcctggggcatcgccgagcgacggcacccgcagcacgccgcgctggatccggccgggcagctgctcagcatcggtgcactgggcgcgctgtgctatggcctgatcgcgatcggcgagcagggcctgctggccccggtgacgcttctggcgctgggcgccgcaactgcggggctgatcctgttcggcatcgtcgagcggcgggtggcacggccactgctgccgctggacctgttcgccgacggtcgcttccgcatgctcaacctggcctcgttcgtgctgggcttcaccgcctacgcgagcctgttcttcctgtcgctgttcttccagcaggcacaggggcacagcgccgcgctggcaggctcgcagctggctccccagttcctgttgatgggtgttgtctcgctgttgttcgggcgcctggttgcccgcctcgggctgcatgccgcgctggtgctgggctacgtcctggccggtgtggcgctgtgcgcaatggccacgttcgaaccggctacttcgcgcgctcatgccactgccgtgctgatgctgcttggcattggaatggggctggcggtgccggcgaccggcatggcgatcatggccaacgcaccggccgaacgcgcaggtatcgcgtcagccacgatgaacgcgctgcgccaggcaggcatgagcctgggcatcgcgctgatgggcagcctgatgggccagcgtgccgtacagcagttcaccgcctgcgcacaggccgcagggcagcagcggcttgttgcgcaggcgcgtgaactgatcctgcacccgggctcgatgcacgccacgccgcaggtgctgacctggtaccgcagtgcgatggccagcgggttcggttgggcgatggcggtggcgggtgcgctggccctgcttgcggcgcttgggctgcatcggcagcgtgcatcggcttga

SEQ ID NO: 497295 - DNA, 306 bp, Stenotrophomonas maltophilia
atgactgagcagaacccgcgcagctccaaccggggcttcgcctcgatggaccaggacaaacagcgcgcgatcgccgccaagggcgggcgcgcggcacatgcctccggcaatgcgcacgaattcagtccggccgaagcacgtgtcgcaggccgcaagggcggcgaagcgatcagccgcgaccgccagcacatggccacgatcggacgcgaaggtggacacgcacgccacgccaacgcgcgccagcagcaacaacagcctcaggcgatcgaacgcacggcagaggacccgcaacgccagcagggctga

SEQ ID NO: 497296 - DNA, 225 bp, Stenotrophomonas maltophilia
atgcgcggcaaggccggcggccgcagtggcggtgccacacatatgttcgatgatcctgtgctgctgcccgatggctatcagataaacgttccggaccggcaaccgatcagactgcgcaccggtggcaactgcgaacagaccggtatcgcgcccgacgcggcaggcggcgacgatccactctccatcgcgcgtcaactgctggctccgccgaagtcgtcaagatga

SEQ ID NO: 497297 - DNA, 2532 bp, Stenotrophomonas maltophilia
atgccttcttcccgttccgccgctgcccgccgcccgggcagcatcgcccacaagctgatgctgggcaccgccgtcatcgcgctgctgtgcttcggcctgacggcgttcctgatctatcgccaggccagtgccagcctgatcgatgcctcgcgccagaccatgaccagcgaggccaacgctgaagcgcgccaggtcgccgccgacctgggcacggcgtttgccagcaacgatgccatggtcgaagccgtgctcgcccagcgtgcgcggggtgacgtgcccgatcgcgccagcctggctgccgtgctgggcgagcagctgcgcacccacccggagtggctcggcaagagcaccatgtgggaggccgatgccttcgatggcaaggatgccgagttcgccaataccgcgatgcacgatgccagcggccgctacatgagctactgggcctggcatgacggcaagccgcagcagtcgaccatgaccgactacaccgaagccgccgacggctcggccgactggtatgtggtacccagccgcgacaagctgcccaaggtcagcgagccctatgcctacgacatcgccggccagcaggtgctgatgagcacgttgagctcgccgatcgtcgaaaacggtaccttcctcggcgtgttcaccgtcgacttctcgctggcggcgctgcagaagcacctggcgacgctgacgccgatgggcgcaggccgcgtcgagctgctttcgcccaacggcgtggtgctggcctcggcgaatgccgccgagatcggcaagccgcgcaccgacgcattgacccgcagcatgctggccgacatcgccgccgatcgccggttcgaagccttcacgcccgatgcagccggcaacgtgcgcgtctacgtgccgctacgcgtgggcaatgccccgcagcgcttcgcgctgggcgtggtgatgccgcacgcggtgatcgtggccgaggcgcgccagctgctgtggttgacgctgctggtgggcgtggtggccgcgctgacgctgagtgccggtgtctatgtgctgctgcgccgcctggcgatccgcccgttggccgaagcggtgcgggtggcgggtgacgtcgccgccggcaagctcgacagcaccttgcctgcgcgcagcaacgatgaagtgggccgcctgctggacgcgatgcagggcatgcgcgggcagctgcaggcggtgatggcggcgcaggcggaaatggcgcgccgccacgatgctggcgagctgagctaccgcatggacgccactgccttccccggcgagtacggccgcatggtggccgacagcaaccagctggtggcttccagcaatgcggtcacccagcgcctggtcgaggtgatgcagcgttacgcggtgggtgacctcagcgtggacatggaagcgctgccgggcgagaaggcggtgttcaccgcagcgatggccaccaccaagagcaacctggccgcgatcaacgagcagatccagcagctggccgccgccgcggcggccggcgacttcgctgtacgcggtgatgcccagcgcttcgaccacgatttccgccgcatggtggagaccctcaacatcatgatgcaggtcagcgatcacaacctggctgagctttcgacgctgcttcgcgcgattgccgccggcgacctcagcgcacgcatgcgcggtgatttccatggcgtgttcgcggtgatgcgcgacgatgccaacagcaccgtgcagcagttgacccagatcgtcggccagatccagcagtcggccgccagcatccgcctggcggcgggtgagatcgctgcgggcaacagcgatctctcgcgtcgtaccgagcagcaggccgccaacctggaagaaaccgccgcctcgatggaggagctgacctccaccgtgcgccagaacgccgaccacgcgctgcaggccaataccctggcaggatccgccgctgacgttgccagcgagggcggggaagtggtcaaccaggtggtgcagaccatggagcagatcgaggcttcctcgcagcgcatcgccgagatcatttcggtgatcgacggcatcgccttccagaccaacatcctggcgttgaatgcggcggtggaagcggcgcgggccggtgagcagggccgcggcttcgcggtggtcgccagcgaagtgcgcgcgctggcgcaacgctcggcgggcgcagcgaaggagatcaaggagctgatcgacgcatccgtggcgcaggtcggcgccggtgcgcagctggtgcacggtgcgggccgtaccatgcaggccatcgtcggccaggtggggcgcgtcaacgagatcatggccgagatctcggctgcgtcgcgtgaacagtccgccggcatcgagcaggtcaaccagaccgtggtgcagatggatgagaccacccagcagaatgccgcgctggtggaggaagccagcgccgcggcgcgggctatggaggagcaggccgagcagctggccgtggcggtctcgcgcttccgcctgcaggccgaaccggaggccatggcccgccgcgcggcctga

SEQ ID NO: 497298 - DNA, 243 bp, Stenotrophomonas maltophilia
atgtctcgagcgcgtcatccagacaaggacatcgaagcggcgttgcagttcgcggaggaccgcgggtggaggctccgtatggcgggcggccatgcgtggggccggatgtattgcccttacaacgacaccgattgccgatgcggggagttctgcatcgtgagcgtctggagcacgccgcgaagcggcagccatcatgcaagggccttgcggcgtgtggtcgagaactgcagtcgtgagcaatga

SEQ ID NO: 497299 - DNA, 498 bp, Stenotrophomonas maltophilia
atggaattcaacttcaccctgaagtaccgcttgccggacacaggcaatgaaatcggcgtcctcgagcagcgcctggccgaaggcggctgtgacgacgcgcttgtgggccttgggctgccgggacggctggccctggcgttctgccgcgaagcagacagcgcaggggctgccctgcgttcggcgctggacgatgtgcagcgggccgtgcccggtgccgaactggttgaagtgagccccgatctggtggggctcactgacgtcgcagacctgctcggaatgtcgcgccagaacatgcggaagctcatgctggccaacccgcagtcgtttccgtcccccgtgcatgacggctcgacctcgatctggcatctggtcgacattctcggttggctgcgagcgcgcggcagcgggaaagtcacgacggaaatgaccgagctcgccgccgctgcgctgcagatcaatctggcccgggaagggcgcaggcttcacccgaagacgtag

SEQ ID NO: 497300 - DNA, 1947 bp, Stenotrophomonas maltophilia
atggatgcgctttcacgggtctcggcccaggtcctggacagcgccctgcccagcctgccgctgtacctgctgcaggccacggcggtgatcggcatgatcggcgtgctgctgatcgccacccgccgcgccggccacgccattgaaggccgccgcctgtatgtgggcgtggcgctgggcctgatctacctgttcaattcctggttcgtggcccgctacagccagggcgtggtcaagctccacctgggtttcgacatcctgctggtcagcggcctgctcggcggctggcgcggtggcctggcctgcctgggcgccagcctgctggcccgctaccagttcgccggcatccagtatttcctgcctgccggcctcgaggccacgctgcagatgctggccggcgtctggctgcgcaggcgcctgcacccgcgcatgctcaatgaactctcgctgcgcctgatcctgcaggcctggggcgttcgtatcgtcgtcactgcgttgggcctggcactgggggtagcaatcatcggcgcccatcagctacccgtggaggagttggcaatccagcgcctgctggcactgccactatcactgctgatgctcggcgcggtgttcgcactggtctacaacgatgcgcagattgatgcacaacgccagcgcgaacaggcctggctgcgcatcgatccgatcagtggcctgcccaacatgcgtgcgctcggcgaacgcctgcagcactactggcgcgacaacgacggcatcggcaaggcctgcctgatcgtggccgagatgggaaacctgcgcgatctgcgcctgcgctatggtccgctgcaggacaacggtatctggcagcgcgacagcaccgaagaagtacatcggctgctgccctcgctgccgtccgcgcaactggagatctaccagttcggcgatgccacgctggcgatcctggtgcgcgacctgaccttgtccgaactgcgcacgcagccccagatcaccgagctggccagcaacctggccgagcaggtcggccgcgattggcccggtttccggccgctgttccgctgtgcagtagtcgaattgaagccccccgtagatgccgacgaaggacatcttccgttccgtgcgatcaccgttgcactgagtgcgatcgaatccggcgtcgtgttcttcgacgacccgatccagcgcgacagcgagatcgacgccctgatcgaagtcgctctcgaacgttggctgcagcagggcgacgcaccgctgtgctaccagcccaagcatcgcctgcaggatcgccaactggtcggcgccgaagcactgctgcgcatgcgcgataccgagggcaggatgatcgcaccgatgcgcgtgatctccctgctgcgtcggcatgggcggttggccgaactggaatgggccacgctgcagtcggccatccacttcctgcagcagtgccgacgcgatggctggcagctgaagatcgcagtgaacgtttcggccgagtcactgcgcctgcccgacttcggcctgcgcctgcaggaactgctgcagctgcatgatgtgcccggtgcgatgctgcgccttgagattgtcgaatggaccgagatcgtcgagcgcgacgcggtcgatgccaacatcgcacagctgctggcggcagaggtcaccctgtcgctggatgatttcggcgctggctattcaaccctgatcctgctctcgcagctggccatcgccgaggtcaagatcgaacaggcgctgatcgccacactgtccgacgccaagtcgcagtcgatcgtgcgcttcatcgtcgaggttgcgcaccgctgcggcgcgatcgtggtggccgaaggtaccgaaaccctggcgcaggagcagaagctgcgggccctgggcgtggatgtcggccaaggctatctgtactcggcggcgctgccggccgacgagttcctccgcttcgccgccagctag

SEQ ID NO: 497301 - DNA, 903 bp, Stenotrophomonas maltophilia
atggacagctttgccggtctcagcctcttcgttctggtcgccgaggcacgcagcttcgcggccgcagcacgacagcgtggcatcaccccttcggccgcaagcaagaccatcgcccggctggaagagcgcctgggcgcccgcctgctgaatcgcaatacccgcagcgtcagcctgactgccgaaggcgagcagttccttgaacgctgccgccgcatcatgatcgaggtcgctgcggcagaacgcgaactgaccgatgcccaggccgcgcccagcggtcgcctgaaggtcagtcttccactcgccagcggtctgatgctgccggtgctttcggcgtttgcgcagcgcttccccgccatcgaactcgacctgcacttcagcgaccgcctggtcgatgtcatcgaggagggcttcgatgccgtcgtccgcacaggcagccccgccgactcccggctgcacggccgcaacctcggcagtacccgcctgctgtgcgtgggcgcccctgcgtacttcgcccagcgcggcacgccgcagcacccggacgagctgagcggccacgcatgccttctccatcgctttcccggcaccggcctgatcgaacgctggccactgcccgcacgtgagggaggcgctgaaacccggctgactgccgcaatgaccgccaatcatcttgagacgatcctgcacatggccatcgatggccatggcattgcgtgcctgcccgacttcgccacgcgtgatgcgctggaccgcggttcgctcgtcagcgttctggacccatggagcaccgagcgaagcaccttctgggccctctggccaagccatcgccatcagcagccgcgtgttcgggtgtttgtcgatttcatggccgaacacctccttcccggaaacgaccgctgcaattga

SEQ ID NO: 497302 - DNA, 1512 bp, Stenotrophomonas maltophilia
atgtctgttgcctctgctgagacggccggatcatcacgctttggcgtggtgctggcaggctgtctgacggcgctcaccattcccttgagcattgccagccctgccgtgggcattcctgccatccgggacgcgctgggcggttctcctgcggcgttgtcctggatcatcaacgcctacctgttgacctacggctgcaccacgctggtggccggtggactggccgatctgcatggcaggcgccggatctggattatgggcggcgcgttgtttgcactcgtcaccggcctgattcccttgatgcccgatgtggcgtggatcaatgtcctgagactgcttcaggggatggcggcgtcggcagcgtttgccggcgcgatggcgtcgctggcgcaggtgttcgacggccaggcgcgggcaagggtgttcagcctgatcggcaccacttttggtgcaggggccgcaggcggtccgctgttggcgggcgggttgatcgatgcgctgggctgggaatgggtgttcttcctgcctgcgttgctggcggccctgaccgtaccgctggtcgccctgtcatccgccgaatcgagaaacgccggttcgccacgcctggattggctgggggccatcaccttcatgctggcgctgggctcactcacctacgccatgatcgtgctgccggaacgtggcctgctgcatccgcagacgctggtactgctggcgctctcggtggtgctgcagggcgtgttcattgccgttgagcgctcccatcgaacaccgctgctggatctcgggctgttccgcaaccggcgttttgttggtgtgcagattctggccgctgcccctgcgttctcctacgtcgtccttctggtcgtgctgccggctggcttcattggtgttgaaggactgcgacccaccgaggctggactggcgatggcagcgctgtctgcacccttgctggttgttcccctggttgccggctacctgctgcgctggattccggcgcggacgctgtgctgtgcgggcctgctgatcggtgcgcttgggctggcatggctggcgcaggtgttccagttcccgtcggtgcgctggatgccgatgctggtcatcggaatcggcatcggccttccctgggggatcatggatggcctggcggtcagcgtggtcggcaaggagcaggccggcatggccgctggcatcttcaatgcgatgcgactggcaggcgattccattgccctcgcgcttgtcggcatcatgctctcggcccggattggcggggacatgatgctggaggccggcgtcgtggcccgtgccgccgtgcacaggctgtccatgggcgaccttggcggagcggtggaggcattgcccggcgtttcgagaacggcgcttgcccaggcatacgtggaggccgtccgtggccagctgtttgccctggcgatggcgaccgtgctggccgccatcgtgcttgggtacctgttgcgcgaagaggtcgagcctggcctgagcaggggtagtcagtag

SEQ ID NO: 497303 - DNA, 729 bp, Stenotrophomonas maltophilia
atggatgatgtgtttgccccgttgatcgatgcgacctggcgcggcgtgttctccgggcagcgcacgctgcgggacgatccacagctgcagttggcgtgcagcgatgatttcgatgagggcgaggacggcatgctgctgcagccggtcgtgggccccgctcgcgcactgttgcgccctgccctggcggctcgcctgcacgtgcacgcgcaaccgcactggacgctggcacagctgcaacagcgcctgcagcagctcggccagcgcacgcatggtgcggatcgtgtcttctacttccctgccgcagaacttgcggccctggccgcgcgccctgcaccactacatatccgccgtctcgacccggccgacgcagccgcgttcgaggtgttccaggccaacgccagcgaagaggatctcgatgccgcctgggtcgagctggaccactggcaggtgttcggcgccttcgatggcgagcggctggttgccgcgggaagcatgtacccgtggagcctggatccagccctggccgacatgggcgtgctgaccctgcccgaggcccgcggtcgcgggcacgcgcgccagctggtacacgccatggccgtgtccgcgcaggctgccgggctgcagcctcagtaccgttgccagctcgacaacaccgcctcgatcattaccgccgagcgcagcggcctgcgcgcgttcgccgactgggacaccattctggctgccgactga

SEQ ID NO: 497304 - DNA, 426 bp, Stenotrophomonas maltophilia
atgccacggatgatcgccaccctgctcgacagccgcgtgctgtggttcctcgcccggctgctgctggccgtggtgttcctgtcctcgggcctggccaagctgctggcgtgggacaacagcgtggccgaaatgcaggccgccgggctgcaaccgcctgtgctgttcaacctcgccagcgccgtggtgctgctgggcggcgcactgtgcctgctgcttgatcgcctgctctggctgggcagcggcgcgctggcagtgttcatgctgctgaccatcgtcgtcgtgcataccttctggaccaagcacggcgcggaacagcagctggccctgttcttcgcgctggaacatctgagcgtggtgggtggcctgatctgcgcggccatcgccagccaggcgcgggctcagaagaattcgtcaagcaaccggtag

SEQ ID NO: 497305 - DNA, 414 bp, Stenotrophomonas maltophilia
atgagtgatgggatgctctttgttgacgaacgcaatgaaaaaaagaaagtgcggaagctctcggtcgaagaactgaggcttctgtatcgtgatgtgcgtaacttcaaaaggatggttgaggaggcgcggcaaatgaaccagcgctcagctaatgctacttacacgcaatacgcgcacacacgatttcaagaactaaggcggttgtttcatcccatcaatgagcgtttgatggcattggatagtgatgatgtccgccgcaggcgcaattggatattggaaaacttctccaatgccctggccgtacaaagaaaagatagtctaaagggtaagatgggctccacaattggtagcctcaacatgattttggatgagatccaagagattggtgtggaaatccaaataagcgaggtttaa

SEQ ID NO: 497306 - DNA, 492 bp, Stenotrophomonas maltophilia
atggcgagagttgacgagcagcagcgccaagcgctggctcaagcacctggggatcttcacctaactgcggcacaagccgctgtgttgatgcaggtcagcacaaagacgttgcagcgcctgcgcaatcaagggatgccgccccccaccattggggaacgccctgcacgcaccgatgagagatggtccaccacgcctgtgcgctacagaaagagcgacgtggacgcgtggctccaacaccccgtaatgcccagtgtgcatttccatgcgttccaggttgcgaacgggatcatcgtggcccacgccaaccaactggacgacaacacggtcgtggacggcatctatgacttgctcgccgagtgggagtggggcagcacggaattgatgattgaagcgcaacagttgttgttggatgagcaacagcaacaacgcgatgtggttcaagaacgtattgccgcgcacgaacggaacgtcctgactcaagcattgaaataa

SEQ ID NO: 497307 - DNA, 438 bp, Stenotrophomonas maltophilia
atgttggattacgccattaacccctcccacgaagcaatcgttgtcattggatttggcccactcgcagccctcgcatcggaccttgcctcatcaactgaccgtgaaaatgatcttaaaaaacttgtcactacatcgattgtggaaatgcatttcgcgcgcgaaggacggcctacgggcgttctgttgtgtcgccttaatacatttgctgccgagaccttgacggagtttgatgttgcaaactacgacttcgatgaggttcgcaagctgtttgaagcgtgcttgtgtgttttcacgagcgagaagggcgtgtgtttggagtggattggtggcagtcaggaactctttggcaccgtcaacaaacaactcaaaaaggacttctgtgatttcgctgaggagtacgcgaaggtctatgcagtgggtatgagtgaggtcggatga

SEQ ID NO: 497308 - DNA, 315 bp, Stenotrophomonas maltophilia
atgggagcatacacattgttttatggaaaagaacttaatgcgggcatgtcagtggacgaaatgaaagcggcgcgggaagaaagctgtgcggcattcaaggcagcgattaacgaattttcagtgcacgacaacccaagctcaacaatccgaaagaggcgcattcattacttgatgatgttctctactgacgtgtacccggaagggttgggagtgatgcacggaattcgtcactccgatcgatccggaattgttccggcgtttcgtgatttcatggtcgaaaacaggagccggttcttccaaaatttgacctggtga

SEQ ID NO: 497309 - DNA, 225 bp, Stenotrophomonas maltophilia
atgggtgacgttttgcaattcaagatcatcaaaaaaagaaagccgtaccgtcgccgcgcacggcctcagaaagtcaatcgaacatttcgctttgaccaggagaagttggcgctactggaagacgtggcgcaacgcagtggattgaccgtatcagagtacatccgcgaactcacagatcttgctgtacgggactgctggttgtttgagtcagcaaagaacgcataa

SEQ ID NO: 497310 - DNA, 1593 bp, Stenotrophomonas maltophilia
atgtctaaaatcaacgtatcaaataatgcaggtgtgtcaacccctgtgcccacggttgcgaaacaagtcaaacccaaagctggccaaccgaaaatcaagaaaatcaacagcgcgaacatcatcccatctaatacccccgcatggaattgggtgaactacatcaacagtggcgcgtgtggtgattgggcgaaagccaatgggatggcgtacaaatggaatggggtgttctgggacactgttgaccaggccaatggaacggctcttgcaaccgatttcttgttcaagcacatgcccgacaaggccaccaatgcggcggctacagattgcttcaaatttgccacgaacatgcttgatccactgccgaagttggatgcaggcaaggttgtcattgccgctaagaacggatacgtccacgtggaaaaagacgggacgattacggttctgccagcggataaaaagctcgggctcacgttcggcgtaaacgccactgtcagcacctcatacaacaagcgccacacacctcaagcggttcccgccaactcgctgtttgggcgcttccttgcaagcgcattgcctgatctggatattcgtgacctggtgcaagagcagtgcgccttgacgcttattcctggtccccatcagctggtctggtggtgggtgggaacggggggcaatggtaaaggggtgatgtcctccattattcgtggcttccaccaccgcacggcgcaaatctggctggataaatgtggcgacccccaagcgctcgccagttgcgtcaacgcgagcttgatcttcacgccagaagtgacgaatggggcgcgcggtatcaatcaagaagctttcaaagcgctcagcggcggagatttgctgaccgctaaatttctctatcgtgacatgattgagttcgttaatacctcgtgccacatcgtcagttccaactatgagccaatgattaccgacgccacagatggtgtgtaccgacgcttgtgtgtggtcaagtggaaccaacggcacggcacgtacgtcaagatcccaaaccttgccgatcgcattctgaaagaagaagcgcacattgttctcgattggcttctggaaggggtcagtcgcattgttcaacgcggcggttttattcccgaaagcgaatggcccgaagcaacaaaggtctttaaacaatccatccgcagcaaaaacgactgcgtaggagcttggcgtgattactgtggcatcgtacctgacgcaagcacattgaccccgaagagcgagatctataactcatacgccaaattttctgagggcgatggccgtcacgtgctgagcccgccacagttttggacgcgcttttgggccatgccggggtttgaacgcccacagtctgcgcggggcgacacacagcgtattgcgggggtccaggtcaactgtgtgcgcgcacgcattcctgcggaaatttcttgggaacttcccacgggtgaaatcattgtccaacggcctatcaagagcgcaccgccaactgttgaaccaaaggctgctgacaacgaaccgatgctgattacgctgcccgacaaggacttttctgatgaccagtggagcttttaa

SEQ ID NO: 497311 - DNA, 318 bp, Stenotrophomonas maltophilia
atgtgcactaataaaaacattgaagaagcgttttgcgcggcattcagtcatctttttgatgacggtgatgaacttctggaacgggcgaagtgggttgcacgtggcttcttttatcttgacgatcagaaggtaggtggcaacgctacctgggatgctcttattttgcagcgttatgaattcaaagtggggcatgggaaaaccactcccgaattggacatgcgattgcttgagcttgtttacagtaaggccaatcatggacatgcaatcaaacttctgaacaggttgaataaacattgtgcgcccagtggtgtggggtaa

SEQ ID NO: 497312 - DNA, 1095 bp, Stenotrophomonas maltophilia
atgagcgcagcaaacgaattgaagcaggacattgcggagcggttttacgaccaacttagagagcgccggtccatcttggactacggctttaatgaaaacgagaagccactgcccgtcataggcggttggccgattggggcaagtggttacccattcaaagacttcaatgcactgcaactgatgaccgttgcgctcgatcgtggattcaccagtcctatctacatgaagtctgagcagatcaaaaaaaatggctactacatcgccaaaggcgaaagcaaagccacaaagattgaaagcacctataagcaagaagacggtgaaatcaagtccgtgatgtctgtgtgcttcaacggcgatcagatcaaaaatttgccgctgacccagcaaacgttcgcctggcagggcaaggccgaaagccgcgacacattcttggacgaactgattgctaagaccggcgcaaaaatctcgttcgatccgatgaacgcaccctattacgagcgcaagacagacactttgtacatgcgccctcagtcggaatacacctccaagcatccggacggaaagagcgcgtactaccacgatctgatgttcgttctgaccgattgggccacgcaccccagccgctaccaaggcgtgcaaccgggtgagcagggcagcgaacaagacagtcagtaccgcttagggcgccaactggcgctgttgcagatcgcaagtcgtttgggcatgacctacgaacccgacgacagcggttggacacaaaactacattgacagccggcccaactggcaagagttgcttcgcgcaggcaaagctgcagaagccattttgaagaccattggcgttcccgaaatccaacacgagcctgtgcgctccaaagtctggaagcaagagacatcacaggcgttccagcccaccgtaaaacccgccgagcaggagcaagctcaacccgatcctgtgcagtcgcttgttgacgacaagatccaagtgatccacgtggccgacaagcccagcaaagaggtgggtaaggccgtcaaaattgcagcggctaaaaaactcaatggagcgacgaagaaagagcaaacactgacaatgtga

SEQ ID NO: 497313 - DNA, 1002 bp, Stenotrophomonas maltophilia
atgagtaagcaggacgaagcaagaagcattgccgctgaatacatcatcgagcagatgcaacagggtgtgatcccctggcgacgcgattggaaacagcacagttcgacaggagcttttggaagcctgccgtacaactacgcccgaggaaacacctaccacggcagcaacgtgatgatgctgatgatggcccaggcggcgcgcggcttccaaagcaacgggtggttgacattcaatcaggccaaagccctgggcggaacggtacgcaaaggagagaagtcgtcaaaggttgtacgagtcatcaatgtatctgacaagcagggcaaccccgttcttgacgagagcgggcggcagaaaattgcactgattacatcggcggtgttcaacagcgaacagtgcgatggcttgcccatacgcgaggcgaaaatacccaagccggtggagtggagtcacgagcaagccgagcgtctgatgaaagacagcggggttacctaccgctacggcggcaacgcggcgtactacactgtcgctcacgactacgtgcaactgccgaccaaagagcagttccgcacgatggaggggttctacgccactgccttgcatgagacgggacacgccagcgctcaccccacacgattggggcgcgatctaagcggcaagtttggctcggagaagtacgccaaagaagagttgatcgcagaatgcttttctctgatcgtggccgaccgtttgggtttgtctgtcgatcaagactatgacccaggcaaccacattgcttacttgcagtcgtggatcaaggttctgaaaaacgaccactctctgatcttcacggcgtttgccgaggccgaaaagatcgcgacgtactacaacgtcaaagagtacacgcgcaaagcctttgaaatggagcgcgaggaagacgaagtgcgaccatctagtgaagagtctcccaagcccaccattcaagtcgtgcgccgtccacagaagactgaaatggaggtggcgtga

SEQ ID NO: 497314 - DNA, 612 bp, Stenotrophomonas maltophilia
atgtggtactcaagcgcaaaagaaacacaacaacttcttgagagcgagattgcccgactgtcagccgtctacgacaaagcaggcaatgcaccatcactggaaggaatggttgaccaaatcaaagaactagctggattgaacctgcggctaaaattgtttgagtcaaaagtggagcgtcaccgcgaagcattcgacaacatatctggcgactacaacgatttggagattggcaagcagatcatgaccaataccggcatcgccggtccccagtcgcgcgcaacattgcctcaaaatatgcgcgacatgatcgacacaagcattcctttgttaaattcgcagttgtgtgatgtcttccttgaacgggtccgtgagcgtttcaatcttcccagcgacgcccaactctttgttcggggcaattgggaaaaccacgctgtgcgaatgcaatccgtgaaagacgatgtggtgacctttgtgcataatgatacaggcgccactcacgctgtggccgcaagcaaagtctatctggacggtggagaccgcagtgtttcgctttccagtgtcctgcgtcagatgtgccctgggcggcacgccaatcatcatccacagatgtga

SEQ ID NO: 497315 - DNA, 627 bp, Stenotrophomonas maltophilia
atggacaaaccaacactcgcaaaggaaatggcgctgatttacagcgtaaaagccaaggccgctgattacgcgcaaaagcgcgatgaggaagcgttgaaagtcatggttgatgaagtgtgtaagcttaccgggcttcgctttagagcccggttgcttgggcaggcaacaacgccaagcgtgctggacgtgcagagtttgtgcgaagaactgaccgatgaagagataggtcaccaagtcatctcacgcaacggtattggatcgagtgacacccgcagatcgttcccaaaagagtttggtgacttgctggacatgagtattccgcccatcatgcctgtgttgtgcaccatttttatggggcgcttgtcggagcgcttcggtttgggtgatgacgtggttgcatcggttcagcgcgcacgcgtcgatcgccagcccatagaagttgcggccattcgggatgaatacgttgagttcaatgtcaaaggcgacgatgagaaccgatggtacgttccaatcaaggatgttctgctggaaggcaacggcaaagccatcaccatggaaagcgcactcgcgcagatgtctgtggggttccaagcaaagcaagtggtacagcagcagttgattttttag

SEQ ID NO: 497316 - DNA, 384 bp, Stenotrophomonas maltophilia
atggacaacttatcacttcaagatgtgcgtgtgcttgccaagcattcacaccaccacctcatcacgcatacagacgagaacggtcgaacggcgttgcattgggccgtcatcaacaaacgcttcgatgtcgccgacgctttgcttgccctgggtgccaacccactggtcaaagacaagttcggcaagaccccgatggggtacaccaaccctatggtgttgtccgaacgagactggcggataagaacaagcgtcgttgttcagttctggaaaaagaacgccccgcgtgcacaggagctgcagcagtcgttcgctttaagcctaagccacaaccagaccattcatgcattggtccgcgcacaagcaattcaaatgcgcatgcaataa

SEQ ID NO: 497317 - DNA, 366 bp, Stenotrophomonas maltophilia
atggtccgtgaggtgcggattgaagaccgctccaaggtgaacaccggtacgtttgttggtggtgcggtgggagccgcgattggggaccgcacaagccgtaagaaccgcgacacacgcaatgttgcacgggtggttggtgctgccggtggggcgttgatcggtggcgccacacagcgcgctgtaagcgggcacaaaggctatgaaatcgtgatccgcacacaggaccgccgtggacgttccgaagtcatctcaattgttcaggacgcggatctcaacatgcgccagggccaaagtgttctcatcagcggcagtggtcgggacgtacgtgttgttcccataccagacgctccaattagctcgctttga

SEQ ID NO: 497318 - DNA, 396 bp, Stenotrophomonas maltophilia
atgagcactgttgtctctgagattgaaaagcagcttgccgaagccatcaagcatcaagaggcgcttcaagaaaagttgctcaaagagcgcacgaaggaagctggcaagttctttgaaagcctcaccgctgggctgaaaaaatatatcgatgtactgaccagtgagcagcgttcgcaagtggcgcgtatggttgggttcgttcacaccaagcacaaggcgcatggcagtcgcgctgtccgtgggggcgctcccacgcataagctggccaatgcccaggggagccagttccattaccgtggacgcgggcgaaagcctcaagttcttgtggattttgaagcaagccccgaggggcaggagttgttgaaggctgggaagcccacctacatcgcgctttaa

SEQ ID NO: 497319 - DNA, 147 bp, Stenotrophomonas maltophilia
atgaactacatgaaaaaacaattggcgaagtacatcttgtatgtcggattgcctctgttcgtgcttcacttcgccggagcggcgtttgaaaaaatcgacaccattgaaacagcggtgggcaatcttcaacactcagcagggcggtaa

SEQ ID NO: 497320 - DNA, 504 bp, Stenotrophomonas maltophilia
atgaactactcacatttggagaaaaacgaaatactgttgtcaaaagccatttcaacgcactcagacaaccttgacgctttgcgctggtatgtgcgcgttgcatgtgaggacttccctggccgtgcaccacgcatttgcgaacatgcaatagggtcgatgatcaattttgggccagacaacttgcatgtattggttggagcgctcatcaacgctggtgaggaaatgccgcaaaacgtactgtggctcatgtgcaaagaggggtttttaacgggggaagttgcgccccaagtagtggaacttatgggccgcattttgaacagcgaaaagcctgtttctctgtatgaagtggagtccacattgcatgttgctcaaattgttgggtgcgatgatgttgttgcactgttgagcgagtacatggccgctcagcgtgaaaagcaacgggaaaatatttgcaatgcactgtcatgcgcacaggggaggtttggtgttggtcgcaagatttga

SEQ ID NO: 497321 - DNA, 402 bp, Stenotrophomonas maltophilia
atgcgtaaatcgaaagcgagaaatcatcgggttaagccgtcgggcaattgggtgccaaaaacctgcgggtatgcaatgttctatgagacggataagtattactcgcgcttggatgcacgggcgacaaagcttgataagacaatggcgggtacgctgcgcgagttcatttgggggtttatcgagaaccctgattttgaccgggatgagtttttgaacatgggctgtgagccacaaaagccgaagcccacaaatcctaatcatgtggatgatgtgcgtggtgcaggtataggttttatttccgacgccaagccggttgtcagtcagattgaacaattggctagcgattttggtatcagcaaagcttcgcttgtgcgctacatcctgcggaaaaatttgcaatag

SEQ ID NO: 497322 - DNA, 888 bp, Stenotrophomonas maltophilia
atggataaaaaattcaacaagcatgagacgcaaaaattcatcaatgcaatattggccgtggatccaaatggcgtgcgcagcgctttaaaaaacaacgcggacccgacaccggtgttgaagactgatttgaacgtttggcacgcccaattgcgggtgccagcaaacgaggtggatccgcacaacacgtgcaccgctttggacaaaagcgccgcactgctcacagacgttctgccactggacaacatgcaatccgtgaagtggctgggtttggctggacacgtaccgatcgcatcggcggacgccaatgaagtgcgtatggggccaagctcgttttccaatgccgtactggcggcggtgtttgacatgttcacttccatcgttggggatcgccccgacgtggactcagacgagcaaattgctgcactggcacgtgccaaagaaatcattgatctgtgtttgatccacaagtgcaacctggctgggtccgacgccagaggcatgaccgtcttgcattggtgctgtgctttgtacgacgacaaagagcttgtcgaacgactggtggctgtgggtggcacgccaacgatcaaagacaaggatgggtacacatcaattgacgttgccgcgcattacggccatctcaactcgtttgccggcttgaatgttcgcgagcaagaaaaaaaagacggcaatcttgcaaccgctccaaccaaagacgatctggaaaagatcgattggagcgagctggagccctgcaacgacttcatatccacgcaccccagcccatctgcggccccgcccacagcgccagccagcaaaccacccagccgcttggcgatgttcttcaacgttctcctggggcggaccagccctttggacaacgaacactaa

SEQ ID NO: 497323 - DNA, 354 bp, Stenotrophomonas maltophilia
atgaaaaatctattctttggattgaccgcagtcccactgttggctcttggcgtccaatctcagaacgccgacctgggcgcggtcctttcggtcaagcaaacctgtgcattcgtctcagggtcagccgccgagttcctgcgctgtgacacatacgagcagcccgattgcggcagcgctttttgcgacggtgtgggtggcttgccgatatcagtttccgtcgagcgcaacaccgaacagttcgaccccgaagagatgccgttgtggtgcgaccgccagcagtgttacgccaacacagggccattcaaggtcactttggactacggaaatttgcgcgccaccgatggatctaaataa

SEQ ID NO: 497324 - DNA, 624 bp, Stenotrophomonas maltophilia
atgattaaaagcattgttgtggctttatctttagcacttgttccgttggtgtcatcggccgcatctgttggtccggttttcaaagtcaacaccgcaggggagaaaagcggggtgttgacgatatccaacgatggtcctgatcgttcgtatcagatcactgttgacgaactgaccgttgaaggcggtgtgtcccgcagagggccatcggagaaaattcgttttgcgccgtcgattgttacggtgaaaaagggcgccacccaatccattcgttacatcaagtccgaccaagttggacgtgaagaatttttccgcgtgagcgtggccgaacttcccacacctggggaggttgggctaatcaaattggtcaagcaagacctggcgtggatttggcgttcgccatcggccaaggccaatctcacaggtcgttgggttggggatcaatttgaggtgaccaacacgggtgacgcatctgcacggttggtgtcgccgtcatcgggatccgcaacccgcagtggcttgctgggctatgtcctgcccggtgaaacacgcaagttcgcgcttgctaatttcccgcacggcgtggtgtcggttgaagtcaacggacaacgccaggacatcaaatga

SEQ ID NO: 497325 - DNA, 2178 bp, Stenotrophomonas maltophilia
atgaacaaatcggtcatcgccttggcgatggctgtctgctttgcacaaaccacttgggcctcagacgcaaccatcgccgctgtatccatcaatgggtcgctcaaaagcgacgttgaagaactgcacgttcgcgacgatgggcagttgctcattgccaaagagcgttgggcgcaatggggaattcagttgcccgcatcgttgtccgagcgcgacgtggtgtcgccatccgatttgaacgcggatgttcagtacgatccagccaatcaaagctacaacatccttgtgcccgcaaagtatttgccggcgcgcaactacaaccccgcctcgcgcatgcgtacggacattggtccttcgcccaaaggggtgatgctggggtatgactaccgtgcgcaagacagcgatacgtacggcttcacacagtcgttttcgtacgacattagatccaacgtcctgggtggaacgttctatggtgccggacaactcaacgacgacagcaacggactgagccacgaacgctctttaacgacgtggagtaaggatctgtatgcctctcaaactcgcgtgcagatcggtgatgtcatcaacgccacgcccaacggtgcgctgctgggctcgcgcaacatgcttggtgttcgcgtgggcaccgatcgatcgttgagcaacgacgctttttatcctgtgcccacattcaacggggtggccgacacgcgctccacagccgaagtctttgtcaacagtgtgcgtgcgtcccaacagcagttccagccggggccgtaccagttcgcaagcctcaatgcaccaatcggtttaagcactgtctccatggtggtgcgcgacgaattgggccgcgaatactggacaacacggcagttctacagcacgcccaaagcccttgccaaggggcgcagcgaatgggaagtctcggccggtttgatgcgcaacggagggttgggcaacgactacgcagacctggcgtggaacgcggtgtacgcgcgtggtatgtccgaccgctggaccacaaccgcagcattccagggcacggctaaagggcagtcggccatgtggggcaatctgtggagcttcggacgctggggcgctgcaacgtttgatatcgcaacaagcggggacggaatggccgccacggttggatacgagcggcgcaccaacggcttgtcgtggtccgcttcgcacacccacgtcaccgacgactattggaacttcaaccgcgagcggtcgcgttttgctcttgaatcgcaaaccaccttgggcgtggcctaccgccaaaataatttcagcgcagcattgaactacagcgatgtgcgctattccaaccgttccactcagttgcttaccgcacagtcgcgctggcagttgaactcccgcgccgaactggccgcatttgcgcaacacgacttatcgctgcgcgacacaacattgaacgttggtttccgctaccaatttggatccggctcggccagtgtcagccacaacgatggcgaatggtttggacaagccaacggttccaccacactgaaaaaccgccggctgacgtggaacgcaagcgcaagcgccggcaatcactatgttgcggggcgttgggatttgcccatgtccacgttactgctgcaaaacagcacaaccaacactgtgtttggagccaacggtggggtgtggatcggggagggcggtgtagtgccaacgtccaggccatttggatcgtacgcacttatccgcgttcccaatctccccaacacgcgcgttcaactcacaggcaagagcgtcaccacaaacgccttgggcgtggccgtggtccccaacgtctctgcattgttcgatcaaacagtgactgtggacgctctgagtcttccgtttggtgtgcaactggacagcctgagcaagaaagccgtggctccgcgtgggggcgggacaaagctgcagttcgacgttctgagcaacaccacccgtgagtacgtggttgtgcgcaatggggttccgatcgatatggccaatgtggtgggtaaggaaaccattgttgggatgcgaggcgcgttggtgctgaaagcgcccaccgctggtgacgttctcaccattgagaaggacggcagtcaatgcaccatcaccatcccccagtcgggcgaactggacaaaccaattttggaatgcaaggaggttttatga

SEQ ID NO: 497326 - DNA, 378 bp, Stenotrophomonas maltophilia
atgaaagcgcttctttttgcgttgcttttgttctcaggcaccgcttgggcggactgttcgatcacccccaaccaagactttgcggtcttggatcaggacggaggcgtgaacgtgcaatacatcatcgaatgcgacgaacccaccgccgccacattgcaaattgactcaagtcaaatggttttgcggtcggcgagcaatcacgaaatcccattgtcggcggtgctttcaggagagccgttgattgatgaagtgtccatcgatattggcgacgcgccattgatggtcacgattgaattccgaagtgtgttgtccacgtcggttcgctacaaagctgctggtgtttacagcagttctgtgcgtctggatctgaactattag

SEQ ID NO: 497327 - DNA, 501 bp, Stenotrophomonas maltophilia
atgaaaacagcactattaaccgcagcaacagccgcagccttactggcatcgggatccacgtttgccgcatcaaaatccaccaccatgaatttttcatttgttgtggcgtccacctgcgaaatttatttggacgttgacaacatcgaagtggcaaccttcgacgttgtgggtggcaacaaccctgaaaacttgggtgtgacgtgcagcgaagacctgccgtacatcgtggaagcatcgaccaacgcagcaggtcaggtgatcgctaagtccaccacgtctgcgcgcgaatatccggtgacctttgtccgtggttttgacacctattctggtccccgcttcggcaccgacgccaacggtttggcgcactcgggtgtcggttcgggcgcgcaccagtcaatccccttcgcctgggaattgagtcagcccaatggtgatggcacgttcaagcaattggcaccgggcacctacaccgcctccgtgacctttaccgtgacgtactaa

SEQ ID NO: 497328 - DNA, 513 bp, Stenotrophomonas maltophilia
atgaaaaaaacactaattattgcttccgcagctgccgttgccatgatggcttcaggatcgtcgttcgcagcttcaaaatccaccacaatgaatttttcgtttgtggtggctgggacatgtgatatctatctgtccactaccgacaccatcaatcaaacagacgttcatgatatcgctggggaaggttgggacgacaaccttggcgtgttgtgcagcgaagacctgccgtacatcgttgaagcttccacagatgcaaacggacaggttatggctacatccgccacatcggcgcgcgaatatcccgtgactttgtatcgcggattggacacccgttccgcaccgaagttcggtaccgatgcaaacggtttggctctttcaggagtgggtacgggtgcacaccaagccattccgctgtcgtatgaatttggtcagcgcgatgcctattacggctactacaagtcgctggcggaaggtacatacactgcatcggtaacatttaccgtgacgtactga

SEQ ID NO: 497329 - DNA, 1044 bp, Stenotrophomonas maltophilia
atgtacacaacagggctactgcatgacgttaacaaacacatttcatccgccaccaacatcaatcagcggtcgggcacggctcaattgacagctttgcaccgcgccgtcgatgacaaattctacgaacctggggttgtcaccgcgcttgtcaacgctggcatcgatcccaacgccattgaacgcaaccaccgcacacctttgcactatgcgcgacacccagaggccattgccgaactcatcgcctgtggggcggatcctaattttaccgatgtcaatcaacaaaccccattgcacgtcaacctggggaaagaaaaagctattgcgcgcatggaccgcatacatgcgttgatcgatggtggagcggatctgaacgcccgcgattacgagcaggccacaccgttctttcgtgccattgaagccaagcggcccgttggcatgattgagacgctggttgagcgtggggccgacatccattgcgtggctgctggcaatcaaaacgccttgtgttggtccaccgcagaagacagtgtggacgtgacgcaaatgcttattgatatgggagtggatctcaaccgcccaactctatccggtaaaacaccattggcgtgtgcattagcgtaccaacattacgagatggctgagattttgctgtctgccggtgcggatgcatccattcttgatgtgaacggtgccaacgcactgcaccaccttttttccagcaacggcgttgccaaggatcgcagcgaactggcacgcaaggtgatggacaacagggcggatatcaacgcccaagaccgatacggcaacacgcccttgcacaacgccgcgtctttaaaatcggagtggggggttcgtgttttactggacaacggtgcagacacatcgttgcgcaacgctcaaggcacgaacgcccaggagattgcgtatggggatgatgggatgttgcagaccattgccgcgcacacacagcggcgcgaaattgagtccgccgtcaatattgtacgggacgatccaccccgcccatcacgatggcgcagaatgtaa

SEQ ID NO: 497330 - DNA, 741 bp, Stenotrophomonas maltophilia
atgaacgagatgattaaatccatttcaatacaaaaagagttggcgcgacatcaattggcgaatgagaaatttgaggctctgatggcgacaattgaggctgcactccatgaggcggacaacatgcatgttggtggtgctatgcgtagcgccctggcccaactgaacttccgcaacttcgattgcatgaaagatgcgcggaacacacacgcaaaagcccttacggagaacagctggtcaacaatcatgcgtgagacggggctgaaagatttcatgtgccacaaaaaacgcgttgagtggggccgggcgttctatgagaacaccgttcctgagttcaactacgacaatgttgttgcgacgtttgcccaactgtacgacacgcgcacagacatgtttgaagacggtattgtcggcgtctttgaaggtttgtcatgggactacaaaagccatcttcccgttcgctttggaaaaaaaataattttgcaatacatggagagctggacatacttcatttcaagagacgttgtgcaagacatgatccgtgcgtttcacatgttcgacggcaagccgcatccggattttagaagcgcagcttcaagccccgaggtgttctctgagtacatggatgtcaccttttacaagaacagaaacgcccacattgtgttcaagcgtcttgacttggtggacaagcttaacgaggttatcgcccgtcgctacgaaggtgcattgccgccgccccgataa

SEQ ID NO: 497331 - DNA, 681 bp, Stenotrophomonas maltophilia
atgtacgacaatgaagacatttatgatgaaggtgatgggcaatatctggaaatcattgaggtcactgcgttcaatccctccatgtcgtttgacgaggatggagaggatcgattgatcattgagcaactgagcgttgtctgcaaagttgagtacattgatgaagacggagatgggtgcgttgcatggtttgacgcgatccttaatgatcgcggcttgcacttcgatggcccaaactctcttatgagtgaagatgagtccaacgattggttgtacgagtgcgtcacaagtgcgtttgaagaagtcatcgactccacggtgtacgacctgggttatgaagtggaccacacgcgcatccctgtttccctgcgtgatgccgtaatgacatttgaaatgattgacgatacatatgtccacgtcattggtgatagtcattatgtgtgcactcatgaatatttaaactcggatggccaaggtgcaagccttattggctcagccgcacctttctatgtagtggagcgcaactcagatttcattatccccattcaatccgctgccgaatatgtttcggtggtaaacaatttggatgatgagttccaacgcttgcgattgcagcagcacgtgagcgccgctgagcagacacccactgaggtgcagcgctcacagcaggtgcggcggatgtag

SEQ ID NO: 497332 - DNA, 531 bp, Stenotrophomonas maltophilia
atgaagatgacgccagagctcgcacaggatcttgtgcggcttcaaacgctaatggacaaggccaatgagcctggggcagatccgcagactgtagcggctgcgtttgccgcaagccaagttgttgtgcgtgcgcacaacaaggaattttccgaattctttgcacgccgcttgaacggtgtagcgctttcgttcaaccgtggtgagttcaactattcgttcaaagacgccgctgacgcagcgcacgcttttacgatgctgacgatgcagcaggttaacgacccaaaatcaaaagccacatctggcgctgttgttaacttgctgcttagggatttgcagtacaagtccagctttgacagtgacgagtcctacttgactgcaatcttgatgattgcccattccatgcacgcctttcgcgtatccacgttcaaacagttcgttgctgaggggcagcgcatccaaaaggcaacgttctggcgctattttgtcatcggcgcagtcgttgttggagttgcctacctaatcctgggttaa

SEQ ID NO: 497333 - DNA, 837 bp, Stenotrophomonas maltophilia
atgcctttgacacaaggctgcgtgttggaggagggaatgaggctcggtcccaacttcaaggggcactctgtcatggctgtggttgcggcgataggaagtatcccgcccaaagatcagtacgaaaccaacgatgagttcaaggcgcgtacggagaacgtgctgtccacgaagccatctgcattgcgagacggtcatctgtgtgtgatcagtgccggtgcgcgtttgacagatgacttcgacgcggacgcacaagttcttcgggtgcgcacgcttggtacgtacagcagccgatggtttgatggcgagaaataccatgatatcgccaaagtctacgggggtgagagaaacgttcgcacaagcgtctacgacgcaagcaacgcctatggtgtgtctgtgtctgtcacaaagaagaaacgcgacgcctattacgtggcctttgataagcaatcagtggtggacgccggggagcttccagggctttcgtacaaggagttttcactgagagctgatgtggatatgagtggtgctgatgcacgcgctcaaaaggatgatattgacgtagtgtacttgtacggtgtggttcgcccgtatgtgggtaaccactctgagtatgagttcccgaaaattgattggccctttgagtcggaagaaaaacaaacactggtaaccgcatccctcaagaagttggctgtcatcaacgttcgcactggtctaattttgaaagtgtttgatctggctggtgagcagccttcggcgtccatcagttctaacaccaacaatggttatcttaagagcctggggccgtctacaatcaagaagccctttgtggtcaagtga

SEQ ID NO: 497334 - DNA, 480 bp, Stenotrophomonas maltophilia
atgcacgtagagatcatgagacatcatttcacaaagatcattgagaacaaggcgcgcacaaagccgcccgaattgcagaactaccggatgaccaacactatcgctatcacgtacaaggatgcgaacacaccaagcccaaagtattttgtgctgacgtgcttcttgaacgccgaaacgatgagcgacgccactgccgaagcagccgagcgaaacttgaccgtactgcaagtcctaacgcctgtgttcgatgccatgtttcaagacacgacatatcgtcctgcaacaatggtccgatccgttctaaacaattttgaaacaggtatcgaactctgcgaggatgttgcaacgtttgaagacatccccgcagacgctcgatatacgggcttcatgggatcgtgctatggacgtgagtacatccacttggtctacaagttgttgcacaccgacaccgagataatcccttctactgtcacagtctga

SEQ ID NO: 497335 - DNA, 519 bp, Stenotrophomonas maltophilia
atggctggttttgttgggttcttggtactcgggcttgtactggtggtcttgttcaatgtcgtggcgtccagggatcgggtgatccgtgagttgcgtgagcagtccacccagcagggcagagacatcgcggcactgcggcaggtggtggacgcgattgcggatcgtgtgcttctgagtcgcgatcaacgacgggtgaagtggtttgacgaactgccgccgttcgccctggatgacttcaaagctctgagcgccggttccgagcgtgagttgatcatggcctgtggggggagtgacgacgccgaagtcgctggcctgcactaccggcacgaccggcttgagttccgctccgaaggtgagaaggacgcggtggcctacggctttgctcgcccttgggcaaccgttgaggatcatccagtgaagatctatctcaatcagtacgcgcttacgtccaaaattgttggctttgagcaggacggatttgtgaagcttgccccttaccgtacgcggcttcctgagtga

SEQ ID NO: 497336 - DNA, 1356 bp, Stenotrophomonas maltophilia
atgctagagaatgaacttggattattgatccgtgagcttcatcgggccaattgtggagacttcgattggttttcggagcaggatttccccaattttgttgctgttggtgaggttcagtgtcatttcacaagcgctgccttggtttcgctcaccaagcttggtcgggagctacataggaaccgtgacctgccacggaaacggatcgaacaagatgatctcattcgaatgctgcgggtcgtggtcgctcatgcattttttgagggagtcctgatcgcgggagaagcaagcgtgatgcgatccactaagaaaactttaaaagaacggcttgaggcagagatcgacaagcgtgctggtcgcgtcacgcatgtgtttcccatcgcaacaactgggttcgagaaagccggtccactgaccatgggcccggttgaattgattacggttcgtcagtggattgagcaggtgcatgtcaaccccgatcccaatcgtgaagagttggatcctgcgtggaagcaagccgtacttggtgttggggcgcaagtattgaatcgacgctccgaggagatctctgagacggttaggtatgcattggggaacagtggcgctgttctccgagtgactgttgatggcttcgagaccgccttttcaagaaagtttggccggattgttgcgcagtgttgcttggatatcctttctttgctccatcgcgttccggctgttttcaagaagcaaggaattttcgactggaattctcgccccctttacgcgccatttttttacgaaatggacggttttcttgggattgatagcgagcccaatctcccgtatcgcctcactagttcgcaaattgtaagtctgagacgctgctttaatgacttccaggggtcaattgacaaagtggtatttggacttctcaatcaaggggttgtgagaaatccaaagctctgccagcgatggtccacggcgctcaactggtacgcggagggctgccgagagcctgatgatgcagttgctgtagctaaaattggtaccgccttggatgtactatctggtggcggggaagagcacgggatactgaatatgttgctggttcttctcgaaaaacaagaggaccagagcgtgattgaaggttatggagagagcctaaccttgaaggtggtcgtttttaggttgtacaagcaagccggtcgttccggggttttacatggaactcatgtggaccgaacgaagtcatttgacgaattaaggcagatcggtgaaatcatcgctggccgcgcattgttggaaagcttgcggcgacttggttcttacgagggggccgacgaggacagggctttccgcaccatggtcgctcggtga

SEQ ID NO: 497337 - DNA, 441 bp, Stenotrophomonas maltophilia
atggcccgccagaccaccgtcaaagcccaccctgagcctgctgcggccacctcgccgctgttgccggtcaacgtcacgtgtggcttcccaagccccgcagaggacttctacggggcaggtgatgggctggacctcaaccagcactgcatctccaaccctattgccacgttctttgcccaagccgacaccggcacctcgatggtgggctttgggatccaacctggggacaccctaattgtggaccggtcacgcaccgcacgtcccggcgacatagtgctggtgaactgggagggtgggttcacggtcaagaaattggttcagcggcggggtcgatttgaactgcattcgtccgcagaagacatcccgcccatcatcgtgccgcccgacattgaattggatctgtggggagtggtcacgtggtcgtttacccggcacgcttga

SEQ ID NO: 497338 - DNA, 816 bp, Stenotrophomonas maltophilia
atggggatgtgttcatcgtttaggtcatatattcatgggaagtcccttgagttattgatttctgtaattgctttttttgatcgactcttgatttgtctaattgttgcgtgcggtgtaagagcagttcaattattcttgtcggtcaagccaaaaaaggccggggacatctttgatagtgctgttatgtacaactcgcatttcaataattcagcatcgggcattcttaagagtgctgcaaacgttgctgggtttgaagtcatacgggatgcattcttatacaatgcagctttcaatctggacgtggaaacgtcaatcgagttggttaattcgggcgtgcttgatagatgctgggatattgaatgccttctctttgaattgtctgtgtggtgcaaacgtcaatcggaaattgaaagtttgatggccgcaattattcgtcggcgctggaatgtgagccacctcaaggtgcttaatcaactgactcgcccgccactagagaatggggcgtcagccgtccacaatgttcttcggatcatgcagaagaatggctacgacttccacggcggtcttcctgtagcaccagagacattctttcaccccaatcccagtcctgggttgatttcagacttgatcgagtggggtgtgtatgttgagcgtccgacggaacatggcttgtcggagatggcggcacacatcaattctgaaatagatgagggcgaacgtcgcatcgccgagcgtgacgccggcaatatcgtccaggcacttgcagacgctggcctgactcaagatgacacccctaagccgaaaagaaagatgtaa

SEQ ID NO: 497339 - DNA, 954 bp, Stenotrophomonas maltophilia
atgggtttttttcaaaaacttaaggggatatttgcgcgggtagccgttgagccggtcgttgcattgcctgtggcagttgaagaggttgctgccgtagaagattgtgtgcgtgatagtggtgctgacgaaataagaagttctttggtcctattgggctatcatcaggatgttgctaatcttgtggtggagggggatttggcgaaagcagatgactacttgtcaatctatcgctacgaagcggcacgcgtgtttaattgtgctgttagctttacggaaaaaacatcagtttcccgttcggatcttttaagggtcgctgcaaaatatattgcagatttctcgcgcatacatgaaaagttttttgtcaacacggttggcaaccttgacgttgaaacgtcaattgaattggtggggcagggtgttttaggtgttcattgctacagtgagctacttcttcttgatctgtctcaacatatcgactgccatccgcgcatggaggatcttctgcgcgcaatcattcagcatcggctctctttgaactttgatgggatgctgatgttgctggcgggcaaagacagagcagaaggggggggcttgagtggactgcacaggttgtcaaaaataatgcgcaacaagggatatgatttttcagtctgcgagccggttgagatttggccatttttgtggtgcgccatacattgcgaacattttaaggctggcgtaatttctgatttgctagcttggggtcttcgcatagaggatccgaataactatctgtccattaaacatatgcaaaccattcgtccaaagttcatgccggtgtttaagtcaataattgatgaaatgcgtgagggtgaacgtcggaatgccgagcgagaagccgccaatatcgcccaggcgcttgcggaagcagggctgacgcaagatgacacccctaagccaagaagaaggatgtga

SEQ ID NO: 497340 - DNA, 1263 bp, Stenotrophomonas maltophilia
atgtctgttgcgcaaccattgatcggcttggtggatgggaacaacttctactgttccgttgagcgcatctttgaccccaagttgcgtggggttccggttgttgtgatgtccaacaacgatggatgcgccattgcccgctccaacgaagccaaagcacttggcattggaatggggcaaccaatccaccaaattccctcgcacatccgcaagcaactgcatgtccgaagcgccaattttgcgctgtacggagacatctccgcgcgcattgcaacgatcctgcgcgatctgtttcccgacgtggaggtctactccattgatgagagcttcgtgtcctttgacgggatccgtgcgcaggatcggcgcaagattgccatggaggcccgcgcacgtattttgaagtgggtgggcgtgccctgttgcgttgggatcggccccacgaagaccctagcgaagatgggcaacaagatcgccaaggggaccgagcagggcgtgtggaacgtgcgacgacccgacctgggcaacttccccattggcgacgtgtggggtgtggggcgcaagtttgccgcgcgcctgatggccgaaggcatcaccacagccgcccatttggtgtccgcagatccacgaggcatccaggaccgctacggagtggtgctggtgcgcacgcaaaccgagctcaatggggtgcgatgtgctgagctgcaggaggaagaacccgagcgccagcagatcatggtgtcccgctcattcggcagcgaaatccacacacacgacgacctggcacaagcggtggccaccttcgctcagcgtgccgccgagaagttgcgcgcccgccatctcaaagcgcacggggtgtgggtgttcttccacaccaatccgtttgggaacaccccccaataccacccgtctcgcacagtccgcctggttgcgccgacatccgacacacgaactattttgggagcagttcaggcagcaacggcagcgatgtaccgccccaacgttgcgtggaagaaggccggggtagggctggtggatctgagcgccgaacacatccagcaagccgacctgttcgccccagtgcgcaaccccaaaaacgaagccttgatgaaggtactggacgcggccaaccacaaatttgggcgcggcagcgtgtccttcgcgtcgtccagtgcagcgccggacagtacccccgcatgggccatgcggcaggagcatctgtcgcgttcctttacgacacgttggagtgagatactggttgcccaatga

SEQ ID NO: 497341 - DNA, 816 bp, Stenotrophomonas maltophilia
atgaaatggattttcggtgttgcagcaatggccgcgtgtgccaatctttgggcgagtgtatctccgcttgcttcgccatgcgtgttgactgttggggccgtggttgggacgcatcccacattggaagttgccgcactgctggaggcggcgccgacgaaggatgaattccagacatcggagcaacacgcagcgaacgtaaaggcatttcttgcaactctcccggcacaagtgcagggcgggcaattgtgtgtatcgccaatcgccgaccaaaagtttttcgactacgacgccgatgcccaagttttgtgggccaatgtggaagctgcctccggcacccgcattttccgtacggctcatgggcggatcactgtgagggatgttgtctccgatgaatgggacagcgtggtttccgaccgagtgatgaccaatgctttgggtgtcagcgtggatgggttacatgccactggaaaagcagcatccgttggcttcaccagcgagcagatggacgcatttcaccgaaagcttccttaccaccgcttcaaaagcgcgtatgggtcaaaggcaatgtccgtactcatggatccgaaccaggcgcgagacgtaaagccacacgcaatgttggtgttccagtacaggctgcgaagcccatatctggctcaaggaaccgatgttcatgccgctatgatggacagccctgggagctttgccattgagaaatcggtggtgctgggtgacctgattgccgtcggcattgtggatggccggacgggtgaagttctcgccgtgacgcggaatgaggcagatccagcactttaa

SEQ ID NO: 497342 - DNA, 1422 bp, Stenotrophomonas maltophilia
atgatgaccatcgatgatattgccaatcagtttaaggaatatatcgagaatggcggcagcagtgcgcgtcgagatatgcaaactgtatctcagatgatcgattcaggcgagctaacacaagatgatgttcttttgcgtgagaatttcgttgagcgatatgtgtggcttatttgcaaatcgagaaatatcttcttgtcgtgggcgaactccgataatgggcggccggtactcaatcaaaacgcgggtatcattgggatggttgacccggaaaatggaaacattgtggcgttcacgatgcgtcactctgaactagctgaaattgaagtcgatataccgaagaaagggaggtacgccgtcatttcatatgaggatttttcagtttgcctgtacaagtcgtacgaggactatctggaaaaatggaatgaagagcatggtgccccatctgagtatacggacgatgcgccatcgatggcagaagagctaatttccaagttttcagagttcaaaaagcaactgcaaaacgcggaagatggcaatgatgatcgtgcgttttcttttatggagcgcatgaaagccagcgcagactcatacagacgtccgaacacaataagagaggcgcgaattcaagctgggtcagtgttcgctgagtcagacgataagttgctagaagctgttgtaaagggtatctatcaaagtcgtcacgttgacatagatccgaacgatcttcgacgctgtgctattgctgccatctgcgctggacgggatttgctttacaaacaaaatggacgagtggtagatgactcaaatccattctcaaatgtggccgcttctaagtccccggaaggcatcatccattcgtttgcaatgagcaatcatgttgttttctttggagacgagccactggaagaagatgagcgtctgacgttcgatttggactacgttccactttcgatccattacgttgacgcacgcacgcgaactgttaaagaaatcacccaggaaggcgagccgaagagtaaatgccaagattttccgcgcctgttggatctaatcaataatattggtcacgatcaacttggtgttgttgcaaacaatttggctgtgatcgatggaatagccaacgagcagctgccacaagccttggagctggcgctgtcagtcgcaaaaattggatttaaaggcgggcagctggacgccgtaaacgtctatatccgcgtgcgctatgcaatgcgactcagtggaaatcaagactggtctgttgccaccagtggccgcgttgtcaccggacgcaacgctgccatcattctcaactgtgatgccggggcggggcacatctatgctgacgatgatgtgtacatggcatctatcagtcaaattttctttataggcaaggatggcatcagtcgatttgtacgtaattga

SEQ ID NO: 497343 - DNA, 1305 bp, Stenotrophomonas maltophilia
atggaaaattggatagtgattgttgcatttatacttatcctcggagcatttttgtacgaggggtgttgctcttatatcgcgcgtaggaaagtgaagcacagggcgataactgctcctgcatgtgtggaggaagaacagtctttagatttgaagaatagccttaaggcaattgagcaatgctcgacggaaagtgagcggatatcgatgggtgtgtactgcgcgcgggaagcaaacctgcgaaaaagccttgaggacttcacaaagatcgtttcagtctgtgtcaacatcaactatcacttggggggcagcgtcacagaccaggggcacaaaaacacaactttgttgcacgagtgcatcaaagatggcgcgtacgattttgcaaaagtgctgattgagcacggtgcggatcccagtattggggttagccgttcgtgggaactgacggaatacgaagccaagcatgcaactccccttcattcggcagtgcaggatgaacgaattgaacttgtgcagttgctgcttgacgcaggagctgaccacagtgcggtggatggaaacgggtacacgccgctgtgtgtggcagtgagaaacgacaaaattgctattgcaagggctctattggaagggggagccaatcccagtcaagtgcatgacaccgtgaaatgcccgcttctgtgtgcaaactcagcggctatggcgaagttgcttgtaagtaagggggcagatgtcaacatggtgatgggaaatggctatcctcttttgtccatgttgatctacgacggaaaagccgcaattgctcgttatattttcaaggaataccgactcaggtttgacttgcgagacaaggatggacagtggttggatcgacatccgctgattgttgcatacagatttaatgagtatgatctgttcaaagaattggtcgaattctcttacccaaaccagcttggagcatggggcggaattcaagagacgactgttgaatttgactcgtacgaatacacgagagtgttacttaaacgaatggtgcgactgggcttatctgttgatagcgcattgctgtattgcgcaaagtcgcgccgaatgcaggaaatgcttgttcagtttggcgccgatccaactattaaaagccctgaatacgggaaaaagacgcccgatgaatacatggttcacgtgaatcgtaaaactgtctggcgtgatctgattgagcgggctcccagcattgtttctgaacatcagcggaaattactggcggaagcagtggggctggaagctgagcctgcaccagtcaagcggcgcatgtaa

SEQ ID NO: 497344 - DNA, 999 bp, Stenotrophomonas maltophilia
atgacaaatttgaagttgaatgaactgcttaaaaccgatgaatgggaagctgttttggatcgtggagaaatcaaggaatattttcaaacccatgacgtgaatgagacgttctatgtgagtggaggtacgagccaaactctattgaccccacttgcttatgtggcgtccaaaagtatcaacaataacgatagagagatggttcttgatgtgatgagggatttgattgaactgggtgcagacgtgaacgcgccagttcgcaagagtgattactatggcgacgggttcttagatggtgacaaggaattggtagaccttgctaatggtgcagatcgcatcgaactgttggtcaaaaatggtgccagggcaaaagagtcgcacatcctcactttgttccgagacggggcggatggagcattcattgcagaaaattattctgacttgataaagcccaggcatttcttctacttaaagaacgacgatgcaagtgcagcaatcatagatgaactggcacttacgggttacgacttcaatgttcaggatgtgagcggtgacaccgcgctcagcatggtgcaggacattggtgttgtgaaacgtcttgttgatgcgggagcttcggtgcgtattccgaacaatgatggtgaaacgttcttggatcaatgcgatgcagggtttattgagagaaattcatctgctgagggtgttgaaatcatgaaagaacttggcgttgatttgaattctaaagatagttatggtgattttaccgcccttcatatcttggcgataaatggcaacagattggatggtattagaaatctgttggacgccggagctgatccaactgttcggaatactgatggcaagcttccttctcaagtggctttcccgggtgaatatcgccgtgaagctgtattgctgttggaaagcgcggtcacaaagagaaaattgatggaagaattgggtgagtcgcaacaacaacctatcatgcggcgaaagttgtga

SEQ ID NO: 497345 - DNA, 708 bp, Stenotrophomonas maltophilia
atgaaaactagaacgatgcatgatttgcttaaagccagtgaaattgacgctatgtggggacgtgagaaaatcaaggagttatttcatcacaatgggacttatattcaatggttatttggtcgtggagctgacgccgctttcattgcggacaattactcagacttgatagagccaaggcacttctcacacttaaagaacaatgatgcaagtgcagcaataatcaatgaactggctctttcagggttcaatttcaatgtgcaagatcataacggtgacgcggcgattagttttgtaagggacattcaaaacgtgaagcggcttgttgacgcaggggcctcaatgacaatctcgaacggaaaagcgtcctttattgcaaagcatgcgtctgtcgaaggcattaaaatcatgaaagacctcggcattgatttaaattcgcaggacgcggatggcaatacagcgctccatgtaacgatgatgctttgtaatgcttatgagggcattgaaggtattagaaacctgttggacgcaggggtagatccgactgttaggaacggagaaaacaagcttccaaccgaagtgggtttcacttggctttgggacgatcgccctgaagctttaatgctgatggagagcgtaatcaccaaaaagaacttactgaacgagttgggtgagtcacaacaacaatccatcatgcggcgaaagatgtaa

SEQ ID NO: 497346 - DNA, 1536 bp, Stenotrophomonas maltophilia
atgaacgagcgaacaatatttaacgacgatgaatttgttgccttcatcgatacggcgacacccgaggaactgagggaatacttcaaggaaacacatttaagtcacaatgtgaacgacacttttcttgtcgagctaagcgatggaattgattttgctggcaacgcacttcaatacgcaatctactcagataaaacagacgcaagtcatgtccaggcgatcattgacagtggtgcaaaggttgaccgcattgagaagccaggtttgcatcaactgtatgatcccaacgtgcaggatccggacgaaaatgattacattcaactttccttcgatccattcactgatgcgtcggccgacaaggtggaagtgattacccgtgccgttgaagagtacagccagtgggttaatcgaaagtacagtgacgcagaagtttacgatttgctcaccaaaaagaattcatcgagcattggcgactacttcgaccgccatgacccgaacgcggaaatcacctgggagtaccccgaaaaaaatttgaggtacgtcggctccatatgtggtttggcagcgtttgatgaaaaggtggatggctattacggcttcaacacagttttaagcaagggcggggatccgaatttgctgtgtcgtgttgaaaacatcgacaacacggaaaattacgacgaattaaccgtcaccgagttgtgccattcggtcgataaaatcaaccgtgccttagacaagggtggacttcccacggaacatctgttgggcgacgttctgtatggcatgaaagaggaagctgctgacgcttctcagtttttttctgtccatgattttgctagtcgaatgacgatgccagaggaacaactggaagaagcgcggcggagagaagaattcgcttccaataatctcacgcaacttgcgccgcttgaattgaggctagtcactgaacaccctgatatctttgaagcccaccacatgcatggaatgacaaatccccaggctgtagcagaaatgctgctaatgggacacgatcccagcgtcgagaatgaagacgggcaaagtctgatgttgggttcgcttttaagcggaaattttgagacgtttgcagttttgcagcggttcggcgttgagcctggacccgaaggtcagcgccccatggatctggtggttaagcactatgaaaaagtgcagaaggaacatgtacctggctcaggggagtttggagagtggagaaaatgccaacatgccatcaagcatctcatagatgtctctgatgatcttacatctgatttggcgtcttacatgaaactcaaatcgcccgacgctgatgtgatcgttgagatgattgatcgtggcgccgtgatgagtgatgaagcgcagcagaaatatatgtcacgcggaggaagcagtttcttggatgagttgtaccaggctggcaaggatgcagtccaagatgccctgaaccgacagcaacgggatacgatcctggcggaagttggggaggtatataccccgccaaccatgagacgaaagatgtaa

SEQ ID NO: 497347 - DNA, 1029 bp, Stenotrophomonas maltophilia
atgacacaatttgtattgagtggcgcatctaggattagtgcttgggcggcaaccgccaaaacaaagatttctggtgcaaagcacaggttccaatcaaacagatcagcaaaggaaatggagcgtgcacttgctacacgcccggttggttttcgattggcgcgcgcgatatcaaaaggcgatgttgaggcattcaagtcgttgttaaggctaaatccgtttattgctcaacaatacactgcaataggtacatccgaatttcttacgataaaccacataatctgttcttccttggctgatgttcaagttcaaccatacaaagaagagatgatcttgttagcactcaaaagtggtgctgacatcaacgcgcgtttgcatggtaatagttggaccgcattggagtcagcggtttataccaagaacattaaacttattccatttcttatcaagcatggagcgcgcccagtggatggcgttcgtggcgatgttctaagcgacgaaaacattgtgcagaaatttttcagatgcaatgctggctattttcggtgtttgcgagtccatggtgcgcctctgttagaaattgttgacgcttttgcttcaattggtttggtggagaagtgttccgatccaagccaagtgctacttaatttatgtcattcagagccgtctgcggagaatttcgttgcagtgatcaatcgcttaatgaagtcagggctaaaaaataatgaagtacaacttgacctcgggtggctgtggactatggtaagacaaaatcgagatggatcaattgacagaactgttctcgaaaaccattttatcgacagtttggttgcaagtggttttgaattgacggatgaacataacatctgcggcatggaggtgtcctctattcctattgaatggcgttcatctatccaggaactgattgctcaatttacagctgcgaaagcaagaaaagagaaggaaaacatcttgcgcgaacttgctatcgcttcggaagatatagaagtccggcccagacggcgtatgtaa

SEQ ID NO: 497348 - DNA, 834 bp, Stenotrophomonas maltophilia
atgatattagaatttgagcgttatccgacaattgacacgttctcagaaaagataaaaatgcgctgcttgcgtagtgttgaaaagtggcatgcggttgaaaaaattcatggtgcaaactatcaattcatcacagatggggttgaggtccaatcggcatcgcgcaatcgcatacttacaagtgaagtcttcttcaaccataagattgtctttgatcggtatgcaggcgttgtgcgtgagaattaccaactcttacttgatgaaggcgtcattcgccagcatcaaaccgtccgcttctttggtgaacttgctggtgaggcagatgggcttaaagtccagcaaaacgcagactacggcgcattggatttctacctgttcgatatcgtagtggacggcgtgcgtcttccatatcaccatgtcattgatgctgtcggactaaagaaggctcccatcgttgcgtccggggctttcgccgaagtcatacagcacggaaacaaattccccacattggtcgatggctcatgcacatgcgagggctatatcctacgctgcgatgcatctggcgaggtctacaaattcaaaaatgacttgtttgtagagaaggttgtcgggtcagggctgcaacatcagtatccgctgtacgtcaccgagaaccgtgttcgcgctgttctttcaaaagaaggtgagtttgagcgccagcggttcaacgactacattgacctggttaagaaagacatcgagcaagaaatgctcgccgatggcgttgctgtggacttcgacggcaaagaaaagcagttgatatcgcgcgtgattgcgtcggtgggtttggggcggtga

SEQ ID NO: 497349 - DNA, 1431 bp, Stenotrophomonas maltophilia
atggagaaaaaggaaaagcagttgatggacaaattggaggcaatgctggaagcaaatttggatgtgagtgaagttctttcaaatttgccgctggtggctgtgtgtgaactcaccttgcaagatattctgtcgcgtcaattcgttctctcccacgcgcggagcgtcgggcttgtgcaagcggccatggcagctggtgccgatccgaacgcacgaataccggccttttatacggttctcagcgatgccgcagcggagttcctcgcgcctttgacggcgatgttggatcacgaagagcgcacgcagaggtatcacaagtatgtaccgcactatctgaacatttttgacgatacagaaagcattgataccgatcgtaattggctcaaaatgtgtgggaattctttagcagtgcaccagatcgtcagcaccgagtacctgggcgtgtccacggccacgcaagacacgtccttgttattccatgccaacagcgccgatcacgcacgtggcttgattgagtgtgggtgtggggtgaaatccttgcacaacagtgagcatgccgatgtcgtgcactaccttgtgtcgttgggtgtggatccaaacgcccaggacgagcaggggcttaccccgctgcacaccgttgtaagcgccgaagcggcaaaggcgttggtggtgggtggggcggatcccaaagtcgcgacaggccgtaagaaaggctggacgcctctgcacacagcaagcaacgttgacgttgcccaggtgctgattgatgccggcgccaacatctctgcacgaaccaacgaacgctacacacccctgcacacggttaccagcgatgtggctgcgttgcttctgagcaagggcgcaaatcccaacgcgcgggatcgcaaaggccgaacacccttgttccatgagagaaggcttaaggcgtcgcgtgttgaagcatttgttcaggccggagcggatgtcaacgccaaagatcacaaaggagctggaattctcagttgtggatattgctgtttcgacacgcgttccgttgaggtgttgctggacaatggatacaacccactggataaagccaatgacaccacgttcaatgggacacttttgcattggttgattgacgagacagtgaattgccggctcattcatcgcgttattgacctgggcgtggatgtcaatgcgcaggacaaagatggcgatacagcgctgcactatctggcgcagactgattacaccacgcgaatgaactggctgctgcaacgcaaggccgatccccggatccgcaacaacgagggtttgagggcgtcggacattgctgtgatccccaaagcaaagaaactgctgttggagcatgaagcacgctgggacaaggccgccatcaccaaggctgttggatcagtgcgaaagcagcctgttgcacgcaaaagaatgtga

SEQ ID NO: 497350 - DNA, 393 bp, Stenotrophomonas maltophilia
atgtcaaaagaattttatgcgcgcgtttgcttcttagcgttggtcttgggggtttttgttgaaatggtgggttatgtatatatcactcacaatgctctggtgtacaagacaggcatcgatatcaccatcgcctgtctggcattggttcaagcctttgttctgtctaaaaagtacagatatccgacgccagagtccatttcaagaactcaagaattggcgtctttgctgcaaggtttgacggtgttcggcttggctttctatggtgcctgggccatcggtggtgtgtggcgaagcggcctgtttgccgcgctgttggtcgggctggtgctgcggttgatcgtcaagacatgcatgcagagatattcccaactgcacaacagtgttcagtgttga

SEQ ID NO: 497351 - DNA, 561 bp, Stenotrophomonas maltophilia
atgctgaaaattaacgaattacgacctggaataattgtctacgcctgcgttgaggttttgcaacgcaacaaggttgataccaccttacgtgtcacccacccattgctgtgcttaggggtcaatgagaaggagggggtgtgggcggtggtcacaagtttggagacaagtttggaacttcgatcccgctggaaaattggcccaagcacgtggattaaaaagcgctcatttatccaccccgagcgcgcaaccctgcgcatacccaatgacgtgctcatggaagctgcagaggcaggggaggcggactactaccgcgacagctacgagcggccaggtgtgaagcccagcgcgttgcaaaccatcattgaaacgctcggggtgggcaactcattgcccagcacggaactagtcaacatcaacgacctgtccatcaccgacttggagctgctgttaagccggaaacacgacgagcaacgtaaagaggatctggtgttggttctcaaaggaattgcaaaggatgcagggtttgatctgtccaacgttgctttgtcgccgtgtaagtga

SEQ ID NO: 497352 - DNA, 522 bp, Stenotrophomonas maltophilia
atggacttgctcaaaactttaggacgtatctatcaagacgctgaccaatccacgagcaacttgatcgaacagaacattcagtttgcacaggggcagcaagaggatcaaaacattcggcagcatcgggtcgaggagcggcggaagcaccgccgttcggctctcgatctggatgcggtccagcggtcctacgacttggcaagacagatcgaagagcttcagagccaagtacgccgcttggaacatcggtgtgaagtgacgcgtgatcttgcagcagatctgatcttggatcgctcaagcatcatgagtgcgatgaaatcactgatttcgagctggaatgacccagtgcgtgaggaacagtttcttgcaagcttcgacaccgagcgccgcgaagaaaaggcgcgcattgagcaggacgacgagcgccaaaacgccgcctatcatcgggtggatgaggttgttaacagttggtccctgccagactctattcgccggagacgcccgcctgggctaaagaagacatga

SEQ ID NO: 497353 - DNA, 441 bp, Stenotrophomonas maltophilia
atgaacgagaagacctttagctggaaagaagcagatgagctggaaaagaagctcgccaaggatcttgccgcgcttgaagaaaagcaggctgctgatcgtcagcgcattcaggaagctcgccgtgcttccgctggtgaagtccttgaagaagcgttgaacactcttgccaatgttgccgagtacctgaccgacggtcagaaggcccaggtcagcaacttctttggcccggtgaagaagggtggcaagtcggctggttccaagccgcgcaacaccgtccccaaggaactgcgcgccaacaaccgcttcttgcacgacggcaagaagaccccgttctactacggcggcaaggggccgaagcccgaagccctcaagaactttgaaagcagtgaagcaggtaagaagcttcgtgaagaaggcaagccgacgttcggcgatctgtaa

SEQ ID NO: 497354 - DNA, 321 bp, Stenotrophomonas maltophilia
atgctgacgttctatatcaatcacaacaatcaaatctgcgacgagttcaacgcttctgtcagcttcaaatggaaccagactgtcgccagctaccacatcttcaatgcgagtgtctggacgggtgaaacatgggcggatcagccctacaaggtgattgcaagcgattgcagtagggaagccgccatcgacgcctgggagcaacttgaaacacgcttgttgacgcttgaggacgaggacggggagttctgcgagaacccaagcatctacgaactgtacgcgttgggaagcgatcactggtcaagtgagcaggtcaaatggtga

SEQ ID NO: 497355 - DNA, 279 bp, Stenotrophomonas maltophilia
atgcagagcatcattgataaagttatcgaaaacggatttgttgaattgaccgaagttgctcaactgtggagccgtgagggcatcgttcgcgaagcaattgtgcgcgccaagtcccgctcggatgaagagttgttccgtggatgggaaggcgacttgtccgcgtcgttttactacaccttcaactggatggacgcctcggagattgccgacagtgagcttgaagagcttctgaccaacgcccaacggatcaatacagaaagcgggtgggtggcccaatga

SEQ ID NO: 497356 - DNA, 204 bp, Stenotrophomonas maltophilia
atgaataaactcaacgcgtacatcgtcgccgtcatcgtggttgcactcttaatgagcttggcgctgttctctgtcgccgcagcgttcccaggactgggcgttactttggatatgttctatccggttctcacgtcgtttcttatttgtgtgcccgtacttttcatggactttgaaatcacgccacccaatacgatcgctcaataa

SEQ ID NO: 497357 - DNA, 177 bp, Stenotrophomonas maltophilia
atggaaaacatcttcaaccaaaccacattgaaaatcaccgccgccgctttggtcgttgtcctggctggatggttgctggtcactgtcgtcactgggttgttcaactcggcaacaagttccacaagcatgtacgaccgcgccgacgccgctttccccacagccggcaagatccgctga

SEQ ID NO: 497358 - DNA, 444 bp, Stenotrophomonas maltophilia
atgaatacatcaaccaaactcttcaacgccattgaaaacgccaacttaaaaaaggttcgttcgatcgtcttgaccaacttccgtgaaaaggacgggcgcgttgacgcaggacaactgaccgcgttgaccaacagccgcgcaacgacgtgcgacgccacacccatccacctggcctgctgcttgtaccgcaaagccattctgaccaacgacgacaagctcgctgctgtttacaactcaatcattgaagtattggtgcgcgatggctacgcctctttgaccaccatgatgaaccgcagcatcaaccgccgcaccgggcaccacgatgactcaacgggaacaacgatcttccaaatgttccgtggctgcttgcctccgttcgttcagatgtacatcaaaacggttgacatgaccacttacgaaaaacacaccgccactatcggctga

SEQ ID NO: 497359 - DNA, 180 bp, Stenotrophomonas maltophilia
atgaaattacgctatgaaaaaaaatacggtcgcagtgcaatgacgtactacacattgcgtgcagcgctttttgctgccatcgcattcaacgtctatggtgtgttttacgtcttctgtgtcgaagagaatgaccccatgatctacgaagcccccgtgtccatacaggagcaaatgaaatga

SEQ ID NO: 497360 - DNA, 1020 bp, Stenotrophomonas maltophilia
atgacaaatccaaaagacgaaatgatttctataatgctgggccttaataagcgcaagcgcacgaacatccccaaatatcaaaagccaaccatttttgataagttcggcggggtgtgtgcgtactgcggcgatgcactcaacggctcaaagaagaatgcgtggggcgtgacccacgccataccgttgcacctgggcggggagtcttccgccgacaaccgcattccctcgtgcattccgtgcatccagagatatggaacggccgactgtctgtcggcgctgaccgacaacgaaacggtgctgactccaacatggcatgcaaagctgacggccatgcgcgatgcagcgctgctgcgagcgaggaaccacctcaccccgctgtcccccaaatcggacatcgagcttgtgcgcaagaacgtgcaagggcgatggatccacgaacgcacaacggtgttcgccaccgtactgccaacacacgttgtcttcgggctgactgatcgcagtggatccaacaagcgcgttgctgagatggcttcgctgttggtgtttggcttcaaagcccagcggctgggcaacgatggcgactatgaagtgccggcagccaaggccggcttgaacctgttcgtcgtgccgcgcgatcgactgcttgcagcaacgatggcactgacagaagagaactgttggcttcgtgaggttcgcgtatcgatcacccctgagcatacaaacagtgaatggcgttcctactggttccgctcctacgccgcactgaaagacaacctcaaacgccgcgtgtacggtgaagcacaggcgccctggcacatcaagaacacactgtcgatgagcgcgggcgcggtacgggcgcggcgccactacaactcaaagagagccaagacactggcacggatggaacagcacgcccaggtaatggacttgcgtgtggcggcgggccaaccactggaagattgggacgaacgggtcaaacgggtggaacgacaactgcagctgcaactcaagttgtcgtag

SEQ ID NO: 497361 - DNA, 750 bp, Stenotrophomonas maltophilia
ttgaaagtaaatgcttttcaacttatggttgaaaataggtttgacgaacttttgacgagtattgatcgcggcgaagtcaataatctaaacgctgatggtagtgtgcttgggttgaaattgatgcattacgcagtgagctatgataagccgtatctaataagagagcttgctcgccgtggtgctgatgtgaattgcgttgatcacgaagggaggacacccttggtgtcggcacggacagtggaaacagttaaggctctacttgaagctggcgcaaacattaacgcaatggatcattctggtcttacgccaatcttccatctttggggtgatgtcgaaaccgatgcgattaaattgcttgttcatgcgggtgcggatgtcaatgcgagaaacaaagacggtgaaacgcttctaatgcatcacttcattagcgcaagtgagtggtgcgctaatgaagttaatccagtggcgtccctaatcgcccttggggctgacgttaatgcagtcaacaatgatggtgacactgttttacatatggcagcatatggggcaaatggtgaggaagtaattggggttctgcttcatgcaggtgccaatccctctgcattaaatgccaaggggaaaacccccggtgatgttgcaaacagatcgggcatcaaagcgattattcaacgagcagtgctaaacgcggagttgtttgcgttatctgagaattcaccgggccgcatcaagcgtggtgaaggtgggatctga

SEQ ID NO: 497362 - DNA, 447 bp, Stenotrophomonas maltophilia
atgaaaacaatcaacaagcacatcaaaattccagagcggcaattgcagcgggttgaacaacaaatggcccaaaacggtatgacatttaccgactgggtgcgcaatgcaatcgaggtcaagctcggtcgcgtcgaaacagtggccgcaatcgaagaagcaaaatcagatttgctccgcactcaagaggatctgcgtaaggagctggcaaatctcagattgaacctgatggcggatcaaaaaacgtttgtcgaagccgtgcggagcatcaatgacgcaatgtccgaacggcatatcgaaatttgcaagcaacacattagtggattgaacacattggcgagccgactcattgagggtggtggtttgcaaataaataatggccaaggaaatcggcagcagacatctacgagaaattccggtggtgtgtcgttcccgacggacaactcgtaa

SEQ ID NO: 497363 - DNA, 645 bp, Stenotrophomonas maltophilia
atgaaacaaatgattttaacgacagcagtaatggttgcattggtgaccggatcgatcggcgcacacgcccaggctccggccgaagatcaagcgcgcacacaaaaggccggaaagatcggttgcgtggttggcggaattttaggcggtgttgttggcgcgaagattttgaaagacgacaaagccgcaggcgctattggtggcggagcgctgggatgcgcgggcggtaacttctttgggaagaagtggagcaaggcaaaacaactcaaagagttccaagaggcaagcgcttacgcgcaacaagccggcttgaaagcatcggtcgatgagcgcgacggtgtggacgacaagggcaagcccacaaaagaactgggcgcaatggtgattgcgtacgaccccaaagatatgtcgccggtttctgaaaagacggcaacggtgttcgacaaggtggctgcgatcagttcgcaatccaaaaaccaattgacgtttgaattttccgggaaggccggttgcgaacttccattggccgaactgggcaagcgcggtgcgttcaacggagccggcgtgcaacacgcagtgaaagtgagttgcggccagggcgacaacaagtttgtcatcaccccactgcctgagattgctcagcggtaa

SEQ ID NO: 497364 - DNA, 1326 bp, Stenotrophomonas maltophilia
atgacagaagaacacagatctaaaattgatccgcgcgcattgcaaatgcaaatggcggacgacgatgatgatttattaaacgacaagtccagccaagaattggaccgtgccgtggataagaccatcgagacggcacacaagatgaaggacggtgcaaaaaaagttggcgccggaatttggtcgggactgaaaagcggtgtgtccgccggaaccaaaaagaaagaagatcgatcgcccgcgcccgtgaagagcgttgcggatgtccaggcacagccagtggtaagcaatccggaacctgcggtcgccgtttcagatcagcagccggttgtaccggagcatgtggttcaagaggtggagcaaggtccggtggttggggacgaagtaaaaccaaaagtgactcccacacccgtcgccgcaacacctcacgcccaggacatcgagccagccgatcgagcccaagttgcatcacggccaaaacgaaaactgatcgtgattgcagtcgttgcttgcatcgttgcagccggatcgtttgccgcgtatttccacttcaatggatccagtgaagctccatcggcagcagtggcgccggttaaaaaagacttgccagtgataaaggaattcaaaacaccacgcggtgctgtgttgggtgagcgtgtgacagccattttcggaaaaagctggtccgatggtgaaaccacatttgagatatcacgcaagggtgttgtgaccttgaccagccgtacggttgacgtgcgcgaggaatacacattggagccgtcagcggattacaccccaactcagatcaatccgaagattttgatcgtgacaccggacggctacataaaaacaaccgttcactacaaatccgcaacggaaaaatcgccgcacagcattagcatcactccacgcgaaaatgttcttgtggttttgcgggacaaagagttgttcgacgcggagcaagcgcaagcgttggaaaaagaaaaagcggcacaagcggaagctgaagctcagaagcgcgcgaaagaacaactgccattggacgcagatcatcaaggcgaactcaaacccgttgcaagcaattcacctcttgcccaactcaaaccggcgcctgagcctgcaactcaaccaaaaactgagcccgagcagaaaactgtcagcgtgaagcagccgtccaaagagtcggtggcacccaaggcaactgcaattgcaccgaagccggtggagaagcgtaaggcaaaaaatgatgatgcaaaagtaaaggataaaaaagacgactggcaggacaaggccaattcggatctggatgcatgggccaaaaaactttaa

SEQ ID NO: 497365 - DNA, 336 bp, Stenotrophomonas maltophilia
atgcttcataaaatttacgatcaatacaaaacgaagtttggcctgtcattgggaagtcggctgtacgatttttacgggcgaacactaatccggacaccgttggataagttttcaaagatgaacccgcacttgcagcgggagtattactacaacacaggcgatcgcggaagcacgtccgacatttccgagtccgaaagcaactggcgcgatcaaagtttgttgttggctcaaattcgggatgaagaggcaccacgtgtgtcgcgcggggtgttcatgacttcgcttgccataatttcatttttgggcttcatattttggttaatcattaaaatctaa

SEQ ID NO: 497366 - DNA, 3024 bp, Stenotrophomonas maltophilia
atgggtttaaacattttcacaattccagattttctcgacaagttgaacgggaaaatcaaaaacaaagggccggtccttacgagcgaacaaaaaacagtgcgcaacgccaacaagcgtttcttgcgcttaattggacggggtgatcgctatgttctcaacggtgaactgccgaacgttcgcagcagcgacgttgagaaagtattaaagatgggcgcacaacgccgggatgatggaaccttgtacgttcccgaaggcgttgatttggagccgttccggatgtactcgcccatgatcgccgaagacctggacgacgagcattccagctacaaagtaacggccgatggattgccctgggaaaactttgtaaccaccaatgacctgactcaaggcgcggactccacagcgacatcaattgtgtacggcatgatccccgtgttggccgccctcaccattgtgcttgcagccctgccaagcttttgggcgttactggcggtgatcccagcggcgcttgtcgtccctcacatcatcgccttgcatcaaggggaggacgtgaatgaagccatcaagatggggttcatcggctttatcgcgccagtcttgttctcgctgtacgccatctttgctgtcaagacaggtgtgagcgtcgcggcattggatcaaatgtcgggcagtggcgacgactctcaggccattatgaaggggctgacgaacttcgcagcaagtccatttggtttcatcctcaatattatgggtgctatcgctttttttctttcgaccgtttggggcgtgtttatttttggcacgatcgtcaactggggcgatgactcaaaattgggtggtgcgatacaaggcggtaaggcatgggcttggggctgggcaaagctttgcgctggttttggcattgtcatgtgcttgccgcccgtcatggcaccttgggtgatcttgttgttcgcttctgcgtacgccatgcgctacacagaattgaatttccgtgcacgtggttgggcactggatcaacaaaacaaggtggttggtggggtgatgcaagaccactctttcaaaaccacgagagaagaccgccacatgcaagcggtcaacgtagagaaggacaagtcaccaacaatcgtgattgccatttccagtggctacttggcgtccaagcgctacgatttcagtcccgatcccggcaagaaaatggttgtctctatcaatgacctgtgcacacatatgctgtgcttgggccgtaccggcattggtaaaacaaccaacttcgcacgtttggtggcactgcaaattgccttgtgcagtatggaaggatatcgcgttgggttgtttgttctgtgtggtaaggggacattgccaggcgaactgtctaacgttcttgagtggaacatcaagccgggtatggccgttggtttgattgaaggattaagcgccaaggaacttgccaaagccatcaactccatggtcgccagttccgacgataagaacaaaatctggtcgcatggcgctgacaaccacgttctcaatgcctgcattatctttgaagcgttgtgccagcacgaagaaactgtttacaaaaaagctgtccaggaattgaccaagatcgacatgatgattcccaacttggaattcaacgtcaaacaattgaacagcaatcctgcaaccaaaggttccgaaaaccacctcaacgccgtcaaagaattgcagaaaactcgcgatcgtcttgcgttctataaaaccgaagtgcagcgcccacgccaatggcgctggtgcttcgatgatgctgtcgcggcgctgattttacttgacgacatcattgttacccaagccagcgcccagggaacgatgggtccagaaatgcaaaaatggttcaactttttgggcgtgaacgtagcgggtgtggatcgctcgccaattgccatccacccggaactcacacgccaaggatcgtcgctgcaaaaagctgtgacctacgttgcaaaaacatgggtaaccatgccctttgaacagcgtcagtcgtaccgcatcaacgtcaaccaacgcatcgacccgctgatccaatccactgggcttgtggatgagaacggaaccccatggaccgccttgaccacgggtgtggacatcaccgccgtcatgcgtggtgcgcgcatcggtatcgatctgcccgagtcgctgcacgagggcgccggcacggcagtccaaattctgttgaagcaacgtgtgtacgccaaactcaagcagcgggtgaaggttactgactggcgcaaggagatgcccgaagaaacagtgttcatccaaatcatcgatgaatgccaactgttggtcagccaagaagaaatcaagttgctcccaatagcccgttcgttcggcatgggtgctgtgtatctgactcaaaacgttgaaggcttgatgtcgtgctttgagactgaggccggcatggaaggcttcttggatcaattccaatcgattacgtgttcgcaggcatcggaagcaacgtatgaatttgtgatgcgcaaggttggacatggaacattgatccaatacaacccctcgggacgcggtttggacttcaaagccagtacgtccacttacaaacgttcgactctcaacgttgacgatcacccacagcgcgcattcatgcggaaattgaagcgttggggctttgccaaagtggtgtcgcaagacatgttccgcaacgacattggacaccgctgggatcaaaaatggagcgctctgagaggcacgaacgtccaggaaggttcgtcgtccatccgttcggccatgatggttcacggctcaggcgcaatgcaggacggtcccattgtcacgttggtggaaatggggcgcgagttgaacaccagtggcggtgcacgagctttggtgtacctcaaccgtggaaacatccgtcgtgttgattttgccaaaaccattcccgtcacaccgggcaaggtcgatgagtacatgcgcaagttcaaagaggatcaacttgagcaagaactgtttgaaaccgaagctgcttaa

SEQ ID NO: 497367 - DNA, 885 bp, Stenotrophomonas maltophilia
atgaacaaagacatacaagatcaaaaaacatacaacgactcgatgttcagcaccgatctgaacagcatctttgctgcacccgatgacacatatcgtgagggcaagcagcaagctgcagaacaaggcgacagccaggcgcaagcctgggtggagcaagaccagaaggtggactctcttgagcggcgtattgagcagtacgacagtgagattgaacgtcggaaggatccaacccatgtgctgcgcttggaagaggactatcagagagttttgcaagcccgcaccgagtttttggaaaacaaccccaagccaatgacgtttggaaaagaccaatggcaagagcggttcaacgtctacgaagacaagatcgctgagagccgtcaagccatggccgaatgggaagaaaagtcttcccccgaagtgctgggtgaattgaccgcgcggcgcaacgctaagtttgaagaaatgttggaggccaccggccaacgccaaaagctcggagaattgccctcagaacagttgatgcacgcccaagcgcaggcggatgcgtacgatcttcaacaggacagcaattcgttttcgttttcccaacgcatcgcccagcgtcgcgcaaagcaagatgaacaaggagagggaagccagtcgcaatccggacagcgcgtaggtggcatggcctgggcggcggagacattggcaaaaccaagcgatgaagagataatgcttgccgatgtccaacaccgctttgtcattgaaaacaaccgttggcccaaggagaaagaagtcgatgcactgcttgctaagcaaagtcagaaatccgaagggcaggtgcaagttcaagaacaagtacaggttcaagagcaaactcagcggttcagtcaaaaaatgtga

SEQ ID NO: 497368 - DNA, 837 bp, Stenotrophomonas maltophilia
atgttcctcttcaataaatacagtcgtattgaaaaaggggaatttatgcatcaatggattttacgtttcgtctttctgtcacttatgtctttgatagttagtccgtgctttgcgcacgttgaaaaaccaatcacgtcctatccgttgcaatcgtctgtcagcgtatcgccggttaaaaacgccaacgaaacccagtggtggaatttcttcaagaaaaaacgcaacgagaagatgtggaaaggagtgcacccggacatgcgcacaaaacttgaggcggtgtacgacgtgatggcccaacgtgggtttgacatgcggccgatggaaggcatgcgcagtgaggcccgtcaagcggcgctgctggcaaacaattcgggagtgacgagcgttggagcgggtatgagttgccacaaccacggctatgcgatggacagtgtgttgcatgtggacggcaagcccacgtgggacatgaacgatccacatgtgcgggaaggctatatgttgtttggcgaaatggttctggcggttggtttggactggggtggagcctgggcgtcgcttaaagactacccgcatgtggagatgaaatcccaatgccgtgtggcgatccgagccaaacgcagtggacaaaaagctcccgcaatgattgccgatgcatcacaggtctctcccgacatcttgttgtcggcatttgcctatcaaccaatgggggaaatatgtccattcgacagcccgtgcgaggaacaaatttatcttgctgtgcaaatctgccccagtcctgcaacgcaagcatgggccatgtatcagcccatgtatcaactaaaattcagttggacttga

SEQ ID NO: 497369 - DNA, 1887 bp, Stenotrophomonas maltophilia
atggaacaaatttatgagtcgtttgggcgcgtgggcaagcatgtgccaccacacacactggttcggcgttgggacacggcctttttattgtcagcgggggtgttctgttttgtctacagtcttctgatattcggagttcggctgtgggagccatcaaccgccgtgccctacagcttgcatctgcaattgggtgtggtggtcagcatgaactacgcgacactgggattgatgatcggtggcgcacgagacgccattgaaagcctccaactcacgggctcgccttacgcgacaatttggagcttcgtattctctgttgcctgtgccattggcgcactgaaatacggcttgatcccacggcggaacatgtatgtgttggatgggccgcaggtgcgcaaagggaaagacgcaatcaaaatggcgcggcagatcacgaaggcggaagtgggcaaggacacaatgccgttgctcttgcaccctgagttgcgattgtcccaggagcgctggaaccggcatctgctgttgtacggctcggttgggtcggggaagacacagatccttttgcctctcattcggcaagtcatccgcaagaagaagaaattgttcttgtacgacgtaaagggggatttcaccagctacggtgatttcagcgccgggacttacacagaccctgcatctcgctggaagcgcgtgaaggccaaaactatcaacctggtgtacccacgccccatcgttctaagcccgtacgacaagcaagggtacgtctgggatgtggcgtgcgatatccacaccagcatccaagtggaagagttcgcccgctgcatgatcccggagaagcctggggacaacaatccgtttttcaccaacacagctcgaatgatctttgtggggtcggtgcgcaccttgattgccaacaagccaaaattatggaattggacggacttgaatgagcagttgaacaaaaccgcagagcagatgcagcccgatattctggcgaactacaaaaaggcattcccgctcattgagaaccccgactcgcaaacgacatcgaacatcatgtccaccatcatgtcgaacatgcaggccgttgagtatttcgcaaaggcgtggcctgtagtcggcaagcgtcgcttctcaatcactgagtgggcttcggacgattacaaagggcgcaagggcgtcattgtccagggcggcggaatggagcttctgaccagcgcttacatttcttccctcatcaatattttggtgggtgaggtgatttcccccaagatgaaagaagacaagaaccgtgggatatacataatattggacgagctgacatcggcggggaggttgaacatcatgccgttgatcgacaaaggacggtccaaaggcgtcactttgattgcaggtatacaagagcttggacagttgtcgaaagtgtattcaccggaagaggcaaagatcctgcccaccatcgtcggtacgcacgtgatttgtcagctgcagatgtccgagacacgcaaacacgtggccgaaatgtttggaaccaatgtcaccgccactttggctcacgacgagaacgccaacgtccatcaagacggccggcaagttgtctttgaacaccaattgaccaacgagctgggtccacgccggggcaagaagggatcgtttgaggtgcgggctatcgttgcaacggccggttatgaccccttgttgttgtcattccccggccaatcgttggaggtgcaacgacctgggcaagtgccagcgcgttggatgaccgaagctgcggcaacagccaagccagctgaagccgtaattcaatcgcccaatgagtcaagcgcgggaacgcaccgtcagccccaaatcctgtcacagcaagaggtgatggatctgtttcgctag

SEQ ID NO: 497370 - DNA, 867 bp, Stenotrophomonas maltophilia
atgacctatttcaacgaacgatttaaaggcgcaatcatcgacaatgacagtctcacggtcttggattgtattaccgagtatggcgccaacgttgccgacgaaaacggaatcacaccgctgcacttcgccgttctcgggcaccgggtcgaaatcaccgctttgcttctggacaacggcgccaacgtggaagcggccgacatgcacggtcagcgtccatttgatctgcgcaagcctgtggtcaacagccgcgaacaacaccggatcacggcccaccaagctgcaagcatgggcaaccttgagcaaacgcgcgcgttcatcgccctgggcggtgacctgcaccagttggaccacgccaacaacactgtgctacagcacgcggcacgcaacggccacgcggacgttgtgcaagaactgattgatgccggcgccgacatcaaccgcacacaccgctcgaccaccccagcggtgcacttggccgctcaaagcggatcggtggacaccctttccgtcttgctcaacagcggtgcggatcccaccgttgtggatcctttgcaccggacggccatacacacggcggcaagcagcggcagtgtggagtgccttgccttgttgatcgatcgatgtgatcccaacgctttaaatattttgaaagagacagcgttggacatcgcgcaagcgggtggccatgaagacgcaagccgttggttggtggagcagggtggcaaaaacgctccggaaatcaaattgcaagatttgggcgatgtagaggcagaagcctataagcgccgactgctggcgtcggcgtccacacagtacgaagtggggcgcggtgatacacctccacgcatgcgttttcaacgcatgtga

SEQ ID NO: 497371 - DNA, 2991 bp, Stenotrophomonas maltophilia
atgggggtgcccgtgatccaacgacaacttttgcaacacagatcgaccaatccaaaaggcgatgatgtcattgactatctgttggcggttcccgatatcgaactgcaacagaagactcaaaaacaagacggtcaagccactgactattacctggacggcacaccggatcttgagaccgcaacatccacctatgtcacgtcccactggggtggcaagcttgccggcgagttggggttgctcggaaagccggtcaacaaagaggacatgatggcgctgttcgacggcttctcacccacaggtaaggaactgtgtcagaacgccggagccagaccgaccgccgaagtgaagatcgacaatcgcactggtaagcctcgcttggacaaggatggcaacgtgatgatggtggacaagggcggacgacgcgcgggctacgaccttacacactccccaccaaagtccgtttcgctcttgcatgccctgggcgatgacgacacaaagctcattgtgatggaagcccaacgcgtggctgtggaagcgtccatgagcaagatgtttgaggcgttcacccagtgtcggcgcaacaaaggcgggaaggacgtgattgacgttgacggcttggcttactcaatgcacatgcagttcggaagccgtgaattggagcctcacttgcacacccacgttttggtctacaacgtgtgcaagggttcggacggcaagcacagcacttttgacgcatctgagatttttcgtttccgccacgcagccgatatggtgtaccaaaatgttctggcaacagaactgtccaaggcgggattcaaaattgtacagagcgaagaggtagatgcccacggacagaaaacaggcgcgcggtcctgggaggttgcgggcttgcacgacagagaactcatcaacgaattttcgtcgcgccatctgcaaatcatggaggagcgctccaagggcacggccgacgccgcagcctgggcgaagacgcgcaagcacaaagacgagccgtcctaccccgaactgatggaccacttctccaagctcatcgagaacgtcagccataaatttaaaatacccaccattgcggaactcaaggaacaacaggatgtgcgttgccccgcgcgaacgcgtgaggaattgcttgaactgctgcacgagaacgacgcggcgttcgactacccaacactgctgcgtcagatcggcacagaaaacctgggctttgtgaccgcaagcgaactgtttgccttggccgatgcagccgtgtccgacaccagcgacttgctggaaatcaatcctgtggctctgcacgacgacgataagggaatgaccttggcacgacgccacactgagtcgcgctacgcggcgcgatggatggtggagtgcgagttggatttggtcaccatgtccaacgcccgcaaaggggaggaatggtggaaggtggggaaggaactgtccacaccgatcattgaagcattggaactgaaaaagggcttcaagttgtccaaggaacagcgtacagcggtcgatcacatcgtcagtgacacagccggcgtgtgtgtggcgtcaggctttgcgggtacgggaaaaacaaccgtgtcggacttctactccgaagtgtaccgcgcacaaggaaaacgcatgctgggttgtgccgtgtccaaccaagcggccaaaaagctgcaggaagaaagccgcatggaatgccgatcggtgaccaagatccttgccgacttatcgcgcaaccgccttgtgttgaccggcaatgacgttgttgtcttggacgaggctggcatgatcgacgtgccgcagatccgtgcgctgtccgcgcactgcaaaaacgccggcgcaaaactaattttgcagggcgacgaagagcagttgaagccagtcggcgcagggcagggcatggcgttgatgagcgatgtcctgggcgaaagcaccatcaccgagattcgccggcagaaggatcaacggatgcgcgacatcgtaaagatgttctacaagtacgacgagaatggtttgccggtaaagcaacgctcacccaagtcgcgcgccgaagtgttggagcagtcatccgccatttggggcgcgttggaagccgcagggtgcatcgatgagtacaacacccacgccgaggcggttgactcgttggtgtccgactacttttcctcacacgcgaccaccgacgaacggttggtcctggcgcactccaacgcggatcttaagacactcaatcaagccattcgtaagggctatcaagagcgcggtgaagtggcaaaggaagaggttcacatccgcgccatgggcaaaaagttctttgaggacatatcgttgtccgttggtgatcggatccgcttcaccaccgccgacagcgtgatgaatgtcgtcaacggaaccgaggcaaaaatcacatcgatcgtgcccaaccgcaagcgtggcggatttgacgtaacagtggacatcgatgaggggttggagcgtcgcaaactcaagttcaacaccgaagagtggaacgccattcagcacaactatgcgcgcacggtgcacggtgcccaagggcaaggcaagacagatgtgttcttgctgggcaacgcgggcatgaccgacagcagcagtttgatggttgcaatctcgcgggtgaccaaagggaagttcacgttgtacacaaccacccacgaagccgaaacactacgccaacgcgcggctcttgatcgcaacaaggagaacaccctgcacgcaggcgtgcgtggcgaagaaggcgcggagattgccaagatgtttgataaattcaaatttcaaaaaccggatgttggcgcaggtgtgaaaaaacgtggaaatgagactcggcaaaaacaagccaagttgaacgctgaaagcaaacaaattcaggattgggtgggtcaacacgtatcggaaattcaaaaggcgatggaccgtgcgttgacccccaatactcagcgtgatagcttcaagagacagaccttatga

SEQ ID NO: 497372 - DNA, 249 bp, Stenotrophomonas maltophilia
atgaccggcaccaaagccgaagcggagaaccatgagtacgcgtggaggttcgctgcgcaacgggctggttggaggatctacgggaagccacctaacatccgggtgaacaccgcactgcgcatgacacccctgcgcctgtcgatcgccaaacagtgcgtctggcctgggcaaaagcgcgggatgtggggatggctcaaatggatcttggggttcggtgccgctgccggaatggtggcgctgttccaataa

SEQ ID NO: 497373 - DNA, 669 bp, Stenotrophomonas maltophilia
atggctcaatacttccacgtcccctacagcgacaaagacaaagcccgtgaacttggcgcccgctacgatggtgacaccaagcattggtacgccgacacagtggaaagcatcgaacagatgcggttgcactttgatcccatcaccaaccccaaccccatcacgacattgatgggggaagaccgcacgtttggcggaaaccatcttcatatttccatggtgcctatgagttgctggatgcgttcggtgaaggcatgtctggatccgcacgattggaaacgcttgtccgcaggactgcgccaacgcagcaaccacacctgcgagttgtgcggcgcaaaagaggatcccaagcgcgaggaatacttggatgtcatcgcgcggtgggagtacagcgagacggggaatgttcaaaccctcaagcgccttgtgagcgcgtgccagatgtgtgtaagagccacgaactacggttactcaaagctgaccggtttggagacagaagttcgccaccacttcaaggcaaccaacggttgtgatgatgactttctggaccagcacatcatcgaagcatttgggctttggacccaacgctcatcgaacaatcaaaagtggacgatggatctttcgttgctttccaacaacgggatccgacttgctaataaagggggcgtttga

SEQ ID NO: 497374 - DNA, 405 bp, Stenotrophomonas maltophilia
atgaaaacaataattcttacgctggcgcttatgctgactgcagcttcggcgcaagccgcacacgttcttgcgtcagatatcacaggggttgttgtggatggacagggcaagccgattgccggcgctgttgtgcgcgcatatcaccacgaaacgaaccggctgattgaacgacgaacaaatagcaaaggacgctaccgcttcaataatgtgcggtcggacggccaatacaccgtgtcccatgcggcaacatcgtttacgggtcgagtccagttgggacagacacaccgccagaactttgtgggcgatatcgtgcggtacgactcaccgtccatcttgttctcctgggtgtggtctggacccaaccagcgggtgtatggcgttgcaagccatgcaaagggggaatga

SEQ ID NO: 497375 - DNA, 1653 bp, Stenotrophomonas maltophilia
atgaaacaccgcaaacattcagcaatattgctagccctttccattggaacggctttaagcggacatgctgctgctcaatcaacacccatgcaaaactatggcgacgcaactcgccagcaatactggaacggcatcggaaactcggcaacacatgccgatcccgcatgggaacgcaatttaatcaatctgtatttcacaggagtcaacaacagactgaacatctccaacccaatgacccacaacgtcagcgatgttgtattcaacggtaggaacaaccaaagcgacacaggcttcgtcaccgtcacgggatacgacaacatccttcgatcggattgggtctatgcaaatgatccagccatatcaccaagcactggacaaatctttttgaacggcggcgccaatgagttgaatggtcgcaatctcaacatctatggcagcttcaataaagtgaacggcgaattcaccaattcgttaggggacagcaacgatttgggctcgcatgtgcagaaccttggaggcggaaactctgttgcggacggcggaataagtgtcggtttcggcaaccgagtgacatatgcaagcaatgccggaagtgcaggcggaatagcgcttggcaactacaccgttgttgaagccgcgtgcgtctcgattggatatgggtcagcttgcaatgagaaccgcactgtgtcgtttggacaaacaggaacaagccttttgtcacgcctcatcggggttgccgctggtcaggccgacgacgacgccgtaaatcttggacagttgaagtctgttacccaatcactgggcggaaccgcaggattcaccaacggcgtatacaacgggtggagcgtgaacttgggcgggtcaacctacggcaacgttcacgacgccttggtgggcttggatggtcgcttgacagcggtggagaacaaccccggtggaggaacaggaacacccggaccgaaaggagacaaaggcgataaaggcgatccgggtgtgggtatacctggacgcgatggaattgatggggttgccggcaccccaggccgggacggtagcgatgggttgaacggcaccaatggggcagacggtcgaagcgcgtatgaggtagcggttgatgacggctacaaaggatccgaacaggagtggcttgcttcgcttcgtggccgcgatggcaaggacggacttgagggtgcaacggatcctctggctgtgaaatacgacgacgaaagcaaatccacagccacgctgcaaagcgcttccggtggatccacccgcgtgagtggcgttgcttcggggcgtattgctcaaggatccacagatgcggtgaacggtgggcagttgtgggatatggaaaaccgttggaacgaccgttgggaagacaccaacagacgcatttctcagcaggacaagcggatcaacggcttgggcgcgcaatcgatggcgatgagtcagatggcgatgtccagtcaatacctgcctgttggaaaagtctctttcaacatgggcgtgggcttctacgggccggccgctgcggtggctcttggaggatcagcacaggtaactgagcgcattcgcttagtcggcggcatcactgggggatctggtggaacaagtgttggcggcggtttcggggcttcaatcaccttcgactga

SEQ ID NO: 497376 - DNA, 792 bp, Stenotrophomonas maltophilia
atgtttatggggttgtctatgaataaatgtgttttggttgctttcggcctttctctaattgttacatccgctagcgcatttggtgggggtgcgttcgttagcaatgctggcgagccactacatagctttattgagcgtgtatcactggtcgaacggacatcgaattgcggatacatttccaaagctccgaatgcgtatcaaataaaactcgtggattgctctttaacagtttcggagggggactttgttgtgtatggcgttcaagggtggagtcggctcgcatatgaggaagtgattgcttcaatcagggtgggcggcgaacgcgttgatggcatagtcttgggtgaaattaccggaggggcggataagagtatggatcaatttgccgtatcgatttcgggtccaattgcgcagtacaccaaaaacactcagcacgaagtgtgcgctcaaatttgcaagtccccacagggggattggggtgcagtcgtcacaacggtcggttcgcacgtgatgtgtccaatcaccaacgtctgcccggacggcatgacagcgacaggtcaggggattcattcgcacccaactggttcgacctacaaaatcaatgccgctgacaaggctgtgcttctatcgggtccgttttatcgcctgggcgctaaagaagcacgtggacaaacagatgtcttttccgcagaagatttcaaggctgggcctggctacatggtcaccgacaagggccgcttgatgcatcaagacggccccaaaaaggttcgggttataagcattgataggtga

SEQ ID NO: 497377 - DNA, 2067 bp, Stenotrophomonas maltophilia
atgagacaaagaggatttaatttgattgaattgaccctggtcatggcgcttattgtcggactgggggcgttgacatttaagttgttcaagccatcagcttcaatggctgcggtccgcacagaacaaacacgtgcaggccaaattgttcaatcgctgacggatctctatgtactgcaaccttcgtacgcaggcttgtccacggcgacacttgaaagtacctacaattcaaaatttattgtgcacaatggcacattggacacgccatcaagcattggcgcctcggccattgtgcaacccggtacagcctttggaaccaacgactcaattgacctgatttatcaggccgtaccaagtggttcgtgcgtgaagctggcaacagcactggcacgatcagcggattttgtccgcatcaacagtgttgaggtgcaaaagccctactccaaatttcgtgaggacttgttggcaacgcaatgcgccacacgtgatcgcaatgaagttctgtttcgctacaccaacaagaatgtatcgactcaagcaacagacatgttggcttgtgagtgttcgcctacgattgaaacccaaactttagcctgcgcggacaacgccagcggttctattacccaacggcgcaacgccacatgccctgcgacgacctgccctagtcgccaatggacatcgtgggtgaccacaagcaacacatgcgcggccaatgctgcgtctatacccgtcattgatccccaagtcccacaagccatttgcacgccaatcaccgagcagcgtgtatcgaactgtccaagcaatcaaattggatatgtcgttgaagggcgcactcgcgcgtgtcccagccaacaatggggagcgtggacgcttgttactcggaattgcatcgatccggctccacttcaaacaacgtgcgaatttgaccctgcaacggacaaaggcacggaaacgactgcctgtcctgccggtcaaggcggaaacatcattcgtgagcgctaccgcaattgcaaagcggatggaacaaaagaatggggtgagtggcagacgatgacaagcacatgcagcgcgtcgtgcacaacaacgggcacctgctgcgcgcctggacgcatgcaacgcgccacagcagtggcctgtcctattcgcacatatggcgagcgcaatggtgttgaacagcaattctcccgatgcaccaacgcaacatctgctcctgtgtggagtggcgtgtgggaattgaatgcgtctacggttgtcggtcaatgcaacgcatgccccgctgacacctccacgacattgacccgcacagaaccccgctcgggctcctgccctgctggaacgtttggaaatcaaagttgggaagcggtgttcaatcagtcaatgaccgtaacttatgcatgcaacgccactgcgggtcagacatcaccaggtcgagaagagacgtatggagcatgggtcgagtcgggcacacgaaatcacaacagcaattgtgcaacatgcccatctccttacaacgaaaccgatgagcaatggcaacgtgtcgatcttggatgcccaagtggttactcgggtcaaaactcgtatgagaagcaacagcatcgccaacggacaataagcttcaattgcccaagcggtcagacaactgcgccgtctcccagcgtcgggggatggggtggatggtatgacacaggcgcgcaacgcaatcacgtgaattcgtgcgcggcaagctgcacagtcgagaaccgctcataccgcattgcttggcagaattcttcaccactcaacggattgaaggactgcaatgcatcgaacatcggtcagcgctcgtggtccaactacatcagttgcagtgggatggggccatgtgggggaaccttccgcgcagcgatttgcacagcaagcggctggcagattgtggctggtgccggttcctcaccatacgtcggatgggccagtggtcgtccatccgaatgggacgcggtgtatatgcaggggtacaacgatgcacccgcaatcggggcgcaacagggttcagccggtcaatcgaattggatcacctatcaatgcttataa

SEQ ID NO: 497378 - DNA, 1425 bp, Stenotrophomonas maltophilia
atggcaaaaatgaccaagatgaagaagcccacaagcagcgttccaggcgttgcattccgcagcgacggatccccccgttgggaggttcgaatccgctggatggtcaacggcgagaagaggcaccttccgaccgtccgctacccggtggacctggacgcgcccaagggggccgacacccacatcgatcgggcgcgcacggatgccgaggtgtacgccaagcagcaacgtcaaaaaatcaaaagtgactcattggagtggtccagcgccgcccaccactacacccttcgcggcattttggaacgctaccggcaggaggtggagcaaggcctcatcaccacccaggaggaccgcgagaacaagcaaatggccggtgaacacgtgcccatgaaggcccacgtgcgcaagagcgtaaccaaagaattgtcggccattgcggtgatgctcggaacggccaccactgggcacaaccgcgacggctttcccgacatcgtggaccggcgaatggatcaactgtcctatgacctttttcactcccccaataccacgcaggcattgaactggcggttgaagggacaagacggcaagcaggccccaaccaacagcgtgaagcgcctgctgtcgtcgctgcgcaccatcatcaaccacgcaatcaaggtgtggaagttggcgctggacaacccactggcaactctcaaagacatcaaaatcaatgataagcgtgagcggacaattgacgctgaggaatgggaattgctgtgccaatggatggagcgcagccgcaccgatgccaccacctacgccgctattcgtttcgcccgctactctgcggcccgacggtcggaggtgtgcaaattggattggtcagacatcgaccagcggaagaaattggctttgctgcgcgacaccaaatcgaacgccggggagagtcgtcagcgctcaattcctctcaacggcgccacaatggccattttggaagcacttcgggccaatcgcacagccaaggacctagtgggacctgtgtttcgaaccagcagaggtaagcgattgcgtcccgacaccatcacccaggcttggtccagggcgcgtgaggcagtggccgacgaaacggggcgtgaggaaatccgcaccgctcgcctgcacgatctgcgccatacccgtgtcacggaattgggcactttgctttcagcggcagaagcatccatggtgtccgggcaccgcgatatgggcacattcatgcggtacttcaacccgaagcccgaagacattgggcggcgcattgacgcactggaagcccaaaaaggtgataacaaggagctacagggtttgattgagaagctagccctgcattcggttgaagatatcacagccgtcttcatgtcagccattcaacgaaaaacgatcacagaatccaataagggacgataa

SEQ ID NO: 497379 - DNA, 483 bp, Stenotrophomonas maltophilia
atgttgaagggattgaaacctctcaccgctgccgccgtgtgcctgctcggcctgtccgcctttgcccagagcgctgctgcggcacaatgggtagacagcggccgcaccgcgtacgtaaagaccagtttcttcggcagtttcgtctaccacacctgcgactccagcggtgcgcagatccaggggtatccgggtagctgcggcagcgatgccggcagtggctggacgtccaactacacggcctccagtgaccttgccaacagtcagctcatggcctgcaaccacaatccgttccagctcggctcggcctgctacggcctggcgtatgcgatcaatggccaagcgtacgctggcgggctgcctgccgcctgcaatcttggcgcgcgcgcggtggtcaccgcgtccagcatggaaaccgtcgagatccaatacgaagagctcgacgtggacaccatcgaatcggcacgcgagtacgtctgccggtaa

SEQ ID NO: 497380 - DNA, 273 bp, Stenotrophomonas maltophilia
atggggttcggccagtactggttgaccgcgcccggcactgcccacctgggccgcatcattgtctcgccgcaggcgcgtgggcgcggcctgggccgggtgctgatgcagttgttgtgtgccgaggccctgcggtcgccggatgtgcagcgcctgagcctgcgtgtctatcgtgacaacgtcgcagcgttggcgctctaccgcgatgtcggcttccagccggtggaagatgcctcgacgctggaattgttgttcatgctgcgcagcgagggctga

SEQ ID NO: 497381 - DNA, 561 bp, Stenotrophomonas maltophilia
atgcaactggccacccaacgcttgatcctgcgcccctggcgcgacagtgacgccgccgatctgtacgagtacgcccgcgacccgcgcgtggggcccatcgccggttggccaccgcatgccagcgtagaggagagtgccgacatcatccgcaccgtgttcaaccgaccggaggtctacgccctgcagagccgcgagaacgggcgtgccatcggatgcgtcggcatcctgatcggtgctgacagcaacttcagcttgggcgagcgcgagggagagatcgcctactggatcggcgtaccgtactggggtcgtggcctggtacccgaagctgtacgtgaggtgatgcggcatgccttcctggatctgcagctggatgcgttgtggtgcggctacttcgccgacaacctgcaatcaatgagcgcgcaggccaaatgcggtttccgccatcaccacaccgaggtcaaccagttcaaccgcttcctcgccgactaccgcaccgagcacatcagccgcatcactgccagggaatggcaggcgcagcagaccgtaccgctgcccacgtga

SEQ ID NO: 497382 - DNA, 894 bp, Stenotrophomonas maltophilia
atggatcgcattccccagcttctggaacaggacgaatccatgcgcttggaagtcagtacgttggctgaaggcttgggtgttccgctgtcgttcgggcacgcctatctgacggtgctggtgtgcgtgtccgggcgtgcgcggttcgcactgaacttccgcgaagtggcggtgcagcggcacgacgtactggtgctggcggaggatacgctgacgctgctgcggcagcgttcgcgcggcttccttgtggtggcctgcctggtgccgaaagcgctggcctcggaggtggcctatgtgctgcccaatgcactgttcaagttcctgcacgagcaccctcattgtgtaccgtcaccgctggaggtgccgctgctgcagggttggctgcagcagttgatggatgcccagcacaacggtggccgccatcggcaagtgatgctgcgcaacctgctgcagacgtttttcctgaagttcgccacactgctcccggcatactacgaggcggcgccgccggtcggccgacgcgagcgcctggcctggagcttctgggaactggtcggccagcgcagcacgcgccaacgcgacgtgcagtcctacgccgaggcgctgtgcattaccccgttctatctctcgcaggtgacccgggaatgcttcggcgaaacgccgaaggcgttgatcgaccgccaggtggtgctggagatcaaggcgctgctgagctacagcgaactgccgatcggtcgcatcgccgaacgcctgtgtttcgaggacgcgtcctacctgtgccgctatttccggcggcacaccggccaatcgctgaccggctaccgccgggcggggcagggcggtatcagtgcgatacgaacaagggcgccggtacttcggcaagcagatcctcggtga

SEQ ID NO: 497383 - DNA, 831 bp, Stenotrophomonas maltophilia
atgctgcacccactacgcgatatcgccgtgctgttcgacgccagcgacaccgggcaccgcgttctcaacatcgccgccgacctggcgcaggcccagcaggcgcatctggtcgcagtctccacggccctgcatcccaccgacatcgccaacggcttcgcgcgcggtgccggcatcgccgccgcgctggaccacgaggcccgcgcggatgccgcctgcaccgcacagctgatgcagaacctgcgtgccgtgtccgagccgctgcagatcagcaccgaactgcgcatcgtctcggactacctgggtggcgccgacctggcgctgcagtcgctgtactgcgacctgatcatcgccggctatccgcacacaccaggcgcgccctccggctggcatccactgggcacgctgcgccagaccggggtaccgatgctgctggtgccgccgcactggaagggcgagcaggtcggccggcgtatcgtggtggcctggaatgccagcaagcaggcccgtcgtgcggtggcagatgccctgcctctgctggcccgggcgcaggccgtgcacctgctgatggtcgacacgcccaaggctgaagcggcacccggcgctgaaatggcccagcatctggcgcggcacggcgttgaagtggagatacaggcgatcagctccagccaagggggcgtagctgccaccattcgccagcatgtacttgatgccgaagccgatctgctggtgctggggccctacagccgcagtcgcgtggtcgaacgcgtgctcggcggggtcaccgaggatctgcttgccgaagtaccggcgcccttgttcgtatcgcactga

SEQ ID NO: 497384 - DNA, 567 bp, Stenotrophomonas maltophilia
atgcgacctgccgcagcacgtacacgacgcgacctgccccatgcgctggcggccaccctggtcagccatccacgctgcaccctcagcgaactcgcgcgcggggcgggcatcagccgcgcgaccctgtaccggtttgcgcctacccgggaggcgatcgacgaggccctgttcgcggccggtttcgagcgcgtggaagctgcggcggcctggttcgaccagggcggtgatgcacgccacgtgctggagcaggtcaccgccacgctgctggcggactgggagctggtgacgctgctgttcgcacggatgatggaagaacagcagcgcctgggcgacctgcacctgctgccggagcgctgggcgccgatcggcgagcgcttcgaggccttcttcctgcggggtcaggcggccggagagttcaacgtcggtttcaccgcggtgtggctcgcggacttctactggagctgtttctacggcatcacctggtcactggcacgcggtcggctggcgccggcagcggcagcctctacgctgctggcgtcgttccagcgcggggcgatgatgggttga

SEQ ID NO: 497385 - DNA, 414 bp, Stenotrophomonas maltophilia
atgagccgcgcagtctgggccgccggcgcggcgggcgcattgtttggcatggggttggcactttcgggaatgaccgacgcgcgtcgtgtcctcggcttcctcgacatcaccggtgacttcgatcccacgctgctgtgggtgctgggctcggcgctgctggtcagcgcgatcgggcagcggtgggtgttgcggcgacagcagccgctgtacgcagaccgcttccggctgcctgttacccggcgtgtggatgctcgcctgctgctgggtgccgcgctgttcgggatcggctggggctgggcgggctattgcccaggcccggccatcgccggggtggccgtggcgtcgcgcgaagccctgtggttcgtgccttcgatgcttgcaggattctggctgcacgaccgcttcgtccgttga

SEQ ID NO: 497386 - DNA, 780 bp, Stenotrophomonas maltophilia
atgacccatcagcaggtgtccctggcgctcgccaccggcctcggcctggcgctcgcagcttcggtctccgcacaggcgcgtacgccaccggctccgcactgcatgaacgctgtcggcgtacaggaagtggagcaggcatcaccgcgctcgatcgcactgcgcgccgcctccggccagccctttcggatcgacttcaacgaagattgtcccggcgtccgcagtgccacctcgctgaaactggaagcccccgccggctgggcctgcggccgccccagcgaacgcgtcgtggtcgacggccgccaatgcaccatcagcgcagtcaccccgctgcagaatcgcgactatgccagcgtcgcccgcgacagcgagcgcctgcgcaccgctaccctgcctgccgtgaccatccgcgaacgcaaggaggtgcgtcgcagcttcggcggctcaccgtcctactgctttgccacgcgcaacgtgcgtgcctggtcatccgacccgcagggcatgctggtggagaccaacccgcgccgcaatggcggccatcgctactaccgggtagaactcggcagccactgccgccagctcgaccgcacgccgcagctgagcttccactcgggcctgcagaacggcctgatctgtggcaatcccggcgatcggatcatgactgccgaattcgagacagacgatctgcgcggtgaaagcatcgccccgctgccgcagtacacgcgcggcagctgcacgatccaggcggtctacccggcctccagccaggcgtcgaactaa

SEQ ID NO: 497387 - DNA, 1254 bp, Stenotrophomonas maltophilia
atgttgtccagatcgattggcaaagcggcaggtggcctggtgttgggtttgtcggtggcggcagccgcgcatgcggcaccgttgttcgaaccggtgacggtcatcagccgggcatcggccaacagcgagcctgcactcggcaagctgctggccaccccgtccacggcgacggtgcaggaagtgcgtgtcgacgcggcggctacggcgcagccgcagctggaattcgagctgctcggcaaacgggtgcaggcggtgcgcagcaaggtcgaggcgctgccggatggtggcagcatctggtacggccagttccgttcgccgtccgaccggttgaccgccgccacctccagcggccaggatgatccgggcaattcgttgatcctggtacgttcgggcgacaccatcaccggttcgatccgcaaggacggcaagctttatcgcctgcgtccactgggtaaccgccacgtgctggtcgaggtcgacgaatcgaggatgccagccgatcatccggctgactacaaccagctgccgaagatcccgatggccgacaacgaccacatcggcatcgcgcaggcctcttcgggaacgccggcgaccatccgcgtgctggtggtggcgaccaatgcggcggtcactgcctatggcggcaacatgcagtcgctggtgcagctggcggtggccgagtccaaccagggttacgtcaacagcaacgtcggcctgacgctgcaactggccggttacgagaccaccaactacagcgagtccggtaacttcaccaccgacctgtcacgtttccgcggcaccagcgacggctacatggacagcatccacaccagccgcaacaccaccgcagccgacgtcggcgtgctgctcatcaacaacagtgcctactgcggcctggcctcgggcatcggctcgaccgcgtcgaccgctttcgcggcggtgtactgggattgcgcaaccggctactactcgttcgcgcacgagatcggccatctgcagagcgcgcggcatgacatcgccaccgactcgagcacctcgccctacgcctatggccacggctatcgctacgagcctgccaccggcaccggttggcgcacgatcatggcctacaactgcacccgcagctgcccgcgcctgaactactggtcgaacccgaacatcagctacaacggcatcccgatgggcaatgccagtaccgccgacaaccagcgcgtgctggtcaataccaaggccaccatcgcggccttccgctga

SEQ ID NO: 497388 - DNA, 2925 bp, Stenotrophomonas maltophilia
atgaccatccgtattcccgcactggggctggcgatccgtcgtgcgcttgcaatcacggcgaccacaaccctggccgttccggcgctcgcgcagcaggcaccggaagccaccacgctggaccgcatcgaaatcaccggctcacgcatccgccaggtcgacctggaaaccgcacagccggtgctgaccgtcagccgcgccgacatcgagcgacagggcttcaactccgttgccgacatcctgcagaacctgaccgcgaccggcagcccggcattgagccgcgccagcccgttgagcgccggcgaagccgccggcggcagctacgtgaacatgcgtggtctcggtgcgcagcgcaccctggtgctggtcaacggcaagcggctgggcatgaccacttcgggttttcaggacatctccagcattcctgccgctgcggtggaacgcatggaagtgctcaaggatggtgcctcggccatctacgggtccgacgcgatggccggcgtggtgaacatcatcacccggcgcaacgttcagggtgtaaccgccaacgtctatcacggccaatacagtgaaggcgacggtgcccgtacccagtacgacgtggttgccggctggtccaatgaccgtgcttccatcagcgttgctgccgagcatgtcgaagaaaagggcgtctgggccagggaccgcggcttcagtgcctatacctataccgacggccacgcggatgacggctggaccacggtcggccagtggggtcgcatcaccggcttcaagggccccggctgcagcaacagccggggctgcagctattcgctcgaccgtggcagccagccgggcgggccggacagcttccacctcagcgacaacacaccgttcaccggcgatgtcagcaacagcaacgagcagatgcatctgcagacgccgatcaagcgcgattcgatcttcgtcgatgcgcgcgtggagctgaacgatcaggtccgtttcaacacccagctggcctacaaccggcgcaccaccactcgccagattgccggctatcccttccagtccggcccagccggcatcaccccgatgtcggccgacagctggttcaatccgttcggcagccatcacggctacgacacgcccagcgatgtgcactggaaccgtcgtacctgggagattcctcgcgtcagcaccagcgatctgaccacctggcaggccgtcgcggcactcgagggcaacttcgaattcggcggtcgcgacttcgactgggaagcgggttaccagtacaaccgcagtgagctgacccaacgtgccaccggcaacctgcacaagcagcgcgtggccgatgccaccggtccttcgttctacaacccggcaaccggcaaggtcgaatgcggaacgccggatgcgccgatcgcaggctgcaaaccctggaacccgctggttccgtatggccaggacgatccctatggcctgaccggcaacacggagctccaggactggctgttcccggaagaactcacccgcggccgcaccaccacccgcaacctgttcgccaacctcagcggcagccttgccagcctgcccgccggtgagctgggcttcgccgtgggggccgagagccgccgcgaggacggccgcttcatccccgatgcgcttgcgcagaccggtgccaccaccaacctggcggcaggccccaccggtggcggctaccgcgtcgacgaagcctacctggaactgagcgtgccggtgctgcgcgacctcgccggcgcccgcgaactgaccctcagcgcggcgacgcggtactcggactactccaccttcggcggaaccctcaacagcaagttcggcttcacctggaagccgatcgatcagctgctggtccgcggcacctgggcacagggcttccgtgcgccgaccatcgccaacctgtacggcggcggctcggagacgttcaccaccggcttccgcgatccctgcgatacggtccatggcgcagccgcaagcagtgccgaggtccgcgcgcgctgtgctgccgacatcgccaacgccgacacctaccgccagctcggccagggcaatgaacccatcaccggcagcagtggacagacgcccctgcccttcaccaacggctccaatcccgacctgcagccggaaacttcgaccagccgcactctgggcctggtctggagcccgacgttcgccgaagggcttcacatcgcactggactggtggaagatccgcatcgacaacaccatcgtctccgaccatcccaacgacatccttcgcgactgctacgagctgggtattgccgagcgctgcagcagcttcacccgcgacccggagctgggcatcgtcaacaaactcaacttcggcaaccgcaacagcggcttccgccaggcagaaggctacgacctggagattggccacaaggtcgaaacccgctggggcaggttgagcgctgactggaagtccacctatgtggtcaacgccgaagagaagaccaccaacgaagccggcgtaccggccatccccagcaatggcattgccaccaacggcggcatcggcttccgcgtgcgctccaacgcgtcgctgggctgggagcatggcaacctcggcctgacctggggcctgcgttacttctccgccgtcaaggaacgctgcctgggtgcggaggattatccgaacgagtgttcccatcccgaccagcgcgcgccgtggttcagcggtacgcgcgactacaaccgtcgtggatcggtcaccttccatgacgtgcaggcgcgctacagcctgccgtgggacgccaccgtttcgatcggcgccaacaacgtgttcggccgccagggcccggccatgtacagccagccgagtgccaacttctcctactacggtggcttcgacatcggccgtttcatctacatgaaataccagcagcgcttctga

SEQ ID NO: 497389 - DNA, 174 bp, Stenotrophomonas maltophilia
atgacgctttcgcacaaaccggaagtgaatcaatcgattgatctgatcgacggcggagcgatggacgatgcaccctcgccccgactctggaccgaaagcgtcatggcaattgcaggcagcgacaacctgcgcggaaacagaaaagaccacggctccgaagggccggggtcgtag

SEQ ID NO: 497390 - DNA, 369 bp, Stenotrophomonas maltophilia
atggctggtatcaatcgattgcaccgcacgctgtgggttcccttcgcgctgatggcgctggctgcctgtgcgccggccaatgatcctgcgcagaccgtcgagcgcgatgctggcacggagagcactccggcgcgcccggtcggtgacgccctgcagatgcagccggctcagcctgcggaaggggaggtcctgcccgacgcggtggacgtgcagcgcaatgcggatggttcggtggatgtgcgcaaggccacgccggagtcggtggccctgcgccgtaccgacgacgggggcgtggagatccacaaggtggatcctgcggccgggcagggagccgatgcggcgcctgccgaggccaggtcgcagcactga

SEQ ID NO: 497391 - DNA, 1245 bp, Stenotrophomonas maltophilia
atggcccttcgcctcaaagggaccgcgcccaagccgggtgcgcccgataagcgctactacatgctcgacgtgcaggagggataccggcgcgtgcgcttgtccaccggcacccgcgaccgcgtggcagccgagcgcaaggagcaggcggtcctcgacgccctgcgcgacgaccccgagattgcagaggacgcgctgcgggagctgattcggggcaagtcccggtcggtgcagatggccgtggcgaaggccaaggtccgccagcgcaccctcaaggacgcgatggacgacgcgctggacgaccgcaacttttggggcaagctccggtccatcgacaccgtgcgtaccaactgcaaggtggtccagagctacctgggcgaggaaacgcccatcaacgacatcacgcaggccgcggtcaacgacatggcgcagcgcatgctcgccgacaaggcggctcccgccaccgtgaaccgcaagatgcagtgcctccttgccctactgaaacgcgagaggaaggccggccggttcttgggagagctgcccgagtacagcttggccgacgagagggacaacgcacgcacgttcgtcctgaacgttgaggacgaggaattgatcctggcgcggctgctggagtgggacacgctcccgaacggccctgccggagggcacccacgggtgcgcgacggggcggactaccgcgacctgttcgtgtgcctcgccgacctgggctgccgcatgagccaggccatcggcatccggtggtccgaagtagtcgatcagggcggaaggctccacgtccgcttctggcggcacgctacgctcaagaaggggcgtccccgcaccctaccctgcaccgcccgtgtcgccgaggttctacagcggcgcaaggacgccctggcggccacatcggacggccccttcacgatgctcaatcgcacgcgcgccgaccggctgtggcaatgggccatcaaggggacacatctcgcttccgagaaggagtgcgtaccgcatgcgctccgccatacgtgcgccactcggctgctgctggcgaccggcaacatcaagctcgtgcaggagtggctcggacaccgcgacatccagaccacctcagcggtctacgcgaaggtactggccgagcaatcgctccaaggcatgtctgcactggagcagttccgcctcccagccgcctcgaacggaacaggtgacgttccgagacagggatcaattgccaaagcgggaatccaatag

SEQ ID NO: 497392 - DNA, 375 bp, Stenotrophomonas maltophilia
atgaatctctcgcagaaagaactgacggccattctcacaaccgcactgtcagccttccgggaagagatcgacgaggacatcaccgccacccgcatcctcaccctactcgccgttgtggacgagccgggcattcagcaggtggaccttgagcgcgtcctcggcggactctctccctccgcagtgagccgcaatgtgctcgacctgtcgtctatcaagcgtaaccgcgagccggggcctgacttcctagagcagcgccctgatcccgcctaccgcaagcgcaacctgatcttcccgacgaccaaggcgctgcactggctggcttcgctcgcagaacgtgtcaaccgcaaggtgacggcgcgcgtcgcagccgcctaa

SEQ ID NO: 497393 - DNA, 222 bp, Stenotrophomonas maltophilia
gtggcggcgcattacaacgccgtgagcaggggacaggacggccccttcgcagggcagaagtacctggacctgttcgtgaaagcctttggatatgagatcggaatcgacccctcccccacgccttggcagcgtggtttctggatggacaaaattggcaagaatgccatcaacattggcttgggccttgtaatccttacattgcggctccaagatagaccctga

SEQ ID NO: 497394 - DNA, 168 bp, Stenotrophomonas maltophilia
atgattcggaccatcaatttcgaccataacgagaagcgcggcgctctccgcgcgatgctcggcctactcaacgagcgcgtccagttctcggtcgtccccgaggactgtggctggcgggtgtcgtatccggtcccacccgcggccccaacggagaccccgcggccatga

SEQ ID NO: 497395 - DNA, 141 bp, Stenotrophomonas maltophilia
atgcgtaacgcagatttcaccgcaaactcgaccctggtgatcgtcaacgtggccctccgcgtccaccagttcggcccgttcttggtattcgagcgggaggttttggtcctgcatgaacggacctacgaggtgcccgaatga

SEQ ID NO: 497396 - DNA, 621 bp, Stenotrophomonas maltophilia
atgcaaatctacgttgcctgccttgcctcatataacgctggcgtcctgcacggcgagtggatcgacttggagggacgcgacgccgacgacgtgcgcgatgagattgcccgcatcctgcgcgagtcgccgcacccgaacgtgaccgttgattgcccggattgcggcggtactggaaccacatacgtcccccgagtattcggcggggcggaatgcacggcgtgtggcggaagcggcaaggtcgccagcgccgaggagtgggccgtccacgactacgacgacgtgttcggggatacctggggcgagcaccccgacctggacaagctgtgcgcattgcaagagcggctggacgagttgcacaacgacaccgaacgcgctgcctacacggccttctgcgaccacgagggcctcgacgatgtgaccgtggagcagttccacgaagcctacgtgggccagttcgatagctgggccgactttgccgagaactatgtggacgaatcggggcttctccacggcgtgcccgacgccctctcccgctacttcgactacgagagctatggccgcgacattcggctcaacggtgacgcgtttgaggtgagcggcttctacttctggagccgctaa

SEQ ID NO: 497397 - DNA, 261 bp, Stenotrophomonas maltophilia
atgagcaatgacaacgagctggctgtacctgccggtgacaagctggtcaccctgggcgaccgatcggtctcctacggtccccgccaagagttcgacgggagcgtcgagccttgcgcaccgatggccgcgcagttttggggcgtctaccgctgggccggtaaggaccgctggtggtggattgccgacgtggccgacgaggacaccgcccgcgcagtggccgccgcctacctgctgaacgtcaagcccgattgggcgcactga

SEQ ID NO: 497398 - DNA, 183 bp, Stenotrophomonas maltophilia
atgagctaccgcgaggaggacatcttgttcgagaccgaaaaggcatgggtgctgcgcaaggggccgaaccattttgaggtctacaaaatcggcctcacccactcgacacgccacggcatttttcacaacatccccggcgcactggatcgcgccatcgaacacgcaaagggcctgtcgcaatga

SEQ ID NO: 497399 - DNA, 441 bp, Stenotrophomonas maltophilia
atggaactgcgcacctacggaacccgcaacgtgttcctggcacagccggggcgctatcacgaacaactggcggcgaccgcgatgacgccgcagcaagccgaggagttcgccaccgtggtcaaccgcgcaatcagggataccgacttcgaccccatcgacctcgcgcagctggcgagcgggtggacgtggcccgagccgatgagcaccgcgccgctgggcattgaggactccgaatttcttgtcgaggtggcgcgcatgctgcaccgcctctggcaggaggtcggcgagcagtggagcggcgtttgggcctacgacatcgccgacccgctgggcgggtggctgtcgaggaacggcatcaaccacgagaccgccgatggcgtggcccgcgccgagcagcaggcccgcgcatggatcgccgagggcatgggagccgcgcgatga

SEQ ID NO: 497400 - DNA, 324 bp, Stenotrophomonas maltophilia
atgaacctcgacaactacgcccccgagagcgcgaagcgcatagccgtggcgctggtggatgccgccctcgccgctggttactcgctcggcgtctacgacggcgaagaaaccacggtgcggcacagccgcgaccggcaagaagtgttggaggccctcgcctctaccgaccacgatcacctgcggttctaccgcccggacgcaacaaaggcggggtttgtgctcctgatttgggagaacggggacgacgccgcgagcgactggagcgacaacgacgagaccaacgcgctggtgatgccggtgctgcgcgggctgggggtgctgtga

SEQ ID NO: 497401 - DNA, 600 bp, Stenotrophomonas maltophilia
atgaacaaaattccttccgccctgatcgccgccgctctgcatgtggcccccaagaatgacgttcgcttctacttgaatggcgtgctgattgagtcgcacgccgatggtgcgatcatcgttgctacagacggccaccgcatgcttgtggtgcgtaccagcctgccgtgggacattggcaagatcatcgtgccgcgcaatgcgtgcgagctggtcgccaagatgaagggcgatgtctatttcagcgccgtggacgatgccagccggttcaaggcggagcgcggaggccaggccattgagtttgctgccgttgatggaacctacccggactggcgtgctgcggtgtccaagccgaacgaactcaagctgtccggattcgcgcctgccgtcctcgaaggcgtagtgaaggcggccggtgtaatttgcaaggcattcggcggcaaggccacttcactgattccggtgactggcggcgacgtggcggccatgttcggtattggcggcatcaccgatccgagcatcaggtgcgcgtctttgatcgtcatgccaatgcgcgactcgtcatacccggaagccctgtgcagcgacgcgctccgcgcttaa

SEQ ID NO: 497402 - DNA, 171 bp, Stenotrophomonas maltophilia
atgagcaccaatggaccactggaggacttgcaagtgcgcaagctcaccgctgagattcgcaagatcaaccgcgagagcgacaagctgatgatggagacccggtggtatccgctggtggtcgccacggcctttgtggctggcatcgtcacgctgaccaagctgttcctctaa

SEQ ID NO: 497403 - DNA, 162 bp, Stenotrophomonas maltophilia
atgacgatgatcccgtttgatatgaccgcccgcgactactacgtggccggttgcatccgccgcggcatccgcgagcaccgcgcccgactcaacgagcgggagcgccaggcacacaagaaccgcacccaagttgcgccttgtccatcccccgttgtcatctga

SEQ ID NO: 497404 - DNA, 330 bp, Stenotrophomonas maltophilia
atgtacgcccgccgatacacgataagaaccgctaccgcgatcaccgtcctggccttagtgctcgcaggactccctgccgcgtactttcagaccggcgtaaggagcgctgaggagttgcgttcctggaacgagcagatcatcgagaacgacgcctcgccgcaggtgttggttgatgaggcggtgcggacgtttgacgccgcgacgaatgacctcatcagcaaccgcaattcccgcaacctgtttctccagctcgctttgggcatcccggcgctcgcttggattggtgcgggcgtggtgctatgggtcatcaaggatgggacggaggtctag

SEQ ID NO: 497405 - DNA, 333 bp, Stenotrophomonas maltophilia
atggcatcgctcaataccctcctcattcgcttggcggcgctggtcactgtcctctcgctggtctgtgctggagtgcccgccgcatatcagcacgcgaagcttcgagcagcacgggagctggtcgaacgtacccgcgaggtcataaacgatgacacgaccgcgtacagcgtggtggccgatgcggtgccaattctggattctgcactgactgaggccgcgcagcacgagcacatgagaggcctactcgtggaattcacgattggcgtcccgctgatcgtttggtttgtcgtcttggctgtaatgtggtggttcaaggatgaagaattggcgtga

SEQ ID NO: 497406 - DNA, 387 bp, Stenotrophomonas maltophilia
atggctacggatgcatacagccagggtcggctcggctcgttgttggtcatggaagatgatcctgacctctcagggatgttgaaggaaatcctggcgatgcagggttacgaggtcgatgtggtcgcctccgctgccgatgcattcgaccgcatagaggcgaaagcatttcacgcggcgatcttagacatccagacgcaggacggagcatcaatgtccgtcgccgattacctgctgtcgcaccgaattccctacatgttcgcgtccggggtgccgaacccgcagctccctgacgctcaccagtgggcgacctttctcccgaagccgtaccgcatcaaagaactcatgagcgcccttgataggactcgccaaatcggcattcctgtttag

SEQ ID NO: 497407 - DNA, 453 bp, Stenotrophomonas maltophilia
gtgaccacgctggcctttgacggccggctcgttgctatcgactcgcaggtcaccgctggtgatctgcggtacgaggaggagaagttctaccgcaccaccgacaccaccgggcgcgacctggtggtgttcggcgcgggcaccacttcccacatccagcgagccgtgcgcgagctgtcggagggattcgacgaactgaccaagggcgagtacacgatcctcgtggtcggcctgcgggacaacccggtggccttctaccacgacggtctccctctcgacctccggcgcgacttcctcgtcgccggtagtggtggtgcgattgccctggccgccatgaaggcaggccacaacgcgaccgaagcagtcctcatggcctgctcgacggacctctacagcggtcctccggtgcagacctacgacacggttacaaagcgtttcctaaaacgccggacctga

SEQ ID NO: 497408 - DNA, 309 bp, Stenotrophomonas maltophilia
atgaacttcaagaccatctacaaccgcgccagcgagcgcctggtgcgcgcctacgagcgcgctaaggggtacgtagcgctacgcattgccctcgcctcgcagtggctcctggagcgcctgcgcgagacctcccgtcgcacctacaccggctggctgttcgtcgtcgtgttcctggcgctgccctacgtcgtcctcggcggcctgtgggagcacctgcggaatgccgcggagcgcctgtgggatgacgtgaacgacatcgagtgggctgcgttcaccccgagctactggcgggagcacatcaagcagtga

SEQ ID NO: 497409 - DNA, 498 bp, Stenotrophomonas maltophilia
atgaccgacgcaaagctgccgagcctcgtggaggtcagggacaacctgatccccgcggcggcccggctgctccccggcgtggccttcactcccgaagcgaaggtcatgctgctcgccattggtctccaggaatctcgcttcgagcaccgcaggcagatcaaaggccccgcacgcggcttctggcagttcgaggcgggcggcggcaccgcaggtgtactccgtcacccggcgacctccgcacgcgcctcacagctcgtctccgcgcgtctggagcgtccctcgaccgctgcggtcaacgaggcgctcgcctccgacgacgtgctcgcctgtgcgttcgctcgcctgctgctgttcaccgatccgcgtccgctgcccgccctgggtaacccccaggccgcatgggactactacgtccgcaactggcggccgggcaagccgcaccgtgacacctgggacgcgctctacgcgaaggccctggcaaccatccgcaacacctaa

SEQ ID NO: 497410 - DNA, 192 bp, Stenotrophomonas maltophilia
atgtccaacacgctcgctgcgtggctgatggcgctcgccgccgctggcctgctgtacctgttcctgcgccgcaagaacgacgacgacaacgacggcccgagcgcacccgcgccggtaacgccgtgcgactgcaaccacgctccctgctgccacacccagggcggccagtcgaacccctacgcgccggtatga

SEQ ID NO: 497411 - DNA, 1674 bp, Stenotrophomonas maltophilia
atggagggcatgacgagcctccacgttcgtcaccctttcgaggacttccgcaacttcgcctggtacgtctggaaggagctggggctaccaagccccactccgatccagtacgacatctgcgagttcctgaaaaccggcccgcgccgtcgcgtcatcatggcgtaccgcggcgtcggcaagtcctgggtgacggccgcctacgtctgctggctcctctggaaagacccccagcacaagatcatggtggtctcggcatcgaaggaacgcgccgatgcgttctcggtgttcgtcaagcgcctgatcgaaaccctgcctgagctgcaacacctgcgcccgcgtcccgaccagcgcaactcgaacctggcgttcgatgtcggtcccgcgcagcccgatcagtcgccctcggtgaagtcggtcggcatcaacggccagctcaccggctcccgcgccgacaccatcatcgcggacgacatcgaagtcccaaagaactccatgaccgtcgtgcagcgcgagaagctcgccgagctggtcaaggagttcgacgcggtgctcaagcctggcggcgagatcatctacctcggcactccgcagaccgaggagtcgctctacaacaagctgcccgagcgcggctacgtcatccgcatctggcctgcgcgctacccgaaggacaccaagcaccgtcaggtgtacggcgaccgcctcgcgccgatgatcgccgatgcgttcgacgcgaaccccaagctcgcctggaagaactgcgagagcgtccgcttctccgatgaggacttgatggagcgcgaggcgtcctacggacgctccggcttcatgctccagttcatgctcgatgcgtcgctgtccgacgccgagaagtacccgctcaagctgtccgacctgatcgtgatggacgtggaccgcgaggtcgctccgatccgcgtggtctacagcagcggcccggagtacatcgtcagcgacatcccgtccgtgggcttcactggcgaccgcctgtaccggcccatgtacctcgcctcggaaatggaggagttcaccggcaaggtactcgccatcgacccctcgggccgaggtggcgacgaaaccggctacgcggtcgtcggcatgcttcgcggcatgctctacgcgcgccgcgctggtgcgaccaagggcggctacgacgacgacacgctggagaccctggcgcacatcgcgcgcgccgagaaggtctccgcagtcctcattgaggcgaacttcggtgacggcatgttcgccaagatgctctccggcgtcctggcgcgcgtgtacccgtgctccatcgaggaggtgaagcactacggcacctcgaaggagaaccgaatcatcgacgtgctggagccggtgctgaaccagcaccgcctggtggtcgatgcctcgatcatccgcgccgatcagaagtccgaacagaagtaccagctgtgctaccagctgacgcgcatcacgcgcgaccgcggcgcactgcgccacgacgaccgcctcgaagcgctggcgatggccgtgaagtattgggccgaccagctctcccgagacgtgtccaaggaggagcagcgctacctggaggagctgctcgaccgcgagtacgcctccttcatccagtccgtgaccggccgcatgccgtcacccgacaactacctcgacatcctgtag

SEQ ID NO: 497412 - DNA, 246 bp, Stenotrophomonas maltophilia
gtgaccgcccccaaggatgccttggagcgactgcacgccgcagtcgctgacaagctcgccgacaccatcgactcgatggagtcggacgcgaagggcctggcctcgatcctcaacgtggcccggcagtttctcaaggacaacggcatcgacgttgcggccacgccgcccggctcaccgctgggcaagctggccgacaaggtgtccgagttcccgttcgatcccgctgaggatgggcggctgaactga

SEQ ID NO: 497413 - DNA, 270 bp, Stenotrophomonas maltophilia
atgcacgatgaagtgaagctggtcggcgctctcgcgggcgtcggcctcatcgtgggcatcgcaaagatgctcacgtcgaacgatccgatcacctggaagcaggcgctcggccgcgcaatcctctctggcgctaccggccttgccgctggtgccatcgtcattttcatccccggcgtctccttcgtcgcccaggtcgcgctcgcgtgcatcctggcgtcgctcggcacgtccgcgctggagaccgtactgaaccgcgtcgtcaacaagtga

SEQ ID NO: 497414 - DNA, 486 bp, Stenotrophomonas maltophilia
atggccctccccggctccggccctatctcctgggaaatgatccgcgccgagtttggcggcggctacccgatctacgcggaccagtattaccgaggacgtggattggtgcccgacgttccggccaactacggcgtccccacgagcggcccgatctacgcctcgcagttctacaacgcggtcaaggcgacgccgttccaagcatcgctgtcgccgagctacctgatgggtaactggcctcagtccaccaacggcacggtcagcgagtcgttcagcgtttattgctcgggcggcaccggcaactactccgtggtctcccgctccgtcacaggcggcgcgtcgatctccggcagcggcctcggtggcactgtgaccgcctctgggcggaacacctcccgcatggggcagttcacagtcgtcgtcaccgatggcgtcacgcagatcaccctgaccggcaactacgagtacagcttcggtcgtccgctctaa

SEQ ID NO: 497415 - DNA, 2805 bp, Stenotrophomonas maltophilia
atgagcactacccccggctacgtctccaacgccgagctggcctcgcgcctctcgacgctggtagaccgctggaaccggcgcgagaatcagatgatcgcgctgctgactcaggaggaaggcaccgtcgtcgtgacggacggcctgggcaacaaccacaccctcccctcgttcccgcagctccagaaggacgtggccgggctgaccgacgagctgaccggctcggtcgtgcaggtgcgcgacctggtgtccgtggcaaccggcatggcgaacgccgcgcaggcgtccgcagatgacgcctctggcttcgccgacgctgccgaagcatccgccgtgcgcgctgcggaatccgccgcgagcatcgacgacgacgtgcaggccaccgccgacgcggcgaccttcgctgctgccaaggcggccgaggcttccgacagcgcgaccgaggcggcaagctccgcagtggacgccgccgcttcggcgacggcctcggccacctcggcgctggcttcggctggctccgcaagccaggcgggcacgtcggccaccgcagcgggtcaggcgcgttccgacgcgcaagcagcggcgactgctgccgccacgtcacgggatcaggcgcagaccatcctgggctatgcgaccgacgcggccgaccgcgcggaagctgacgccaccgctgccgcagcatcggctgccgcagccgccgacagcgcgaccgccgcagcgacctcggtcactcaggcgaccacccaggccaaccgggcggaagcccaggcgtccgccgcggcgaccaaggctggcgaggctgctggctcggcgaccaccgcagccggtcatgcctccgctgcgtccggctcggcgtctgccgcctcgatctcggcgcagaccgcatcgtcggccaaggccgctgccgaggctgcccgcgacaaggctggcctgtacgcgaacgcgccgcagggcaccgaggtctcgccgggcgagttctcggcgaagcattgggccgcccaggcgcaggctgccgtcactggctcgctggtctacatgggatcgtgggatgccggcactggtgcgttcccggccaacccggtgaagggtcacttctacaaggtggtcggcgaaggcactgtgggcgacatccactggcgagtcggcgaccaggcgctctacggcgctacctgggagaagatcgacaacaccgatcaggtcaccagcgtcgccggtaagcagggcgacgtgaccctcgtggctggcgacatcggcggcctgggcgcgctggcgacccgcgacgacgtggacttcaacacccacgtcaccgggaagccgacgacctacccgccgagcacccacacgcacaccaaggcgcaggtcggcctcgacaaggtggacaataccgccgacctcgacaagccgatcagcaccgcgacgcagacggcgctcgacggcaaggcggcggcgacgcacacgcacaccatcgccaacgtgaccggcctccagtccgcgctcgacggcaaagcggcggcgtcccactcgcacaccatcgcaaacgtaaccgggctgcaagcggcgctcgacgggaagtcggcaatcggccacacgcataccgccgccgagatcgccaacgtcgtcaacgtgaccgacgatcagtccatcggtggcgtcaagacgttcgcctccgggcagattcgtgtgcagggatttggcggcgaggccacgtccggcgtcatgtacctggggtcgctggatcgctatgtgtacgtgccgccagctgcgaactcgctggagttccgattcggcgatggcacgggtggcgtcgcgtccctcaacgctggcggcaccgtctggacctcggcgaacttcaacccggcaggaaaggccgacgccggtcacacgcacaccatcgcaaacgtcagcggcctccagtccgcactggacggcaaggcgagcctgggtggcgcaaccttcaccgggcaggtcactctggcctatggcgcgccgctgcggttgaccggcatgggtgcagcgggaaccgcgtacatccacggaacgaacggcgctggcgatgacgtttgctcgatcacccgcgtgaacacgaacagctggtacaacctgtactggaacggtgctgcgaacattgcgggccgcctgacggtcggcgatcagatttacctcaacgctggctggttccgctcccagcagtccggcaccggctggtactcggaagcgcacggcggcggcatctggatgcaggacagcacctgggttcgcacctacggcggcaagggattccttatcgctggcccaggcggtagcggtggcgacctccgtttggagagctactcgccaaccatcacctgttacgactccgacaacgggaccacgcactggctccattgcaacgacaacaaccacggcttcctcgccagcaacgccttctcgtggtgcgcctaccgcgacggcagcaacaattgggtcgccacgggcaacatcgtcgcctatgcgtccgatgcgcgtctaaagaagaacatcgtggacgcctcggcctccaaggtggccgacttcttcgaccgcttccgtgtacgcgagttcgattgggatgccaaggcaatcgccgagctgaatcccacgttccacccgagcgcggatcacgaggtcggcggcatcgcgcaggaggccgaggaggtctactcgttgatggtcgccacgcacgcaaacggcatcaagacgatccagtgggagaaggctattcccttccttatcgctgaggtgcaggcgctgcgtaagcgcgtcgcggaccttgggggaggtgcctga

SEQ ID NO: 497416 - DNA, 2538 bp, Stenotrophomonas maltophilia
atgatcgaactatcgcgcggcctttccttcgtgctctacacctacgagggaggccctacgcggttcaccgtgccgttcccgtacatcgcccgcgaacacatccgggcgttcgtcggtgaaccggacgcggcccgcgctgtctccgtgtcgtgggtggacgccagcaccatcgagattccgtcgcaggatggcgtgctcgacgcaccctacactgtgaccatccggcgattcacgccgattgacgccctcctggtcaactacaaggaaggcgcaaacctcccggcgcgcgacttgtccaagtcgttccgccaactgctgtacgcacaccaggaactcgccgagttcggtggtggcagcggcctccccggtggcggccccggtaaccccggtggcgacccggacctcaacgcaatcatcgagcagctcctccgctcgccagcactgcaagacctgctgacccgcatcgaccttatcgacgtgaacgccgaggcgatcctggaggaaatcatgcgctcgcacgagttcttcgacgtgcagcgcgactatggcgacaagatcagcacggccacccacgagatcggactgctgaccgaaggcaacaaggtcatcgcgcagcagatcatcgacctgttcgcgcgggtggactacggcgagcaaagtagccaggcacgattcctggaggtcaatcgcgccatcgctgacgagcgctccgcgcgcgtcgaggcgatcaccgagctgcaaggccaggtggtcgagaacggcaagacgatctccgcagcgctcaaccagcgcatcgacgaggtggagagcaccaccgaagcggcgcgtgcggccaccgagcagcgcctcggcgcagagatcgaggacagcgcggcgcaggtccgcaccgcggtcatggccgaggttgacgcaaccaaggcccgcgtgtccgacgttgagacggcagtagtccgccacggcgagaacatcgctggcctggccgagaccaccgaagccctgacggacgccgagggtgccaacacggcattccgacagcagatggcggccagctacggcgcgaacgtgccgcaggggattgccaatgagatcgacggccaggtgtcggcggtttcggccgccttcgagcagcgcatcgacaccgaagcgtccgcgcgcgaagccctggcttcccaggtatccacgctggagaccagcaccgcgccgacgatcttctcggacgcgcagccctccccgcccgctggcggcttcaaggttccgaccttttgggtcaagaccgtgcagaccggcgcgtacctgacgcagatttgggatggcaccggctggcgcaaggccgacctggatgtcacctctccgaccggcgcgctggtgcagcagctcaacaccaccaagatcaccgccgagcaggcacaggccatcgcggccacgcaggtccaggcgttcaaggacggcgacttcgccaccatccggcaggagttcaacgtggtcgccgggcagcactccggcatgtacggtcagtggcaggccaactactcggtcaagatcaacgcgggcaccatcaacggcgtccccgtggtcgccggtatcgccctctccgccaacccgcagaccggcagcgacttcatcgtcaccgcggatcgcttcgccttcgtccacccgcagtacacctcgggcggcaccttggcgagcatcaagtatccgttcgtgatcggcactgtcggcggccagtccaccgtgggcatccagggtgcgctggtggtggacgggacgatcactgcggacaagatcagggtgaactccctggccgcgctcacggcaaacgcaggcacgatcaacggcggcacgttcaagacccacaccctcgacggcaacggcaacatcgtcaacgctgccgagttccgcgtggaaatctccaacctcggcgactggcccctgtgggtcggctccggcgcgaagaacgccaacaacgcggtgttctacgtggaccgcaacggcggcgcgttcttccgaggccgcgtcaatgctcccaacatcgttgggcagttccagtcggcgaccggcgtgtggtggaccggggcaacgagcctctgctaccaggcgggcaacaacttcatcccgctcggcgattgggtggcgatccacgagttctggctcggcgctccggtgctggctggcgagggtcatacgccctccgtgtcggtgaccgtcaccgcgaacacgcgcgtctacgggctgcacgtcatcttggaggagctgcgcgactctgtgtgggtcgtcatcgcctcgcacgagccgccgatgtaccgcgcgttgattcagcagatgggcggcgacggcaacaccttcactgcgtccaacttctacacctacgagcagtcggtgacgctctcggcgtccggcgcatggacaggcggtgcccgcgcattccgcgtgcggtgccgcgcatccagcccgcctccgcaggtccacggctacgacgccccggcctacccgaactacctcatcacgtcgattggcggcttcgccttcggcatccgataa

SEQ ID NO: 497417 - DNA, 3165 bp, Stenotrophomonas maltophilia
atgtttgaatccctacccggcgcagacgagaacatcgtcaagccggcaacccagcagcccatcgtgcaagccgtgcgcgagcgcaaggagcagcgagaggccgcggagcgccggaaggatcagacgaccgtatgggacggatggggcgctgcccaggcaaagggcggcatcggcttcatcgaccgcttcatcaccgagctgggctacgagccgcagcagggctatcgcattcccgcagacgcgcgcaagcgctgggagtcgatgggcctgcgcccggagcagtgggagctgttcggccgggccacgtccgacgagcacctctcctatctggaatccgtggcctttatgaatcagatggcggacgacgacctggcgcagttcggcctgggcggacagatcgccctcggcttcaccgacccggtggcaaccggcctcgatctcgccacgggcggcctggggtacgcagccaaggccggacgcctcgccaacgcggtgcgttccggtctacaggctgcgggcacctccgcgctgatgtcggccgcaacctccacctacgaccccgagcagacgctcgcggatggcgtgcagagcgccgccctgtcgttcgcgttcggtggtgccctcggcgctcgccggggtgccctgttcgacggcgaggtgaagcctgacgtggtgaagcggctggccggtgacgactcgctgtccgccgcccgcgtggcaggcaccgccgccaacgacctcacgccaggcgtcctcccgctgcgcaacgagagcgcattcgagcaggagttcaccgacaaggcgctggtcaacgcgcacatcacgccccacttcgccaccgtccgccgcgaccttgctgcccgcatgggtagcgccaagtcgccgctggtgcgcgaggcgggccgcctgctgttccgcgatggcgtcggctacaccgatcgctccgtcgcggtccaggagtccaccagcgagttcgccaagcgccacctggccgtcatggagacggaatggcggagcggagtgaacgccgcatgggacgcctacaagcaacggacaggcacccattggtggaacttctccgagcgcgcaaagttcaacgaggaggtcggccgtgccgtgcgcggtgcgcctgacgtatcaccggaagccgccaaggcggccggcagcgtcgccaaggcgatgcgcgatgcgctcaagctggcgcaggacagcaacctcgacggcttcgccaacgtggcgcagaacggcagctacctgccgcgctactggagtggcaagggcttcaagcgcctgttcggcgagatgcagcttcaccaggacgacgtgatcgagcagctcatcaagcccgccatgcgtcgcgcctgggaggccaccaccgacgaaggcgacgagatcgacgacgagctgctcggggcggttgcacgctcctacctcaagcgcgcccaagcgaacttcgagggcgacgggatggacctgctggtccgcccgctggacagcgattcggtcgaggagatcggcaacatgctgaccgaggcgggcgtctcgcccgtgcggtcgcaagagctactgtccaagctggagcgcaagacctacgagtcgggcaagctcgaccgcgcgaagaagcgcatcgacctcgacgagacctactccaccaccatccgcaacgaggctggcgaggacgtgcaggtctcgatggccgacctgttcgacaacgacgtggactcggtgatgacccgctacatgcgcgagatcaccggctggtcggcgctgtcgtcgaaggctggcatcaagaaccgcgcacagctcgaccgcttcgtgtcgaagctcaagagcgacgcccgcaagtccggcgacgacgtgaaggacatcgagcgcctgatcgacatcggcctcaagtccaccttcggccgcagcaccgaactcgatcccgccagccgaggcgcacgctacgcgcggttcctgcgcaactggaacttcgcccgcgtgatgaaccaggtcggcttctcgctgttcgccgagcttggcccgaccatcgcgcatgccggtctccgcaacttctggaactccgtgggtgccgcccgcgacttcctggtgcgcggcgctgacggcaagctgtcctcgcaggaggcgcgcgtcatggagcggctgttcgcacccggcaccgactggctgcgcaacccgccgttcctgcgcctggacgaggatgcgctagtgccgcagacgttcaacgtcaagcacggcgagaagatcgacaacgcgatgaacatggcgacgcacgtcacctcggtcgcatccggcatggccccgatcaacacgatgctccaacgcatcgccggtcgcgccacgctgctgcggctgctggacatggcgaacgccaagaagctgtcggacgccgaagtggcccgcctgcgcacctggggcctcgacgagaaggcccaggccgacgtgttcggctacctcaaaggcaagcggcagatcgagcagatcgacccggacaagctgccgttccagacgcgcgagcgcatggcggccttcctgttccgcgtgacgcgacaccaggttctcgaaggtgacgcctcggacagcatcgagctgatgcactccaccaccggccgcatcgtcacgcagttccgcagcttcatggtcaacagctacacccgccacttcctgaactccgtccaccactacgacgactggcgcacctacgcgatggtcgtgctgtccacttcggcagcaggcatgggctgggcggctcgcacgtacatcaacactgcgggcaaccccgaacagcggaagaagcagctgacgcaggagaacttctacaagaacgctgtcgcgcaatcgagctggtcgaacgtgatccccgcggtcaccgacgccgtgtgggcggacgccttgggtaacgacccggtgttcgccaacaaccgctcgaccggcctggagaacggcgtgatgggcatcccgtccatcgacctgttcaacaaggtctacggcagcacgcggatgatcggttcggccatccgcgacgatgaggagatcaccgagaagcagatgcgcgacttctggaagatttggtggttcaacaacatgacgggcgtccgcaacatcgcggatcaagccctacagcagttccctgaccgcaaggacgggactgatcgaccgtaa

SEQ ID NO: 497418 - DNA, 2175 bp, Stenotrophomonas maltophilia
gtggctcgcacgaaaccccaagagatcatccgccgcgcgcaggtgccgcagcgtctcgccgagcgccccgttctggcggtgcaggctgaccaagcgtcctccgctggtgccggtgtcctctctcgcaccgccgctgcggtgctgacgcgcgtctcggattccgtcaactcgcagatgatctcaaacagccgcgagcagtacagcgccgcggcgacccaacgtatgcaggaggacgccgagggtacgccccggcaggccgaggacttcgttgcccagcagtcggagtcatggcgtcgcggctacctcaaggcagacggcatcatccgcgtccgcgactggcagatcgaagcggccaaagagatcgccaaggccgaacccggcaccgacatcgagccgctcatcaaggagcggatggctgcgctgacgcaggaccccgagttccaagacccgcaggtccgcaaggccctgatgccggtcgccatgcgcgccgcgcagcaggtccgccagcagtggcaggccgactcgatgcgggaaatgctggtccggcagaaggagtcgctgaccgcgatcatccgcgacggcatcaagggcggcacgttcctcacttccgagggcatgaacggcctgtacgcgatgctggaccaggaggagtacgcctatctcaacaagcgcgacgtggacgaactctacgtcgaggccgccaaggaggagctggccgcaggcaaccgcgatcctcagtcgatcctggcgttcctggagcaggaccgcggcgacggccagcccggcttgatgaacaccgagcacggcgacgagctgcgcgcggcggctgccgctggtgcccgcgtgatcgcacaccgcgaggacgaggcacgcaagcaggcgatggccgaggcagagtggacgctccagggcctcgcggatcgcggccagctcacccacaagaccatcgacacctgggccagtaaattcggcctgagcggtggcgacctccagtccttcaagcgatactggaacaaccagcaggagcagacgcttcgccgctgggagcaggaagcgaaggagcgcgcccgagaggagcgcatccgcaagctggtagccgggggcaatccctacgagatcagcgacgccgacctcaagaagcaggccggtaaggagtgggaggaaaccccgcaggccgcacgcggccaggtgctccagaagtgggcacggcagggcatcgtcatcccccagctcgaacgcatcctcaagcgcgctgacccggcgttccaggagaacttccagaacgccgcgacgctgtacgaacagctccgcaaggtctcgcccaagtacgccgatacggtcgctggcggcgaggctgccgcaatgctggaccagtacctctacgacacccggcgcagcggtcagtctcaccaggaggccgctcgcgtcctgacgcaaccgaagcgggaagtcgaggaggcccgctcggtcatcaacgacacctggaagtccggcatcaaggactacctggagatcgacggcaagccgcgtgacccgcgtgagctgcaccgcatccgccaggaagccgagcgcatcgcctcgcgtggcggagtgtccggcgaagctgccatccgtgcagcggtcggtcagatcgacgcccagcgcacgaccgtcaacggccgccgcgtgccaaacatcggcatgccgcagggtgccgagccagcggtagacgagctgatccagacggtcgcgcgcaagctcggccgcgacccggatgagctgtcggccctgcccaatccccgcaatccggggcagtggcagatcgtcggccccgacaactggctgatccctgacccggacaccggccgcgccatcggtttcgacccgcgtgccatcgcggcacagcaccagcgctggaagggagaccttgcggaatcccaggcgcgtcgtcgggtcgagcagcgcaccacctgggcggaccagtcccggaacatccgcgacctgcgctcgcagtcggcgaccacggaagtccctgcggccatcgccaagcgcgacgccagcgccgccgaggctcccgccttcgagctgcccaagttcgacctcaccaagccgctggttcccaacgcgggcaccaagcaaaccaccaccaccccggcagtccccgaggacttcctggagtacctgacgaggaagtaa

SEQ ID NO: 497419 - DNA, 447 bp, Stenotrophomonas maltophilia
atgtgcaaccccgtagcagtccaggtcggtatcgccgcagtcagcgcgatggcgaccatgtacggccaggatcagaacaacaaggccatcgaggaagccgcggagcgtcagcaggagcagatcaacgaccaggccgccgagcgcacccaacagcgcatggaggaggcccgcgcactgcgatccgcgatgcgcgcctccgcagcagaagcggcagtgtccggcaactcggtcgagctgctggcgaacgacatcatggcccaggctggccgtgacgtggccctcatcgagaagaaccgcaggaacggagtcgtcgaaagcggctccgaagcacgcgctcgtatccgcaccggcaatgccgaggcgctgggcggcgtgatgcagtcaggcgcgaatgcctacagcaacatccaaacctacaagcgctattccattcccggagacgagtaa

SEQ ID NO: 497420 - DNA, 474 bp, Stenotrophomonas maltophilia
atgaccctgacctatcgaagccccaccgccagcgacatcctccacgtcgccgagaacatgcggcaggaggacatcctggaggtggcggcttcgcatggtcacaccccgctccaggcgctcgcatttgcagtgaccgcgagcgaccgcagtttcgccgcgatgcacgacggttcccccgtgtgcatcttcggcttcagccagcacgccgagggtatcgcctcggtttggctgctgggcaccgacgccctggtggctcccacgttctgccgcacgttcctccgagaagctcggcggatcagcgacgagtggtcggccaccttcggcaccatcttcaacttcgtcgatgtccacgccgtcaccacgcggcgatggctcggctggcttggcttccgcgagagcggcgtcgagtccgcctacggcttcgccaagacacccttcgtccgagtaaccaagaccccatgtgcaaccccgtag

SEQ ID NO: 497421 - DNA, 2133 bp, Stenotrophomonas maltophilia
atgccgctaatcacgggggactatccctcgttcctgggaggcgagtcgcagcaggacgataccgtccgctcgccgaaccagctcaccaaggcgatcaacgcctggctgcatgccgcaatgggcgctggcaagcgcccgcccgccgagttcgttgctggccttggcgtcaccctcgatcacgactgtgccttccactccatcgtccgcgatgagaacgagcgctacatcgtcgccgtgggtcaccgcagcatccgcgtgttcgaccacgagaccggcaaggaatacaccgtcaacgccacgggcgacgcgctcaactacctggacacccagggacagcgtgcgtggtcgtgcttcgcgctggcgacgttctccgacaccaccttcatcgtcaaccggctggtagacgtgaagcagagcgatgagctgtcgcccggttcgctgtacggatcggcgcaaacgatgtccgacctgccgaagcccggcgacaaaggctcggccgttgtgccgaccggcgcgatctacaacatcatcggctcgtccgaatcgcaattcgacgactactacgtccagaagcagtcctcctcggtctacctggaggtcgcccggccgggcatcaagcaccgcttcgatgccaagacgatgccgcacatcctcaagcgcatccccgatccagtgcatgcggacggcttttggttctccttcggtggaccggagtggaccgcgcgcctcgcgggtgacgagcaaagcaacccgttcccgtccatcgacggccagcgcatccgcgaggtgttcaagcaccgggaccgcctaggcttcctggccggggagaacgtgctgatgtccgaggtctccgatccgttcaacctctggcgcacttcggtgacccaggtgctcgacgccgaccccatcgacgtgagcgtcagcgggtctaacggcgtcaccacgctctaccacgcagtcccgttccagtcggccctgttccttgccgctgcgggcggccagttcctcctgaccgccgagccgtacctggccgccaagaacgtcaagagcgatccggtcaacagctacagcagctcgccgtacatccggccgaagctgatgggcgagtcgctgtacttcaccgaggacagcggcgcatacgccagcgtgcgcgaatacttcatcgacgacctgtcggtgaccggcgacgccgccgacgtgacggcgcatgtgcccaagctgatgccgggccgcatgcgagcgatggcgagcgcaagtggtgccgactgcgtgttcttcgctcctgacgagccgaccgacgcgcagctctacgtctacttcgtccgctggatcggcgacgagaagcagcagtccgcatggacgcgctggtcaatctccggcgtcggtcgcatcgtccacatgcacgccatcaacgacgtgctgtacgccgtcgcggaagccccaggcggcggctgcgagctgctcaagttccgcatggtgctcaaccagcacgacacggatgccacgggcgactacaacttcctgctcgaccgcatgctggtggtgcagcccacctatcagcagttcggcaacgagacctggatcgacctgccctacatcgtgcccgatggcatgacggtcaccgtcctcaagacggacgactggcaagaccccggcgcgtacctggacatcaccaaggcgcgctgggacaacgcccgcacccgccttgcgctccccggtaaccacaccgagggccgcgtggtcgtcggcatggactacgagcaccgcctcaccctgaccaagcccatcgttcgcggtgggcagaaccaggccgtgctggtgggccgcacgcaggtgcgtgacatcgaggtcgcctacaaggatggcgcgtacttcgagctggaggtcgagcagcacggcaatggccgcgtcgagacctacgtggcgtcgcactccggtgcgtacaccgcgcgcgtcctcaacgactcggtgttccgcaccagcgccccgacgttccactccggctctcgccggttccccgtgctgggcgacgccaacagcgtccgcatgcacctcgtcaaccgcctgccgttccagtgctggttccagtcagcacagtggcgcggcatgttcgtctcccgcagccgagtatga

SEQ ID NO: 497422 - DNA, 591 bp, Stenotrophomonas maltophilia
atgaacctcgaactcactccgaccacggaactcgaagccgtcaatgtgctgctcggtgctatcggcgaagcgccgatcagcgacctcgaagcgctcggcaacctgtacgcctcgcaggcgcgcgacaccctccgcgcggtgagccgcgaggtccaaaccgctggctggtggttcaacaccagcgagtcgttcaccttcacgctcaacgcggaaggcaaggtgctgccgccgcagtcgatcctcaagctcgtccccgcacgcggaagcgagccgctggtgatccgaggcacgcgcctcatcaacccgctcaccctcgccgacacgttctcgtcggcccccaccgccgacttcgtgacctggttcctcgcctacgaggagctgcccgagtcggcccgccgctacatcgccgtgcgcgctgcgcgtctgttccagacgagcgtgctgggtagcgaccagctctacgtgttcaccgagaagcacgaggaggaggcatacctcatcttcgcgcaggagcacgccgacttcacctacgcccgcggccacaacttcctcagtggctcgacggacgtgtctgatatttgggaccgctga

SEQ ID NO: 497423 - DNA, 954 bp, Stenotrophomonas maltophilia
atgtcggacgcaatcccctcccgcctgggtcaagcccaggccaacggcgacgcctgggcgctgttcaagcagaactacactgctgaaaccatcaccagcttcgtcgagaactacaagctggacggccgcgtgtcggtgcgcaacatcgagagcggcaagtccgcctcgttcccgaacgtcggcaccatcggctccgagtaccatgtgccgggcaccgagatcaagggcctggtggtcgagcacaacgagaccatcatcaccctcgatccgatgctgatctcgcacgccttcatcgccaacatcgacgaggcgatgaaccactacgacgtgcgttccgagtacacccgtcagcagggtgcggagctggcgctcaagcgcatgcagaacgagctgcgctgcgcgatcctggccgctcgtaccaccgaaggcaaggtcgaaggccagccgggtggtgccatcatcaaggccgccacgatggcctccgatccgaccgtgctggccgatgcgttccgcaacgcccgcatgctgttcgacgagaagctgctgccggacaacccgcaggagttcactggcgcactggccccggctcagtggtatctgctgaccgagaacaaggacttgatcgaccgcgacatcaacgcggaatcgaacggctcctacggccaggcgatcatttcctcggtcgcccgcatcccgctggtgaagatcaacgcgatgccgcgtgtcgatgagtcggccctggcctcgatcccggccaagtaccgcggcaacttcgcggacaccgtgggcgtgatcttccaccgctcggcggtcggcaccctcaagctgctggacctgtccctggaggacgtgtaccagggcgagaagcagggcaccctgatgctggcgaagtacgcgctgggtcacggcatcctggctccgcgcggtgccatcgagctgtcgaaggccccgtaa

SEQ ID NO: 497424 - DNA, 786 bp, Stenotrophomonas maltophilia
atgtcgcagccgggcaagtccgaagtgaccgtcagccttgacggcatcaacggccagccgaccccaggtcagcagccgccgcagaactcccaggacacccagcagcccgcaccgggcgcgcagggtggcaccgatggcgagcgcctgttcggcggcaagtacaagaccgtggaggagctggaagccgcctacgcacaactgagcacgccagccgacgacaagggtggcaagggcggccccgcgaccatcgacgacgccaccgcggatgacgcgcgtgacgccttggcgcgggctggcctgaacctggacgacttcgccaccgagttcaactcgaacggctcgctgtccgaggagagctacaagaagctccaggacgcgggctatccgaaggagctggtggacgtgtacgtcgatggcctgcgcgctcgcgtgcagacctacgagaacgccgtctactcgcccgcaggtggcaaggccggttacgacggcctggtccagtgggctaagaccaacctgagcgccgagcagaagcgggcgttcaacgaagcggtgcagtccggcgacgccggccgcgcagcgctggcagtccagggcctcgtcgccctccgtggcggcaacggccgccttctgaatggcaagaccgcatcgaacgccgatgcaggccccaagccgttccagtcgcaggcgcaggtcgtcgaagcgatgcgcgatgtgcgctaccaccgtgatccggcttaccgcgcggaagtctccgcccgcctggccgtgtcgccgctgttcaagtaa

SEQ ID NO: 497425 - DNA, 144 bp, Stenotrophomonas maltophilia
atgtcgaacgaaaccaccgagaagcccgccaagccgaccaaggaagccccgaaggctccgagcgtcgagcgtaagggcaaggccgagatcacccgcaagacgaacggcctggtcatcgtcaactacaagcccgaggacaagtaa

SEQ ID NO: 497426 - DNA, 1557 bp, Stenotrophomonas maltophilia
atggctgacgccaagcagacctcggccgagaagcagacggccgcgaagcgctacggcgatctcaagtccaaccgcaaagaagccgagacgcgcgccaagcgctgcgccaaggttaccctgccccgcctgtgggtggacgagggcgcgaaatcgcgtacccccggttccgcctacatcgacaccggcccgaagtgcgtcaacgccctggcctcgaagatcgtgctggcctggctcccgccgaacgcctcggtgttcaagctcgcgcctgaccaggcagtcgccgagaacatcgccgagcaggctggcgtggagacctccgaactggaggccgcgctggtggacgtggagcgggtcatcgtcaacgacctggagaccagcggcgtccgcccggtcctcagcgaggcggccaagcacgccatcgtcctcggcaatttcctgctctacgaccccgacgagggcaagcctaagctgtatccgctgacctcctacgtgaccgaccgcgacggcctgggcaacgtgctggagatcatcacgctcgacaagatcgccccggccatgctgccggactcgatccgcgcggcggtgatgcagaagctcgcccaggaacgcgacgaaaagaccaagaacgacgacgtgaacctctacacctgggtgcgtcgctcggaagatggcaaggagtgggaagtggtccaggaggtcgagggcgtcgaagtccccgagaccgtgggcacctaccccatcgacgcctgcccgtggattcccctgtgcgcgccgccgtccctcgtggacgactacggcgagggcttggtctacgactacgtgggcgcgttcgagtcgctggaggcgctgcgcaaggcgatccgtaagggtgccgccgcgctggcgaagatcatcatgttcctcaagccgacctcgacgatccgcgagcgccagctcaccgaggccgagtccggcgcggtgctgcgtggcgaggccagcgacgtgaccacgctccagctccagaaagcctacgacctgaacttcgtgcgtcaggaggccgaagggctggcgaactcgctggagctgatcttcggcgtgaagtccgccgtgcagcgccccggcgagcgcgtgaccgcctacgaaatccgggtgctcacccaggaactcgacgacgccctcagcggcttcatggcgatgtcgggcgagcagctcttgctgccgctgatccgccgccgcctgcacaagctccagaagcagggtcgcctgcccgagctgccgcaggaactcatcaagccgcgcatcaccgttggcatcgccgccctcggccgcggccacgacctgaacaagctgatcgagttcggtcaggcagtggatgcgcttgtcggcgcagaggagaaggcgcgccgcctcaacagtggcgaggcgatctcccgactggccgccgcttccgacatttccaccaagggcctgatccgctccgacgacgagcttgctgccgagcagcaggacgcctcggcgcaggaggcgatggtccgtgccgctccgaatatcgcctcagcgatgacccaaaccccgtaa

SEQ ID NO: 497427 - DNA, 171 bp, Stenotrophomonas maltophilia
atgtgcagcaagcccaacatgccggaccagcaggagaaagacccgatcctgctgacccgccaggacacccagccgaccggccacgcggccgatcagcggcgtaagtccaaggtccgactggacctgaacaacgcaacgcagtaccaaggactgaccattccgaatggctga

SEQ ID NO: 497428 - DNA, 180 bp, Stenotrophomonas maltophilia
atgcaaatccctctgcactcctacgacctgatcgacctcctggacgaactgcaccccgaagtgatctacgaccccgccaagccgaaggaggagttcctgctccggcagggcgagcgccgcctgatcctccggctaaaggcgctgcggaaggtcgagcagatggagcaccgcgcccgctaa

SEQ ID NO: 497429 - DNA, 537 bp, Stenotrophomonas maltophilia
atgaagatcatcggaatcaccggccgcgcccgcagcggcaaagacaccctggccgagttcctggtcagcgaccacggcttcgtgaagctgtccttcgcggccccgatccgcgccttcgtggcggacatcaccggcctgccggtgtccgcgatggaggacggcccgctcaaggaggagccgctcgactggctcaacgggcagaccccgcgccgcctgatgcagaccgtgggcaccgagtggggccgtgaaatgatcgaccgcgacctgtgggtcaaggtggtcgcgcagaagatccgtcaggcccgccgcgacggcgctgctggcgtcgtggtgtcggacgttcgcttcgacaacgaggcgcagttcatccgtgagtggggcggccaggtggtccaggtgctccgcgacagcgcggccccggtctcggcgcatgcctccgaggcaggcgtccacggcgacctgatcgacaccgtgatcgacaacaacggcccgatccaccgcctgcggatggtcgcggaatcgctggcccgactctaa

SEQ ID NO: 497430 - DNA, 309 bp, Stenotrophomonas maltophilia
atggcgagttctacgccgagtaacacaaacggagcggaaatctctgagcttgcacagaagctctatggcctacaggaggcgatggatgcgctcgtggcatcagggcaagcacaaggaattcagcgagagcgctacgatgcggccaagcagctcatcacagataagctcactgagttcagctgcacgtatgaaacgttgactacgccgaaggcgatccagctttgggttttcaatagccgagaacccgtaagtcggaatccgtcagagattgcacactggaagcagttctacgtggacgagttgcggtaa

SEQ ID NO: 497431 - DNA, 207 bp, Stenotrophomonas maltophilia
gtggaaaccctgatcctgttcatcaccatcgtcgccgtgctggccgtgctgttcgccttcgtcgcctacggcgctgcctggctgtggtggcgcagcctcaacaccctcgaacgcaccctgtaccgctcggctggcagcgtcaagctgtggccggccgctgtcggcgttgctggcgcggcttggctgatcgcccggtgtttcgcctga

SEQ ID NO: 497432 - DNA, 834 bp, Stenotrophomonas maltophilia
atgaacaagcgcggccccctgctactgatcgacgccgatgtgctgcgctaccagctcgcgttctcgaacaccgcgaacatcgactggaacggcgacggcaacaaggtcgaagcgatccagcccgagcgcgcgaaggcgaagctggaggactacatcgacgagatcgtcgagaagttcggcgcgcgtgattacctgctggccctgtcctgcaagaagcacaacttccgcaaggacatcgacccaacctacaagctcaaccgtgccagcaaggacaagcctgccctgtggtacgtgctcgacgagttcgtctacgacgagttcggcgacaagatcgtggagatcgagaacctggaaggtgacgacgtgctggggctgctggcctcgcacccgaatccgaagcgagcgccaggcagccgcatcgtcgtgtccatcgacaaggacatgcagacgatccccggcatccgtctctacaaccccaaccgtcccgacgtgggcgtccggccgatctcggctcacgacgctgacctgttctggatgaagcaggtgctcacgggcgaccaggtggataactaccccggcttccccggcatcggccacaagggcgcggacgagctgctcatgcccatccacgaggcgtaccgcgatgcgtccgtcgaggagcacctcggcgcgctgtggaacaccgtcgtcaccacctacaccacccgcatcccccgcggcggcaccgagccgctgtcgaagcacgatgcgatccgccaagcacgcctcgcgcgaatcctgcgctacggcgactacaaccccaagaccaaggaagtgaagctgtggaaaccctga

SEQ ID NO: 497433 - DNA, 150 bp, Stenotrophomonas maltophilia
atgacttcctacgtcacctatcggccaccgcaggcggccggttcctgggtcattggcggcaacttcttcgtgcaggtccgggagcgtccgaactggctgcaccgctggttcgcgctggcgttcctgggatggcagtgggtggacgcatga

SEQ ID NO: 497434 - DNA, 312 bp, Stenotrophomonas maltophilia
atgaagcgcgctctcctgatcctggcgctgtgtgctggcctcgctgcgtgcgatatgaagccctggccgccgagtgcggactatggctcgtgcctgaaagggcacagcgagaactcctacatcatcatgtggcagtcgatgtgtacggggaactcctgcacgcagattccgtacaccatcccgaccaccgacttcgtgtgcgacgagcacgagtacccgctcggcgacggcccggagtaccaggccggaatgaagcgctacgccgccgagctacaggcgtggtatgagcgctacccggagaagcggccatga

SEQ ID NO: 497435 - DNA, 249 bp, Stenotrophomonas maltophilia
atgaacgagaaccggcttcgcgtgcatttcattggcggccccgctgacggcgatgtccgcgtgatcgatccgtgtaccacctaccgcgtggctgtgctcgaacaccagcccgaggttcatgcctacaacgccaagtgcccgtgctgcaccgagcgcatgctgcgccccgtggagtggagcaccgcgacctacttcatccgccgcgttagcgagaagtgctgggtcgccgtacacgagagcatggtatga

SEQ ID NO: 497436 - DNA, 189 bp, Stenotrophomonas maltophilia
gtgccggagcagttcctccagccgaccgtcattgagggcacgcactcctcactcgacgccgtgatggctgacccgaccaccaccacctacgacctctaccgcttcggcggcaacgccgaggacggcctccagcgttgcaacgccgacaaggcgagcgccctggaagtcctcaaggaatcgaaccgatga

SEQ ID NO: 497437 - DNA, 366 bp, Stenotrophomonas maltophilia
atgaacccaaccaacatcctgcgcgccctcgcggcgctgctggtcgttgccgcgctcgcggcaggcggcttcgcagcctggaagtacaccgcaatggcccagcgcgtgacggagctggaggagtcggcaaaggaactggccgacctcaagcagaccgtcgagaccctcaaccgcgaagccgtgcgccgctctgccttcgatgcagcgctgcggaacgcccgcgccaccaccaaccgctctgtggagattgcagcaaatgctgacccggaaactggcgattacctgtctcgccgcattcctgacgagctgcgccgcgcacacctcgaaagtcgtgccggagcagttcctccagccgaccgtcattga

SEQ ID NO: 497438 - DNA, 339 bp, Stenotrophomonas maltophilia
ttgggccgagacgcactgacccgcggcaagcgggacattgcactcgccctggtgcgccaagcgaaacgccgggcagctaggaagggactgccgttcgacctcacgtcggacgacatcgtggtccccgacttctgcccggcactgggcatcccgctgtaccgcgctgtcgggcgcaaggcccaaggccccaactcacccacgctcgaccgcatcgaacctgacctcggctacgtccggggcaacgtgcgcgtgatctccgcacgcgcgaatcagatcaagtccgacgcgactccctcggagcttctgcgagtcgcctgttacgtccaagagaaccgatga

SEQ ID NO: 497439 - DNA, 1875 bp, Stenotrophomonas maltophilia
ttgatcctcgtattcgactgcgagaccaatggcctcctcgacgaacttgacacgatccactgcatttccctccaagaggtagatgagaccggcgcaccgcgcggtcccatcctgtccgccaacgatcacggcacgggcgaaatgacagtccgtcaggccgtcgagaggctcaagaaggccaagcgcgttgtcggccacaacatcgccggattcgacattccggctatcgccaaggtgttcccggacttcaaggtccaggcgtacttcgacacgttgctgatgtccacgctggtctacccggacctcaaggaccgcgacttcaaggcccgcaagaagcagggagcgaacccggtgttgccgggcaagctgatcggccgccacgccctcgaagcgtggggctaccgcctcggtcgctggaaaggcgactacgcggcgcagatggccgcacgcggcctcgatccctgggcacagtggtctcaggaaatggacgactactgcgaccaggacgttgcggtcacgcaagcgctgttcgcgttgctgatgagcaagggcctccctaccgaggccatcgagctggagcaggccgtcgcgccgatcctctcgcgtcagcagcgctacggctacctgttcgatcaggagaaggcgcgtgagctggagtgcatcctcgtgtcccggcgcactgcgctggaggccgagctgcgcaaggtcattccgccgtggaaggtggtgaagcgcaagttcgtaccgaagcgcgacgacaagcgccgcggttacgtcaagggcgtggaggtcacgacctacaaggacgtggtgttcaacccggcaagccgccagcacattgctgaccgcttgactgcaatgtacggctggcagccccaggagttcaccgagaagggccagccgaagatcgacgaagaagtcctgggcgcgctcaagttcccgatcatcccgctcctgctggagcacttcatcgtcaacaagcgcctcggccagctcgccgaaggcgacgaggcgtggctcaaggccatcaagaaggacggccgcatccacggcagcgtgaatcagaacgcagcggtgaccggccgcatgacgcactcgaagccgaacatcgctcaggtgccgaaggtccagcactcgaaggagaagggaatcctcaagggccaggaaggcggctacggattcgagtgccgctcgttgttctgcgtcccaacagggaagctccaggtcggcgcggacgcctcgggattggagctgcgctgcctggcgcacttcatggcaaagcacgacggcggcgagtacgccaaggtcatcctcgaaggcgacatccactccgtcaaccaatcggcggcaggactgccaacccgcgacaacgccaagaccttcatctacgccttcctctatggggcaggcgacgcgaagctcggctccatcgttggcaagggtcgccaggccggggcgaagctccgctcgaagttcctggccgggctgcctgcgctggagaagctggtacgcggggtcaagaagcgcgcggccgagaagggatacctgatcggtctcgacggccggaagctgcacatccgcagcgaccacgccgcgctcaataccctgctccagtcggccggtgcgctggtgatgaagaaagccctggtgatcctcgacgccgacctgcaagccgcagggttggtgccgggcgtccactacgagttcctcgccaacgtccatgacgagtggcaaatcgaagtggacgaggacaaggccgagttcgtgggcaagaccgcccaggctgccatccgcaaggctggcgattacttcggcttccgctgtccgctcgatggcgagttcaagatcggaaggaattgggccgagacgcactga

SEQ ID NO: 497440 - DNA, 651 bp, Stenotrophomonas maltophilia
atgactgccgagcaacacgctcggtccctgttcgacgtgttgccggccgaagtccgccacctggtgatcctgggtggcggaagcctgcgcgcgttctacgacgggaccgaaatcaaggacatcgactgcttcttcgtgtcactggcgagctacacctacgtggccgcgtacctgagcggccgtaacgactggaccagcgaggccgctccgaacggcatccgcaacttccgctcgcccgagggtcacctcgtgagcctgatcggcttcgagttcggtacgccgcacgagcactgcgcccggttcgatctgcggtgctgcgcccacgtcgccatctacgaacccagcaccgacgaggtggtggtcgtatccctcgaaggcgcggttgccgacgcatcggagaagctgctgttcgtgctgaacaacaacggcaccgagcgcaccatccgccgcatcacgcactacgtcgaggattacggctacacgctgcatcccgaccagcccgagcaggacgaactgttcgaggacgacgacttccccggccacgcgccgcagggcgtccacacgccgccgaaggcccccgagccggagtacatcctccgcgcccgccgccgcgtccgcgcaatccccgtaaccaaccacggctacccgtaa

SEQ ID NO: 497441 - DNA, 249 bp, Stenotrophomonas maltophilia
atgaaagagatcgtcgccatcgcaatcgacctgctgaccgctccgttccgcaaggacaccgtgaccgacgtggtgaaggtgctggagggccaggtggacaagctgttcaagatcagcgccgaccgcatcgccaccgcatcgacgctgcgcgacaaggccgatgtcctgcactcgcaggccgacgagcacgaggaagaagccgagcgcgccctgcgcgtcgccgagcgcttcaccaacctgatccgctaa

SEQ ID NO: 497442 - DNA, 1467 bp, Stenotrophomonas maltophilia
atgagcgactttgcgaagggtgaaccgcaagccctggcgaagcgcggtatcactgaggaagcatgccgtaagtacggctactggatcggcaaggacaagcacggcaagaccgtgcagatcgccaactacaagcgcgatggcggcatcgtcgcgcagaagctccgctaccccgacaagaagttctcattcatcggcgactcgaaggcgtgcgggctgttcggccagcacctctacgaaccggggcgacgcctcgtcatcaccgaaggcgagatcgacgcgctctccgtggcgcaggcactcggcctccgctggccggtggtgtccgttccgaacggagcgcaaggcgcggccaagtccatcaagcgcgagctggagtgggtcaacggcttcgacgaggttgtgctcatgttcgacatggacgaaccgggccaagccgccgcgcaggaagtggcgctgctgctgactcccggcaaggccaagatcgcacagctcccggcgaaagacccgaacgagctgctccagcgtggcgatgccgaggcgatcacccgcgccatctacgaagcgcagaccaagcgccccgatggagtggtgacgttcggctccctcaaggagaaggcactcaagccggtctcgatgggcatgccttggcacgacccgcgcctcaccgcgctgacctacggcaagcggtacggcgaggtctacaccttcggcgcgggcaccggcatcggcaagaccgactggctgatggaggaagcagccttcatcgcgcaggaaaccggcgaccgcgttggcctgttcttcctggagcagcagccggtcgagacggcgaagcgcatggcaggcaaggttgctggccgccgcttccacgtccccgatgggagctggacgcaggaggagctggaagccgcgttcgagattctcgacaagggccaggtgttcatctacgaccacttcggctcgtccgagtgggacgtgatcgaagccaagatggcccacatggtcgtcgccgagggcgtcaagcacatcgtcctcgacaacctcacgtcgtttgcggccggtgccgaggacgagcggaagatgctggaggacacgatggcgaagatcgcgcagttcgcgcagcgccacctcatctgcatctacctggtctcgcacctcgccacgccggaaggcaagccacacgaggaaggcgggcgcgtgatgctccgccacttcaagggcagccgcgcgattggcttctggacgcacttcgcgttcggcctggagcgcaacacgcaggccgagaacgaggccgagcgcaactgcacgaccttccgcgtcctaaaggatcgcttcaccggccagtcgaacggccaggttctctactacagctacgaccacgcatccggccgcctgctcaatgcagatgctccgggcgaatacggcgacttcgccgacgagtcatccgatgtatccacctccgactactga

SEQ ID NO: 497443 - DNA, 180 bp, Stenotrophomonas maltophilia
atgaccaacaccgctaccaccgtcattccgtccgcgatgcgcctggctttcgagcgcgcatgggcgcgcgccgacaagccgttccgcggcctgggccgcaccgtcaagggtgcgctgaatcgtcgcctcggcatttcctaccgcaagcgcatgtggtccgtggagcgtgcaaagcgctga

SEQ ID NO: 497444 - DNA, 387 bp, Stenotrophomonas maltophilia
gtgaaaccgctgcccccgcaaacccaggtcgtcctggatcacctgcgtcgccactcgcacctgacctcgtggcaggccgaaggcgtctaccgcatccgccgcctcgcctcgcgcgtcgatgagctgcgcgctgctggcttcgagatcgaaacgcagacctgcgaggacgcctcggggcagcggtacacgcgctatcgcctgtcgcgccgtcagcgccgcagcaaggctccgctcctggaagcgcgccgcgctccgaagcagtaccgcgtcgatgcgctgctccagctgtatcgcaactactgcaccgacgagctgggcctcgacgccaacgatgcgaccgaagaagtcgccgcattcaccaagttcctgctggagaagaacgcatga

SEQ ID NO: 497445 - DNA, 363 bp, Stenotrophomonas maltophilia
gtgcgcctcaaacctctggaatcggtagaggcgctgttcgtcctcgccagcatgacccgccccgagcaggtcacgaccggcgaagaactcgcacgcctgcaccgctcgcagggctactcgaagatcgccgtccacttcgtcatcgaacgtgacggctcgatctacgacggtcgcccgctgaatcagcccggcgctctcgccggtaagcacaaccaatccgcataccaagtctgcctcctgggcggcgtcaacgacgccatgcagcccgaggacaacttcaccgaagcccaacacgccgcgctgcgacgcctgctcgccgcctacggcaagcccgtcgtgtgggcacctgacttccctcgatag

SEQ ID NO: 497446 - DNA, 438 bp, Stenotrophomonas maltophilia
atgacggcgactactgatccgctgtcggtcatcgtgaacaccgcgaggggggccaagcatttggcctccctcacgttcccgtttgacccggtgcccgcctcgcgcccgaaggtttcgcgctggggcgtctactacggcaagacctacaagacctggaaggaagccgcagagaagcatctgccagccggtgatctggacctgtcgccgaccgatccggttttagtggtcatcatcgcggtatgcaaacgcgccaagacctcgaaggccgcgtttcccaagggcgacgtggacaacctcgccaaggggccgatggacgttgtgaccaaagccaccggctattgggccgacgacaagcaagtcatgtggctgctctccggtaagcgctgggcgcagccggacgaagaaccacgcaccgaagtccacctctacaaactctaa

SEQ ID NO: 497447 - DNA, 666 bp, Stenotrophomonas maltophilia
atggcaaccaagaagcgcgaacgattcgtctcccccaagggcaccgccgtgtggccgcgcctgaacgaaccggacaccaagttcaagccggaaggcgaatacaccgtgagcctggcgttcgacccgaacgacaaggacttcaaggcgctggcgaagaagctggaaacccggcgcgacgagctgttccaggagttcctgagcgagaacccgaagaagaagaagggtgccgaagtggccccggtgttcaccgaagaaaccgacgagaacggcgatgacaccggccgcgtgctggtgaagttcaagatgaaggccagcggcgtcagcaagcgcaccggcaagaagttcaccatgcgcccggacatcttcgacgcccgcggcaagaagatcgacaacccgccgcagatcggcggcggcagcgaactcaaggtctcctacgagatcggcggctcgttcgtcgaatcggccaagaagttctacctgacctgctacatggtcgccgtccaggtgatcgagctggtcgagttcggccagcgcaacgccaaggactacggcttcggcgaggaggacggctacgaggccgccgacagcgcgccgttcagcgacagcgatgacgactcggacgacgacagcgactccgacgacgagggcgatgacggcgactactga

SEQ ID NO: 497448 - DNA, 159 bp, Stenotrophomonas maltophilia
atgcgtgacccgatcaccgacgccttcatcgacgaggcgctcatcggcttcgacatcgacgaagccttcggcatttccgccgacaccccgttgaccgccgccgctgacctgtggcgcgcgggcatctatctcccgaccaactacgagaccgacaactga

SEQ ID NO: 497449 - DNA, 285 bp, Stenotrophomonas maltophilia
gtgcgtgatcgcgtcatcgacggactgcactcacgttctgccgagagcgccgcacgcggcgctttcgtagtgatcgacagcgtgcagtccctcggccacccggccgatcaggtgatcggcttggcgtgcgccttcaagaacttctgcgaagtgctcggcctcgatccgatggaagtgctgcgggtcgtctcgcgcatggagcaggactgccgctaccggcaggtcaacaccctcaacgccgtgcgccgctacgcggagcgcgagctgaaaccgcactacccgtga

SEQ ID NO: 497450 - DNA, 144 bp, Stenotrophomonas maltophilia
atgagcatcaactaccagcacgcactgaacacctacgttgcccaggaccacttcggtgtggtcctcggcatctacaacccggccgaacacggcacggtcgaggagttcaagcaccgcatgacggagctgcacgcaggtgcgtga

SEQ ID NO: 497451 - DNA, 2436 bp, Stenotrophomonas maltophilia
atgacgacttggcaagagaacgacctgcacgccgcccagctcgaactggagaaggaaagcaccagcctgggcattgcccgctacgagaagatcagggagcagcgccaggaggccgagaccggccccggccgcaagctggtcatggagagcatcgacgccaccgccgccgcgatcatggcgttcgtggccgaagccgacaccggcaagccgggcaagcgccacgccgccctcaaattcatccgccacctgaacccccacgccctcgcctatctgaccagcttcacctgcgtcaacgcgctggtcgccgatcaccgcaaggcggtgtccgtggcgatcaccctgggccacgaggtcgccaacgagatcaacttctccctgctccgcgagaagcaccccggcctgtaccgggtcgtccaggagcagctcaagaagtccacctcggcccggcactccaccgccgtcatgcggcacgtcatcgccgacgccgagttcgcccccgaggacgacaagcgcctctacctgtccgacaaggacgcgctgctggtgggcatgaagctcatcgagctgttcgtcgaggcgaccgggctggtcgagctggtcaccgtcgccgagcgcggcaagcgccacctgctcatcgccgggaatcagaaggtgctcgactggctgaccaaggcccacgacagcgccgccctgtaccagccggtgctgatgccgatggtcgtcccgccccgtccgtggaccacgccccgcgacggcggctacctgaccgacatcggcggccgggctgacctcgtgcgtacccgcaaccgcgcctacaagcgcgagctggcgctggtcgatatgcccaacgtctaccaggccctcaacgccatccaggcaaccgcctggaaggtgaacgtgcccgtcctagaggtcatgcgcgagctgtggaacgcaggcggcggtgtcgccgggctgccggagcgtgaactgatggacctgccgagccgccctgccctgctggagaccgacccggactacttcaaggagcaccacgccgacgagttcaaggaatggaagcgcgaccgcgccaaggtctacgaggccaacgcgcgcagcgtgtccacccgcctcgccgccgcgcagaagatcgccttggcggagaagttcgccgagtaccccgcgatctacttccctcacaacctcgacttccgcggccggtgctaccccctgcccccgacgctgaccccgcagggtgatgatgcggccaagggcctgctgacgttcgcccaaggcgtgccgctcggcgaggacggtgcctactggctcgccatccacgtcgccaactgcttcggcgtggacaaggtgtcgttcgaggagcgcgtggcctgggtgcgcgagcacgaggagcagattctcgacagcgccctcgatccgctggacggccaacgcttctggatggacgccgacagcccgttctgcgcgctggcagcgtgcttcgagtggctcggctacagcctcaacggccgcgatcacgtctcccacctgcccatcgcgctcgacggctcctgtaacggcctccagaacttctcggccatgctccgcgactccgtgggcggtgcagccaccaacctgatcccgcagccgaagcccgccgacatctattcgcgcgtgaaagacgtggcccaggagaagctgcgcgcccgtgccgagagcggcgacccgctggcgatcaagctggacggccagctcacccgcgacatcgtgaagcagccggtgatgacgctgccctacggcgtcacgaagtcgggcatgcgcgcccaggtgctctccaagttcaagaagctgggcatggaggacgattgggagaccgccgagtacctggcgaccctgctgtgggagtgcatcggcgaggtcgtgatcgcagcccgcgcggcgatggactggctgcgtgacgcctccaaggtcgcctcgtcggccgacctgccggtgagctggacgacccccgctggcttcccggtcctccaggagtaccgcgaggaggaaggcgtccgcatccggccgcacgtcggaggccgcgaggtgaatttagtggtcaacatcggcggtactaagctcgaccgtcgcaggcagaccctcgggatcagtccgaacttcgtccactcctgcgacgccagccacatgatgctgaccacctgcctcgcggcagagaacggcatcgagtcgttcgccatgatccacgactcctacggtacgcacgcgggccaggcagcaatcctcgccgccgcactccggcaggcgttcgtcgatcaatacagcggcgacgtactggccgacttccgacagcaactcgtcgagcagctcccgccagaagcggcagagaaactcccacccctcccgccgcatggcgacctggacctcagcctggtgctggagtcgcgctatttctttgcctag

SEQ ID NO: 497452 - DNA, 3012 bp, Stenotrophomonas maltophilia
atgcatcgatatcccgccctccccacccgtcgcgccaccgtcctcggcagtgcccttgttgcacttctcggcatcgctgccgcgccgcaggcccatgccagtgccttccatgtgaatggagacacgctctactacaccggcaacgtgctggcgaccgatccgcagacgctggaggcctacatcctggccgcgcaggcccgtggtacgccgctgcgccaggtggtgttccgcaactcgccgggcggggccgcctccggtggcgtgggcatgggcgccatcatccgccagcatgggctggataccgtgctggacggcggctgctactcggcctgcgccgacgccttcgttgccggcgtgaagcgcaaggtcacgcagttcggcctgctgccagcgcacggcaactacacggagacggtgctgggcatccatggcgaatccggcccgaacggccctaccccgtacccggggcaggacaagtacatcaagtactaccgggacatgttcggcccgaccgacttcgcggtcatcgaagcgcgcatcgtccaggcgcactatgaactgacccagcagtcgggcttcctgcgctacttcgacccgaacgtggcggccgtggccacgcgcttctgcccgacccgcgaccagagcgcggcaggcaactgcaccgcgtatcccggtgtcaccttctacagtgatcgcgtcgttaccgaagccggttacgtccagcctggcgacgtgctttccatcgacaaggacgtgagcggagacctcaatccgaacctggccgtgcgcgggcgctacaccaatgcgctggccaacctgcgctacttccagcaatcgaccccggacatccggctggacgacgccttcggtgtgatccgcatcggcaagggcggtgtctggtcactggataccgcctccgccgcccagtatgtggtggccgatggcggcaccctgcgcctgcagcagaatggctggatccaccacgccgaagccatcggcgcccgcaatggcgggcgcatcgagctgcagcagggcgcactgcgcagcctgaccgtggtcgaacgcggcggcgtgctgaccggacacggttcattgaatgccacgatcgacatcaacgagggcggaacgctcgcgccctccggcatcgtcatgcgcccctactcgctggaagcactcgcgccgggtggcgacgacgtgttcaccagcgaacgcttccggatcggcaaggggcgctacatcaacctcaacgatggcgcgaacctggccttccaggtcgacagccagcgcaccgcaccggcactgacgctggaagaagcccgctacttcctggtcgaagaggaccggcggtccggtgactacaacctgtacggcaacatcaaccgcgccgtgctgagcattgcccccagcgccaggctgacgctggacatcaagcaggcgttcttcccggcaggccagcagaaccatctggtcggaacccaggtggatgccagcgccctgcagctgcccgtcgccccctgcggcccgtcgaacggtgagtacgccggcttgtggtgccgcaccgctacgcccgataccctgacccgcgcagcaccggtgtcggacttcatcgaagggcgcttccagtacgtcgagcgcagtggcgaggccggcagcgcggtggacctcaccgctcccggcgccgtattccgccctcgccacaattcactgctcagcttcaccgtcaaccagaccggcagtggcctgtggctgaccgccaatccctccttcgacgacacacgcttgttcggcaatgccccgtccggcgacggcctgggcatcgcactgcaacaggcggctgcacagcgcacttcctcgatgagcggactgctgggtgccctgcagttcgctgaccgcgatgacatcgcgcgccaggcgggagcattgcgcggcgacgcgcatgccagcctgcgcctggccgataccgcactggtcggcagcatcggcaacgtcgtgcagcagcaccaggcagcatcgcgcagcggtggcgatgcggacggcctggcagcacaggccgcgcagaccgcctcggcgcaatcggcaacgaccggcagtcgcctgttcaaccagctggcgatgcacctggtcgcaccggcagatgcaggcagtgatgcgggcgacgccggacacaaccgcagcttctgggcgcgcgggttcggcagccatggccgtatcgagggtggtgcgggcgtcgccggcctgaaccacaccatcggcggcatcgcgcttggtgccgatacccgtctggcagacgaccgcgtgacactgggcgtgagccttgccgcggccgacatgtcgacccggtccagcgaaggtgcaggattcagcggcgatgtccgcgcgctggatatcggcggctacgtggacgcgctctattcgcgtggctacctgtccgccgccgtccgctacaccgatcttcgccacgacacccgtcgcagcatcgaggggatcgagggcctgcaggcaccgctgcgcgcgaagtacagcaacgacgcgatttccgcgcgcgtggagcatgcgttctcgttcaccaccggcaacggcgtggtgatacagccgctgctgccggtgttcgactacatgcgcacctcggccacgcacttcaacgaaggccaggacgcagccgcactcatcggccgcagtggcagcctggaaagcatccgcgtaggcgccggcctgcagttgttcaagaccttcgacggcaacaacggcgagcgcatcaccccgcgggcccgcgtggtctggcagaaggagctgggcgatacccaggcccgctacagcaacggcttcgccgccgccccggacctgctgttcagtgccagcagccagcccgtcggtgagcaggtcctgacctggaacctgggcgtgaccagccgtgccagcaagcgcctgtcggtgatggttgattacgtgggcgagcggcgcgacggccagacccagaacggcatacagctggggctgggctacacgttctga

SEQ ID NO: 497453 - DNA, 390 bp, Stenotrophomonas maltophilia
gtgagcggtgccggcctgcccgccgacgcggcgctggccgccggactggaggtgctggagcgcgcgctgcatgcgcctgcggtgcgggccgatcctgagcgccttgacgcattgctggacgaggatttcagcgagatcggcagttccgggcaatgctacggccgtgatgcagccttgcaggagatcccgttggagcgcgcgcaggtgctgatcgaatcggaacagtacgcggtgtggttgttggccgacggtctggcccaggtgcgttatcgcagccgccattacctcgacggccagccgcaaggctgggtgctgcgcagctcgctgtggcgccggcacggggatggatggcgcatgctgttccaccagggcacgcccgaggcacggtag

SEQ ID NO: 497454 - DNA, 10905 bp, Stenotrophomonas maltophilia
atgaaccgcatttaccgtctggttttcaatcgtgcccttggggtaatgcaggttgcttcggaggtcgcccggaatcccggcggaagcgcggtcagcgcagggcgggtgccgcgattgcgggcgcaccagctggcggtggctttggccgccacactggccagcggatcggcgtttgcggcctgcactaccgcaggtacgacggtgacctgcgccaccggctccaataccaattcgctgaccaacagcatcaacggcgtgacgctgaatatccagaccggcgccgagctcagcgtgccgccgatcgttggcggaagtgcagtgaatttgagtggtaacggcatcaccgtgaacaaccagggcacggtcgatcccaccatcaacggtggcctgagcctggcagcgtcgggcatggtgctgggcaacaataccgtcggtggaaacaccatcagcgtcaacaatcaggcaggcggggcgatcaaaggcctggtcaacatcggctccatcctcggtttcggcggacaggcgctggtggtgcagaacgcttccggcggtgtcagcaacatcgtcaatgccggtaatgtggacatgtcgatctttggtgcaggcctgttgaccacggccgatgcggcatcgatcgtaagctacggtggtgcgcagaccactctcaacaacaccggcaccattaccggccgcatagggttccagggttcggccacggcgggggccggcaataccttcctcaacgcgggaaccatcaacggcagtgtgaacctgggcagttcggtcgccggcaacaccttcaccgccgtgtctggttccagcgtcaataccgccggtatcggcgtggccgggcaggtcggcgcgcttgcggtgaatctggccgcggccggcatcgtcgacggtggctcggcgtccaacaacagcctggtgctgcagaacagcgccaccggcccgggcagcggtaccggcggagcggtaaccacgctgggctggaaccagtacatcaacttccagaggctcaccgtcaacagcggtacctggaacctgcagggtgcgtgggcgggtgcgggcacgaccacgctcaacgatggcctggtcaatttcaataatgccggttccttcggcacagggctgttcaccgccaacggcggtgccattgccgcctccacggccggtctgaacctgaccaacgccttcaaccttggcggcaacctttccctcggcgggaccaatgcgttcagcctgggtggcgtgctgtccggtactggcgggctgacggtcaacaacaccggcatcgtcacgctcggcggcgcaaacctgttctccggcggcgtcaacctcaatgccggcggcctgctgctgggcaatgcgggcgcgctgggcagcggcaacctgaccgtgggtggcagcgcttcactggatacgacgtcgggcttcaccctgggcaacaatctggtgatcaatggcgggggctcgctgaacctgctgggcagcaatgcgttgtcattgagtggctcgatttccggtgccggcaacgtgaccaagaacggcgcgggcacgctgaccttgaatggcgccaattcgctgaccggcgccttcaatctggccggcggcgcattggcgctgggcgcgggtggcagcctgtcgcccaccggtgcgatcacgctgggcgttggtaccagcctcgatctttcagcggcgaccaaccagaccatcggctcgctggccggtctcggcggttcggtcaatctcggcagccacacgctgaccctgggtgggctgggcaataccagctacagcggcacgttcgccgcaggcaccggtggcctgatcaagctcggtaccggcgtgcagaccctgtccggcgtcaacaacctcagcggcggtgttgcgctcaacgccggcggcttgttgctgggcaatgcggccgcgttgggcagcggcacgctgtccgtcggcggcaatgccacgctggatggcacgaccgggttggcgttgaccaatgccgtcaacctcggtgccggggccagcctgaatctgctgggcaaccaggcgctcacattcaacggcgtgatcggtggcgctggtggcctgatcaagaatggcgcggcaaccctgacgctcaacggcgccaatacgttcggcggcggtctggcgctcaatgccggcagcctggtgctgggcaacggcggtgcactgggaaccggggcgctgaacgtcggcggtgcggtatcgctcgacgccagcgccggcctcaccgtgggcaatggcatcacgcttggcgccggtggttcgctcgatgtgctgggctcgaatgcgctgacgctgggcggtgtcatcggcgggagcggcagcctggtcaagaacggcgcctccacgctgacgctgggcggcgcgaacacgttcaccggtgggctggcggtgaatgccggaacggtgtcattggccagtggtggcagcctggcggcgaccggcgcggtcagcctggccggcgctggcagcgcactggatatctcgctgggtggcaaccagaccatcggtgcgttgtccggcgtggctggcagcaccctgtcgctgggcagcagcacgctgaccttcggtgatgccaccaaccagaccttcgccggcgtgatcggcggcaccggtggcctgatcaagcagggcaccggcgtgcagacgctgaccagcgccagcaccttcagcggtggggtgaatcttgccgccggtggcctggtgctgggcaacgccggtgcgctgggaagcggtgcgctgaccgtcagtggcaacggttcgctggacgccactgctgcactgaacctgggcaatgcgatcaacctcggcgcggcgttgaccctgccgggcagccagaacctggccctggccggcaacgtcaccggcaccggcagcctggtcaagaatggcgcgtcgacactgaccttgaacggtaccaacaccttcagcggtggactgagcgcaaacgccggcagtctgctgctgggcaacagtggcgcactcggtacgggagtattgggcattggcggcagcgtctcgctcgatggcggcgccccgctgaacctggccaacaatgtgtccctgggcgcgggtgccgcgctgtcgctgccgggctcgcaggcgatcacgctgggtggcgtggtgtccggtgccggcaggctggtcaagaatggtgccaccaccttgaccctcaacggcgccaacagcttcggtggtgggctgaccgtcaacggcggcggcgtgttcctggggaacgccggcgcactgggcaccggtgcactgtcggtgggcgccaatgccacgctggacagttcagtagcgctgaacctcgccaacgacctcaaccttggggcaggcgcggcgctggatctgctgggcagccagaacgtgtcgctgggcggtctcatcagtggtactggcagcctggtcaaaaacggtacggcgacgctggcgttgaacggcgccaatacgttcagcgggggcgtcggcctcaacgcgggcctgctgcagctgggcaatgcgcaggcgctgggtaccggccagctggaggtgggcggcaacgcttcgctggaggccacaacggcgctggcgctgggcaacaacatcggtctcgctgccggtgccaacctttccgtgctgggcagcaatgacctgacgctggccggtccggtattcggtgccggtgggctgatcaaggacggcacggcgcggttgacgttgtcgggcgccaatacctacaacggaggcaccaccatcaacgccggcacgctggcgctgggcgcaggcggcagtctcgccgcagccggtgcggtgaatcttgccggtgcgggcgcgacactggacatctccgcagccggtgcggcacagaccatcggcgcgttgaatggcgtggcgggcagccagctggcgctgggcgcgcagtcgctgacctttggcggtgccagcaatggcagctttgccggtgtgatcggtggtaccggcggcctggtcaagaccggcacgggcgtgcagacgctgtccggtgcaaacacgttcagtggtggccttgcgctcaacgcgggtgggttggtactgggcgatgcaggtgcgcttggtaccggtgcgctgggtattggcggcaccaccacgctggacagcacggtggcattgaatctggccaacgcggtgaacttcggtgccggcacccagctcaccctgggcggaaccagtgacgttgcattcggaggcgtgctgagcggcaacggcagcctggtcaagaatggtgcgggcctgctgaccctcaacaacaccaacaccttcggtggcggcctgaccttgaacggtggtggcctggtggtcggcgcgaatggtgcgctcggtaccggtgcgctggcggtcaatgccagcaccacgctggatgcaggcactgcagtgacgctcggcaatgcggtcacgctgggctcgggcgtcgcactcacgctgcccggcagcaatgcgctgacgctgtcgggcgtggtaggcggcaatggcagcctgatcaagaatggcggcaccacgttgacgctgtccggtgccaacacctacaccggcggtaccaccatcaacgccggcacgctggcgttgggcacgggtggcagtctcgccgcagtcggtgatgtcacgttgggcgcaggcgcaggcttcgatatctccggtgccggcggcaaccagaccatcggcgcgctcaacggcgcgggcggcagcacgctgacgctgggcggcaattcgttgaccttcggtaccgccggcaacgccgcgttcgatggcgtgatcagcggcggtggtggcctggtcaaggtgggcgcgggcgtacagaccttgtccggcgccaataccttcggtggcggcgtgacgctcaatgcaggcggactggtgctcggcaatgatgcggcgctgggcacgggcgcattgatcgtcggtggtgctgccacgctggataccaccggcctggcaacgctggccaacaacattgcgctcaatgccgggctgaccgtaatcgggaccaatgcactgacgctcaacggcgtcctttccggggccggtagcctgaccaagaatggcagcgcgacgctgacgttgaatggcgccaacaactacaccggtggcaccaacatcaacgccggcacgctggcgctgggggccggtgccagcctggccgcgagcggtaccgtcaatcttgccaccggcgccacgctggacctgtcggccggcagtggcacgcagcagttcggcacgctggtcggcaacggtacggtgaacctcggtgccaactcgatcgaagtgggcggcgccaccgatggcaccttcagtggctcgatcgcaggcaccggtggcctgaccaaggtcggtgccggcatcgagacgctgaccggtgccaacacctacaccggcggcactttcatcaacgccggtaccctggcgatcggccccggcggcagtctggccgcgaccggtgcggtgacgctcactgcggcaggcacaggcttcgatatctccactgccggcgccaaccagaccatcggggcgttgaacggcgtggcgggttcgacggtgagcctgggggcacagacactgaccctgggcggcgttggcaacagcatcttcgatggcgcgatctccggcaccggcggcctggtcaagaacggcgccggcagcctcacgctgggcggtgccaacctgttcagcggtggcgtcgcgctcaatggcggcgcattggtggtcggcaacaacgctgcgctcggcagcggtgcgctgacggtgggaagcaacgcgacgctggatgcatccaccggcgtcagcctggccaacaacatcaacctcgcatcgggtgccaacctcgatctgctcggcagccaggcgctgaccctgggcggcgtgatctccggcacgggcgggctgatcaaggacggtgcggccacggtgaccctgagcggcgccaacacctacaccggtggcaccaccatcaacagcggcacgctggcgatcggcgctggtggcagcctcgccgcggccggcgcagtgaacctggccggtgctggcacgttcgacatttcggcgggcaaccaggccatcggttcgctggccggcgtcgccggcagtacggtggcgctgggcggcagcacgctgaccctgggcggcaccgtggacagcaccttcagcggtgcgatcagtggcaacggcggcctggtcaagaacggcgcaggcgtgcagacgctcaacggcgccagcaccttcagcggcggcgtagcgctcaacgccggtggcctggtggtcggcaacaatgctgcgttgggcaccggtgcggtgacggtcggaggcgctgcgacgctcgattcgaacacggcggtcaccctcgccaacaacttcaccctcaacaacgcgttgaccgtcctcggcagcaacaacctcaccctcaacggcatcctcagtggtaccggctcactgaccaaggagggtgccgcgacgctgaccttgaatggtgccaacacctataccggcggtactttcatcaacgccggcactctggcactgggtgctggcgccagcctggcctcctcaggcaccgtcaacctggccacgggggcgaccttcgatctgtcagcaggcagcggcacgcagcagttcggtaccctgatcggcagcggtacagtgaatctgggcgccaacacgctgacgatcggaggccctgccaatggcaccttcagtggttcggtggccggctccggtggcctgatcaaggaaggttcgggcacccagacgttgaccggcaccaacaccttcaccggtggcaccaccatcaacgccggcacgctggcgatcggtgccggcggcagccttgcagcgaccggtgcggtcaccctggccaacgccggtaccaccttcgacatcagcgcgggtggtgcgcaggcgatcggttcgctggcaggcgtggcaggttcgaccgtggcgctgggcggcagcacgctgaccctcaatggcgtgggcaataccacgttcgccggcaccatcggaggggccggtggcctggtaaagaacggcgcaggcatccagggcttgacgggcgtcaacgtcttcacgggcggcgtgaccctcaatgccggtggcctgctgctgggcaacggcggttcgctgggcatcggcgcgctgaccgtaggcggcaacgccagcctggatggcaccagtgcgctgactctggccaacaccgtgcagctggccagcggcacgctgactctggccggcagcaacgcgctgaccttgaacggaccgatcagcggtgccggtggcctgctgaaggatggcgcggcgacggtcaccctgggcggtgccagcagctataccggcaccaccaccatcaacagcggcacgctggcggtagcagccggcggcagcctgtccggtgccagcacggtcaacctggccggtgctggcacactggatatcagcgccggtggcaatcagagcatcggcggcctggccggtgtggccggcagcacggtggcgctgggaggcgcaacgctgactaccggcggcaacaacgccagcaccgtgttcgctggcgtcctcagtggcaccggcggcctggtgcagggaggtaccggtacgctgaccctgagcggcgacaacacctataccggcggtaccaccatcaacggtggcagcaccctgcagatcggcaacggtggcagcaccggttcggtgctgggcgacatcaccaacaatggcagcctggtctacaacctcggcaccacggcaaccgtgggtgcggtggtcagtggcaatggcggtctgacccaggccggcagcggcacgctggtgctgaccggcaacaacacctacaccggagggaccaccatcaatgccggcggcacgctgcagatcggcaacggtggtgcgaccggtgcgatcgtcggcgacatcaccaacaacggcgcgctggtgtccaacgtggccggcaacaccacgctcggtggcaccatcagcggcagtggcggcctgacccagtccggcagcggcacgctggtgctgaccggcaacaacacctataccggcggcaccaccgtcaatgccggtggcaccctgcaggtgggcaatggcggtgcgaccggtgcgatcaccggcaacgttgccaacaacggcagcctggtattcaacgtgggcggcaacaccacggtcggtggcgcgatcagcggcagcggtggcctgacccaggccggcagcggcgtgctgaccctggtcggcaacaacacctataccggtggcaccacgatcaataccggcggtacgctgcaggtcggcaacggcggggcaaccggcgccatcgctggagacatcaccaacaatggcgcgttgatctccaacgtggccggcaacacgcagctgggcggcaccatcagcggtacgggtggcctgacccaggcgggcagtgggtcgctggtgctgaccggcaccaacacctacaccgggggtaccaccatcaacgccggcggcacgctgcagctgggcaatggcggcgcgaccggctcgatcattggcgatgtcaccaacaacggcacgctgctgtccaacgtggccggcaacaccacgctgggtggcaccatcagcggcagcggcggcctgatccaggccggcagcggcactctgaccgtgaccggcaacaacacctacaccgggccgaccacgatcaatgcaggcggcacgctgcaggtcggcaacggcggtgcgaccggcgcgatcggtggcaacgtcaccaacaacggcaacctggtgttcaacgtggccggcaataccacggtcggtggcgccatcagcggcagcggtggcctgacccaggccggcagcggcacgttgatcctgggcggcaacaacacctataccggtggcaccaccatcaataccggcggcacgttgcaggttggcaatggcggcgccagcggtgcgatcgccggcaacgtcagcaacaacggcagcctggtgttcaacgtgggcggcaacaccaccgtcggaggcaccatcagcggcagtggtggcctgacccaggccggcaccggaacggtcaccctgaccggcaacaacacctacaccggcggcaccaccatcaatgccggcggcaccgtgcaggtcggcaatggcggcgccagcggctcgatcaccggcaatatcaccaacaacggtggcctggtcatcaacaccggcggcaccaccacgctgggcggcaccatcagcggtggtggcagcatcgtgcaggcaggcccgggcggcctgaacctgggcggcaacagcggcggcttcagcggcaccggccaggtcaccggtggtggcctgaatgtcaccggcaacatcggtggccagtggaccatcggcagcggtaccacgctgtccggtaccgggaccatcggtggcacgggtggcggcgtgacggtgtccagcggcggcgtgctgtcgccgggcaatggcccgggcaacggcagtggtgcaggcaatggcaccggcacgatcacggtgggcggcaacctgacgttgtcgccgggcagcacgctgggcgtcgatctgggtgccagcggcagcgacacggtgcaggtgggcggcagcgccaacgtgggtggcagtaccgtgcaggtgaacacgatttcgccgagtaccagctaccagcagggccagcagtacacggtggtcaatgcgggcggtggcgtgagtgggcagttcgcttcggcgacctcgccgtcggccttcctgaccatcaccccggtctataccgccaacacggccaacctgcagatcgacgtggcgcagaccgcggcattcaccacggcggcgaagacgcgcaaccagtacaacaccgctgcagcgctggacagcctgccgcagagtggtccggcactgggcctgtacaacacgctgctgatgtatgacgcgggtaccgcgcgtgcggcgttcgaccagttgtccggcgaggtgcatgcggccagccgtgcggtgctgctgtacgacaactacctggaagagggcatccgccagcgtctcggcagcgaactgccgaccgtgcgtggcgagcgtgcctcggcctggctggccggcagcggcaaggtgttccgccaggacggtgacggcaacggcgatgacatccgctccaaccgcaatgcactgatggcgggtgtggactggcagctgggcgaacacgtggtgctgggtgcggccgcaggcaacgagcggctggatacgcgcctgtacgatcgcagctcgcgggcccgcctgcgcggcaacacgttcggcctgtatgcgcagggccagtggaacaacggctttgcggtcggtggcagcgtatcgcgcggtgactaccgcacgcgtaccacgcgtgaggtgccgctgctgggccagaccctgtacagccgccaggactcggatgtgaccatcgcgcaggtggagggcagctggacctggacccatggcaggacccaactgcagccgtatgtgcagttcaccaggcactgggtcgacagtgatcgtgcggtggagcagggcggcacggctgcgctggtgctggaaggcggcaaggacacgctcaatgtcagcaccgtgggcgtgcgcggccgttgggatgtgggcagcggcgagcgcttcccggcgcagctgacggttggcctgggctggcagcatgcatcgggtgataccgatgtggccagccgcaaccgcttcgcggtgggcggcaatgccttcgacgtctacagcgcggtgatggcacgcaatgcgctggtcagtcaggtgggcgtggcggtgggcctcggccgcaacagccagctgtcgatgttcgtgcagggccagcacggcgatggccgccgcgacgtgggcgggcagatcaacctgcgtgtgggcttctga

SEQ ID NO: 497455 - DNA, 657 bp, Stenotrophomonas maltophilia
atgcgcctcgccactgacgcacccgcctggtgcaggcgcctgtgttccgcacagtcattcgaggtgggcgaaatcatccgtgagaagatcgactccgctccatgtaccttggagcacttcggcggctcctgcggcctcgtcgcgcgatacccccttgagaaggacaacgtctggacggttgaaatgcgcccgggcaacgccaaggcattttccatgaacctccgcctctaccgccccgccgatgccagcgcctgcctgtcgattttcgacagcaacgtgcccacctacttcgcgcccgaagagcgcagcgactttgggcgcttcctgcaagaacaggccatggactgtgcattccaggtcatcgagcgggatggcagcatcgtggcgtgcggcggcctgtcgcgacgcggcgacggcagtgccggtttctgctggggcatggtacagcgcgcgctgcaccggcatggactgggccgggaactggcgctggcacgcctgcgccaggccgaagcggatccctcgatcaagcgcatcacgctcagtaccagccagcacacccagggcttctatgctggcctgggcttccaggtgacgcggatcgtttccaatggccacggcgccgggatcgatgccgtggagatggagcggagggtctag

SEQ ID NO: 497456 - DNA, 411 bp, Stenotrophomonas maltophilia
atgcccgacccttctctttcccggactgcccaggtcatgcgcggtctgctgtttggcgcggtggggctgttgatccttgccgtggccgccttcgaagtgacgcatcgccttgagttcctgcagatcgcgcaggccgtcgatggccaggtcgagcgcctgaacgcgggcggatcgcatccgcagattgcgttcaccaccgcgaccggccaacgcgtctcttacccgcagggcggcatgatcttcggctatgagcctggacagccggtacgcgtgctgtacgatccggcgcaaccgcgcctggagccggtcctggatacgttcggtgcgctgtggggaatgacggtcgtgtggatgctgctggggctggcgttcgtcggcgtctgcgtgcggggactgctccggcgcaggtga

SEQ ID NO: 497457 - DNA, 372 bp, Stenotrophomonas maltophilia
atgtattccatgaaggctgtccgactgaagagcgaagctgaggttctgtccgcgaagcccgttccgaatgacctgattaattatgttttcccctacgttgtatcattcatggggttgagttacggagatccacagaagttggcgggattcttcgtttttcttgtgctcttgtttttgattacgtataggtcggggcagattctgatgaaccccgtattgattgctttcggctggcgactgtatgaggttgatattgctgtcggtgggaaacaggtccgtaagaccgtgcgcgcgctgaagcaaggaaagctgttgcctggcaagcagcttattgaggatgttcaggaagtatatttgatgggggacccatga

SEQ ID NO: 497458 - DNA, 921 bp, Stenotrophomonas maltophilia
atgagcgatttggcattgaaaagcctcaaggcatttgacctcgccgggtcaaacgtgttcctttgggtgtttaagaggagcgctggcaccaagaaattcaaggcgttctacatcaagacggatccagtcctagaggatgccctcaagggttttgcggaaaatgagagggcccgaattaacgagtggattccatatgggcatctctctcagcccaccgatgatgggtgccttactattgctgtgggtgataccgactttcaggttctaaaggatctcgttgacgagccggagtctgaccatgcgactaatgatcttaagaagctcaaaggcgctgtcggctacctggtgaagtttgtaaaggacgggaagaccctctacgccacgcggcgcactccgatgacgtggaagcctgtctacaaaaagaaaaacgtgattaatgccatttttgagaatggacagttgtccgctgtagcaggtgatgagttcacccttgagccgcgatttgacatcttcgccttggacgatgttcttctggtgtcgaacaaaaggggctttgagtcaatgatgcagtatcgcgctggttacgttcaggcgtttggcgagctcaaggcggagccgtctttctccgctctatttactgatatggcgccgttgttggaatatgtaggtgagaacggtacgcacctgaagaggatggcggtcattcaggaaaaatccctttactctgaccccaagtatctcaaggcgctcaaggccgttgcgacgaaacggaagtggggcgtaaccttcgataaggctgggagaataattccaactgcagcgactgcgaaggtcatcattactctcttgcttgatcaccgtcttgtgagtgagatcactgacatcatgtatgacgttcctgatggcacaccagtaaagtaa

SEQ ID NO: 497459 - DNA, 300 bp, Stenotrophomonas maltophilia
atgaaaaagctgttgctcacccttgccgctggtgtcgctctggcgggctcttttgctgtttctgctcagagccattcggtgaaggggcactatcgctcggacggtacctacgtccagcctcaccaccgtagcaatgcgaactccaccaagctggacaactacagcacccaaggaaattacaacccctacaacgggaagtccgggactgtagatccttacaagccaacgcagagcaatccatacggtggcccctacaaccagccgaggacgcagcagcgtcgatctggttacggctactga

SEQ ID NO: 497460 - DNA, 1086 bp, Stenotrophomonas maltophilia
atgattctgggtatcctggttctgctcgtgcttggcttcttcttcccgcctctgtggctggttctgatcggctacctcatttacatctacgcctcgcgccacacccggaaggagcgagctgtggagggccggattcgggcaatgattgctgcaaagaaggacgtggcgacgttctccgaactctactatgaggctgccaggtcatacgccatctccaaaggttgcaccgtttccgaccacgaggcggcatctgctggtgtgatgattgatgggaaggcatggaacgccgtctttctgagggagcgggatggtggcacgacgattacgcttcaagatcatgcagcagtggagaagtggattcagaacgatgtcgatagcgttattgctgcggggaagtccgtcgagcaagttcccgatatccgtttgatggacaccagcacgctcgctcggcaaagaactgacgaagccttccagatgctcttgggtagagctgaggacggggaggcagaggcgcagaacgaaattggcttctgttatgggaagggtgtctacgtcgcgaaaaattacaagctagctcaccaatggtatgggaagtccgcagagcaatcgttcgccaacgcgcagttcaacttgggcgttcttcactaccaaggactgggttgcaaacgggatattggacaggctgagaattggttcaagctggcagcggctcagggtcattcgaatgcccaacagaatttgcgacgtatcgagttggagaagcctctagtccttgaaatttacgctgtgaaccagcagcttggtaagcaaaaagctcccggcttggtcgatttcgagctcgcacatctctaccttgacgaactcaaagccctgatcgaggacgaggaggtgcgccagggcttcgttctggcggcgaccaccgggcagatttcgttggcaaaggcggcaaagattcaggacgcggtgacttgggcgtggaacctgtcgtcagccactccgctgacgtatcaccagatcatcaatgcggtctcgaatgacgattggtctgttttcaacggaatgccggaaagcggctcgggaacctga

SEQ ID NO: 497461 - DNA, 414 bp, Stenotrophomonas maltophilia
atgggattgttcagcggcatcaaagacaacttcaagaagagcgaagcagccgtttgcgtccagaatttgttggagcaacaacagagaatcggctacttcaccggaaatccggcgagctatgcgagcgctattgttcaagcggcgtgggatgagcgaccgcatgtattcaacggaaagttcggtcacagaccccacaaaatttcggtaaccgctatcgtgctgtctagggcgctctccctgagcagtgaaggagacccaaatcgatttgcgctgttggcctgccttggaaccgcgttgtcagaggctcacacgaatgcgggcttctacccctttaacaacctggacatgacgctgattgaagcggcgagcgaggtgttcatcgagaaggggaacgagatgggagtcccgatgtga

SEQ ID NO: 497462 - DNA, 615 bp, Stenotrophomonas maltophilia
atgaagaagaaggtaatggcaagcctgttcgtagcgctgatggctcctgcattcgcgcatgcgacagatttcatgggtattgagcttggcgcaaagttcgacatgcctgagtgccagttcaccggggagggctatctcgcccgctacaccttcgtcttcgatcagccggttcggccctgctggaaacgcagtatccttaaaggcaagccgggcgagacgctggacaaggacagcagcttcaaaatcgacttcgtgaccagcgatggcaagacgccgctcggtgttggcacggactccacgctaatcgttattgatggcgtagtggagggcgtgcaagccaccacaaacggatacgagcaccaggacagcattcttcgtgcgcttcaaacgaagttcggcaagcccacgtctcttaaagaagagacgatggaaaaccgcatgggtgcatcattccgatctcatgaagcggtctggaagaccccggcgcttgaagtcaagttctccggcatggtttccaggattgatttcggctacatctcggtgtttacgccgaaggccaccgcctttgtcgaagaggaatacgagcgcaagcagaaagcagcaccgtccttctga

SEQ ID NO: 497463 - DNA, 306 bp, Stenotrophomonas maltophilia
atgccgcatagcaaggtgtcgcgccgctgccgactgttgaacggactggcgcttctgttcgtcggaccgctgatctcttggttagctttcggacttctggtgcggttccaagagttaccggcatctctggaccgattgcctttcacgtgggcctactatctggggattacggcgcttcccatgctcttcggactgatactaactgcatttgttcgacctgcgtatggatggcttgtttacgcgctgggcagtgccttcatgctctacgggcaagccaagttgcttgccctgccgccagtccactga

SEQ ID NO: 497464 - DNA, 834 bp, Stenotrophomonas maltophilia
atgctgaaagattttcctcgcccgctggcgtccgtcatcggtgatgtggtgggcaaccacactcagcatcaccagacacttgaaaacatgatgtatgaggccggtgcatctggcgatccaccggaaggtagctgcgttcgaaaggtgacagagtggtttgtgagagagggaaaggatgacccttccaagtcgctcactatccttgggaaattcatcgagacacttatggacggcgaggtgtcgcgttgggaccccgaccgcgagctcacggctcgcaagcgcatcaacgaggccctcgctcgctaccaactgagctacgcgtttggcggaaggattctgggtgcgcacagcgtgaccgcgcccagccgagcgttcgccgatgcgctaaaagaattctctgtggctgaagtcgaagaagaatttgagagggcacttcgctctgtggagagcgatccagcttctgctgtgactgcggcatgtgcgattgttgaggcgctgtgcaagcactacatcgctacggagggcttggagctgccgtcaaaccagaccgtcaagccactttgggtagtggttgctaagcatctgaagctgtcgcctgagcagctggaagatgatgacctcaagcgagttctcgcggggcttagctcgatcattgatggcatcggcgccttccggactcatgcgggtagtgcccacgggcagcacaagcgcacgtataaggtcgctccacgccatgctcgactagttgtccactccgcgcactcactgtgcttgtttgttgtggagacctggaaggaacgcaagaagagcggtacaagtaggctgaaggcttag

SEQ ID NO: 497465 - DNA, 801 bp, Stenotrophomonas maltophilia
atgggggtcgttggctttctgaagtcgcttgtgggggcaaggcgtccaactggtcctcaaggtcaggttccgcaagaggctgcatacaaggcgctcgaaatcacgccaagcgatgacgtgttcgattgctacgacgccgtgttcgaccaagcgatggcgaaggtgtcgggtatccctgcggaagacgtagacgccatcaaggactacatcatggctgttgaaggaggcttcttgaatgctcacggatactacgagcacgtatgggagaactacttcgaaggtcgttcttggcgatggcttgagcatgaggaatggctatcggtcttctcggaactgggtcgcttcccgctcaactttcctcagcccgtgccgtctcagccgccatccgtttcttcattgttgcagcggatgaaggttgctgacttgaagctgctgtgtaagtgctgctcagtgagtttcaactcaaagactaacaaggcccagctgattgggatgctggaactgattccaaacatagagaagcagccccagcttcaggccatcgcgtctcagctcaactctgaggcgaggcggtccctctactctctacttatgcggacagtccagttccgggcaatgagtctgcacaacatgagaagatctcatgccattggagtgacagagttcagggtcatgcacactttcgagcaggatagagagtttgtggatttggcttggaggagagtgccagatggaattccccctttgtttccgggcgacatgagtggcctgcgatccgtgatccagtcatttgatgcctag

SEQ ID NO: 497466 - DNA, 771 bp, Stenotrophomonas maltophilia
atggctcaaccgcaggaatcgaccgtcgcagtaatgattgactgcgacaacgttgctcccgagatcgtggatttcgcgctcctcatggctgcacaggccgggcgcgtaacgcttcgacggggctatggcaatcgcactaccttgggcaactcctggcaagaggccctggttcgccaggccttcactccatgccttcagttccaatacgcagcgaagaagaacacctccgatatcgccctagctttggatgccctggaagcgctcttcgatcagcgtgccgacatcttctgcctggtgaccagcgactccgacttcgcctacctctgtaggaagctccgagagcgcggcgccacggttttgatcgtcggcgaagcaaaaacccccgatgctttgcgcaatgcctgcgatcagttcttcgagtggtccgcccaagaagcctcatcgccagagccgccagattttcaggagccgccgcacccagctgaccacagtaacgaagccaagaccaccggcagcgcacctcttccgaagcgtcgcccacggttcgtcatcgaggctgtctcactgcttgccggtagcacgccggagggtaaggttagcctcaactccctaggctcctatctgaagcgagcagattccgggttctcccctggcatctatgggcattccggtcttctcaacatggtgaagacctacgatctcctgtcgctcaagcaggaagaaaatgggcagtggtcggtgagcctggcacctaagccagagacgacctga

SEQ ID NO: 497467 - DNA, 828 bp, Stenotrophomonas maltophilia
atggattcaactcgattgcgggcacctgttacccatcgtttcaagccagttggcgcctgcatctattgtggtgctacacaggggcgcttgaccgaagagcacatcgtgccaaaaggcctaggtggaactctcgtactgccagattcgagctgcgatccttgtgcaaagcttacgtcccagttcgaaatgagagtgcttcgcggatttttggatcgcggccgccaatctttgagaatgaagggtcgaaaatctcatcgacggcccgccacggaatcgatcaaacagaccttcatacgcgccgacaattccttggttgaacacgatctgccttgggatcaaagcgtcaaagtcatgcacctccccgtcctcactctcccaggcttcctcaaccctaaatttccgcccgatccttctgcagagggaatagaggtttccgccatggatacgctgaccatgggacttggcgaaggagagatagttcgggagcacgcctctgtaggcatgcagtttcaggacaggatggacatctgttcgttcgttcggatgttggccaagattgctcacggctaccaggtcgcggtgcacggtgctttcccgattgagcaaagcccactggtgcccatcattcttggcaagcgatgggatgcccgaaactggataggttgcacagagcaggatccgcttccatctgatcgtcagtgcttgcaccttctccaagacgttccattgacgggcggtgatggctccagcgcgtcgatgatccgcatcaagctgttcgccgactatccgagcccgacctacgccttagcggccagacttcaagcctga

SEQ ID NO: 497468 - DNA, 1398 bp, Stenotrophomonas maltophilia
atgccaaaaacagtaaagaacttccttcaagacttccctttcaatcccgacgccgatgacacgctgcaccttaagggcatcaggatcggacggttccgaattgatgagcttgtcatcaccggacgcgaagcggccatccatgcgcaagagatcctcaacgcagctatggagcgctcccggcgctctcgcatcaatgccgcaggcacgcgctaccttgagccactctccgcaggccaccctgcccggcttctttccgtagagatcaaggactatctgggagatagagagcgccgctgcctcgcccaagagaccatcgactctacggcccgaaccctgcggcttctccagatgacctgcggggacatccccgtctctcgcattgaccacccccacatctaccgactctgggacctcatgcgctggtcacccccaggcctcttctctgaccccgcatatcaacgtatcagctatgacgaagccattgcctgcggcaaggagctagatgttcctcagctcgcccctgcaacgcttgaacggcatcgtcgcttccttgtctccttcttcaatcagctggtcaagacgaaagccattgaagcgtctcccatggctgcgttcgcagagatcaagaaagacctggtcaccgatcccaacaagccagagcggctctttgatgaagacgacctccgccgcatcttcgaccccaagacgttcattccttgggcaagcaagtatccccaccgatggtggctccccatgatcggtctgtatacaggtgcccgcatcaacgaggtcgctcagctaaaagtcgcagacatcgtcctggagagtgatgtctggtgcatccgcatacagaagactgtggatcctgacttggcgcaccggacccgcctcaggagtcggcaaagcctaaaaggcaaggcctctatccggaccatccctattccgaagccgctgttggatgcaggcttcctggacttcatggatgacatcagagaatgcggccaccctcgcctcttcccacacctgtccgctggtgtgaaccgtaagaccggtgagaccaatgctcgctacagcctagcagcgcttagccagttcagtcgctacatgaaggagcttggtttccctagaggtgttggtttccatgccttccgccacaccatcgccacagagctccaccaccagaacgtccctgacgaagacattgctctgatcaccggccactctgtaagcaagcgcgtgcccgtgcttcacgaggcctacttccacaagaagcccgccgtgatgcgcaggaagcaaatagagaccttggagaaataccgacctgcagtcgcgcttccggtctatgccaaggggcaattcaagcgatgcttgaaggacaagaagaggttctatccttaa

SEQ ID NO: 497469 - DNA, 390 bp, Stenotrophomonas maltophilia
atgaccaagccgtcactcgattccattgcctccgccaaagccaagcttgctgaagagctgcgcaagcttgaggaacaggaagttcagcttctccaggaacaagccgctgatgccttcgcggaggtcgccaacctcgtttcccaatacggcaagagcttctctgcgaagcagcgcgccgagatcgtcagcttgcttggggctgatgtccccaagaaggcgggaggtgtgaagaaggaagtcgcgcccaagtattggctcccacacacgggcgagacctggagcggccgaggcaggactcctcgtgctttcgctgcttgggaagggacttccgcttacacgacgtggaaggcctcccatcccaacgagaaattcccggcgtttccggggtga

SEQ ID NO: 497470 - DNA, 375 bp, Stenotrophomonas maltophilia
atgagccgaaccttcaagactcgttggtttcaaaagaacgccaaaaagatcggaattagtgatgctgacttatgtaaggcagcagatcaagctaggaaaggtcaagcggaagaccttggcgggggggtgtttaaaaagcgcctccacgacaacgagtaccgcagcatccttttggctaagggcgggaaatactggatctttactttcatcttccctaagcaagacaagaaaaacttggaggacgacgaattagaagacttcaagaagctcgctaaaagctacgagaaggttgacgaaaaacagttggcgacgttattgaacaaaaaagaccttgtggagatatgctgtgagagcaaagacaaaattcaaaagtga

SEQ ID NO: 497471 - DNA, 270 bp, Stenotrophomonas maltophilia
atggaaggccgggactacaagcgcgctatcaagctggacggcaagcccgttcttttgcctcaggacgcacaaagcgttatcggcttcggcaaggtctacgacttcggaagcgctgttgccttggcttacctcggcgagcgtgaggaggactcctctgcgcggcctagtcagatcgtgattgtcattaacaaggccgggtcagtgatcgcaagcgaagtcctgcctggcattgcaacgaatcagggcagtcactgcctacttatcgactga

SEQ ID NO: 497472 - DNA, 300 bp, Stenotrophomonas maltophilia
atgaagaagctttggacgctttccgccgcagtgctgctggccgcctgctcgggtggccctggtagtggcgatgttgagaaagcgctgaccgcgtatttcaaggaagcgacaggaacgacgatgacctttgagcgtctcaaggtaggcgagtgctcgcgaggggacagtcctggctatgcctgcagtgtcactggaatcgcccgctaccagcttggcactcgcactgagcaacagcagctcgtgggcacgtttgtgatcgataaggttggcggcacttggaccgtcgtagaccgtcgctga

SEQ ID NO: 497473 - DNA, 219 bp, Stenotrophomonas maltophilia
atgtggacttttttcaacgtagtccgttggcttatcacgggcgcggccctgtggtggctctgcggcgtggtgtttgaggagggcactaccgctgaaggagcagtattcgggctgatgctcttcggccaggttgtcttttggcctctcttgctgctttgggggctgccgtggctgctccgccgccgctttgctcgaaggaagcgccaatcgatattctga

SEQ ID NO: 497474 - DNA, 153 bp, Stenotrophomonas maltophilia
atgtcacgcctcccccgccgtcgctatacggacgacttcaaatcccaagccgtcgcgctgggtgagtccgttgaccctgccttcgcagcaaggcacctagatatctcggtcaagtcgttgaccaactcgttgacagcatcgcttactgagtaa

SEQ ID NO: 497475 - DNA, 756 bp, Stenotrophomonas maltophilia
gtggaaagtaaattttttggctcacctcctttcatctctcagagagttgtggaaacgtgccttcactacctagactcggcaggccagctaaacatcatcgtccgctcaagcaagctccaagaagcgaagattaaagagatagatgagttcatcgcagaacttaaggctttcaaacgttgggccattgatcaagaggtcgagcaactagccgacgaactctttcacttccagtgcttcatcagaagtattcaatcctccttagagacatggatcaacatcaagaatagtgcgccggagagcgcctggcactccctcatggatgcgagtgaatacaaagacatagctttaaggatcaatgattacgaaggaatccggaaacatgaagcgctgcttatagacgcgcggcgactgctctttcctgaaaaaatgaccttcaacagccccgcatttcgctccacaataggcgactgttcaatctgcaacgccccattccaatcttgcgatcacattgaagactttatatattcaggcagactctgccgcaggatcaacatttcaatcatcgaagcaaatcattctgccattgtgaagaatccacgcgatccacgatgcatcatgaccgagcgctctgatgaggacggaaacatgattaatatgctcacactggagccaactggggaaaagcgggaaaagggtcatgaggctatgcacctgacggggatcttactagcaaccaagccgctagactttgactaa

SEQ ID NO: 497476 - DNA, 477 bp, Stenotrophomonas maltophilia
atggacagcaatgagcgcatcacgatcacctcgattcctacccctgtcctttccgaaacggccgcaaagaaagacgtaatcatcctgcccgaattggccagcctaggatccggcagccatgtatatgcatccacttccatctctctgaagaagtatgctgaaacacaggtagagatcgacttccttacgccaatggatgacctctatgagcaacgatcttcggccatctatctgccaccgatactgttcgttgcccaagccttaatcgataaccaggaactcgtaaaggcgacacttgatatcatcatcgccttccttcgagactcagggaaatctgaaagcgcacccgtagaactgtcctgtttggtagaagaaaaagagggggcgcgaagcgtcaaactggactataaagggcctgtcggcgggctatccgcccttgaagccgccctaaaagaggcagtgcgtcgtggaaagtaa

SEQ ID NO: 497477 - DNA, 1572 bp, Stenotrophomonas maltophilia
atggccatctatcacacaagagtaaagacattcagtcgtgcccagggtcacgcatctaccgccgccgccgcctacagggcggggctgcttatcatcgatgcccgcaccggtctacggcacgattaccgaaggcgagggggcgttgtcgaaacccgctgcctggcgccggatggagcgcctgaatgggctttcgatccccgacagctttggcctgcagccgaggcttcagagcggcgcaaagacgctaccgttgcccgtgagttcgaagtggcgctgccccacgaactgagcaacgagcagcgttccgatctggcagccgagatatcgcgctgtctggtccagcggtacaggttcgctgtccaatccagcatccatgagcctcagaccgctgacgggctcaactatcacgtccacatcttggctacgaccaggcgggtggacgcagaggggctgaaggacaagaccagagagttggacggaggcccttcgggtcgaggtgaagtggaatggattcgccagatggtaggggaagccatcaatgcgcacttagccgcagccggtgtctcggcccgtgtcgatcaccgcagcttgaaagagcaggcggccgaggcccaagagcaaggagatgagcttacagcggcggaactttcgcgcaccccagggcttcatttgggcaaagacgcgactgcgctgcatcgccgaggcgccgatacagtccttaagcagggcaatgacggaatcgctcaggctaacagcgctgcttgggatcgcgccgttgttgacctatcggagcagggcagattgatggaacctgcgtccgatcaagccgtgtcggttggtccgcgcgtatctgcacctactcccgccgtccagatcccgacacatcttcgcgtcgttagccctctcgatgtggcgatgggtgaatgctcgtcggttgggatcgccgcccatgaagggacgcggcagccgcaggtcaccgcatccaagcaggcgttgaaggctgtgttagagatttgggccgaggcgtggatcgaagcgttgagagatcggcttagatttacgcgcaggttgctgcgcaacagtgccaccttgatatccgctcatgtcgaagcgcccaggctccgtggcgacttggaagagttgctcgtaagactgaagaagttgaagcgggacgctctacgcttcaagcgtaggctgaaagctgaagaccgtgcccagcacgtattggcccaggcagaatttgccttggagaacttcgaaagccaaaacccaaggccaggcctcttgaatcggtcggattggtcgcgtcgccgagcgcgccgggttcgggctttcgaactggggcgcctggagtatcaacgcgcccatgaagccacaggcccgaaggctcaggaagactacaaccgtcgaacagatgagtccctctcgcagttggagaattggagtgaagtggtgcttcggagatatccggtgttggaggacgcgcccactgacgctcccgcagcgactattcctgcggatgccttgctggcaatgaagcagagcaaggagcctggagcccggttgcactga

SEQ ID NO: 497478 - DNA, 297 bp, Stenotrophomonas maltophilia
atgccgttagaaagaaagctggctatcgctagtagagtgctatgcccattgatcgcacaagaccggacccgagacactcaagagcggatcgaagacatcatccacgccctcgaaatcgccgacgaattgatcaaccgatgcatgcaaccgaagcctcctgctgacgaccacaccctgaaacctgccgttagggtcagagaagccgtggtagaacgcgaccaggtgcagctcagcgacatgatttcagagcgccgtggcacggcatccaagcccacccggggccctacctaccactaa

SEQ ID NO: 497479 - DNA, 1422 bp, Stenotrophomonas maltophilia
atgagagttccccatcacttgatcaagacgccagcggggttttcgttccgtcagcgcgtgcccgtcgacctccagccccttctgggttgccgaattctcaagcgaagccttcgaacgcgcgaaatgcgcagcgcccaggcttgcgccctggtgctggccgcccgctatgctgaggtcttcagcgccatcaggaagaacggcatgggcgagaagacggcagagcaatggctccgggagcttcggggacaacggctccaggactacaccctggaacgagacgccaatggcgccctgcgtatccaggcggagccaggcgaagacaccgaggcgctgactcgcgctatcgagagcatcggtcgggtcaaccctgcgttcttcggcgcggcagccgccccggcagttccctccaagccccagcccagcaaggtcctgtcgctgatggaagcgcgcgatctttggctcaaagccattgccccagacaccatccccaagacctacagcatcaagaagtcggccattgacgggttcgtgcgcgtcaccggccctgactatcccctgccgagcatcaaccgaatcgacctgtcgaacttctatcagtcactcgccgacgctggcatctcaaccccgacccgagtgaacaagcagtcctatctgggcggcttcttcgattggttgattgccgctggctattacacagacagcaatccggcccgaagccatgtctcatacggcaatagcgccaagcgaaagcggcgcaagctgggcttcaaggccttcgacctgaagcagatcagcctcctctttgctccatcggcctttgccaccttgtcacctgccgcgcgctgggcagcgttgttgggcctgtatacgggcgcccgtgcctctgaagttgggcagctgctggtgagcgatgtgcaaacggagggaggggtggcctacatccatattaatgacgacggcgagcaccagcgcctcaagagcgaggccagcatccggactgtcccgatccacgccgacctgattgccctgggcttcggcgactatgttgccagcctgcccacctcaagccgcctcttcccccaggcgaaggccaatgccgtcaatggcgcggggaactggatctccaaggcatttacccgccacctcgcggagcatgggaaagcgtggcccaaggccaaacgcggtttccattccctgcgcaagacggtcattcagcaaatgcagggattcggtgtcgcctcagaaatgcgcgcccagatcgtcggccacgagcttgatgatgaacatcatcccgtttacagccgggagttcacccctgcagaaaagctcaatgggctgatcactcctgaattcaaaacagcaggcctgtcatccctgagcttcgatcttgagctcgctgcgctgaaggagttgctgggatag

SEQ ID NO: 497480 - DNA, 1242 bp, Stenotrophomonas maltophilia
atgccaaagaaggctgccgacgggctaacagccattcagattcctgagctagagccgggcttccatccggagggcactgttaccgggctttatttacgcgctactcccaagggagcaaagagctggattctgcgaatcgtgatcaacggccgccgccgtgacatgggtttgggcggctaccctgccgtaaccctcgcagacgtacgcaaagcggcccgcaaggtccgcgaggctgtagcaagtggcgctgaccctgtagcggacaagcaagcgcgcagaatggcgtacaaggccattccaaccttccaatggtgtgccgagcaaaccattgctgcgaagcgtccggaatggaagtctgccaagcatgccgcccagtggaccagcacgcttgccgccgatgcctatcccgtcatcgggaaaactcctgtagatcaaatcgagctatctcatttgctggaagtgctggtccccatctggacggttaaatgcgagtcggccacacgcctacgcgcccggctggaagcagtgttggcttgggcgaccgcctcgggctaccgcaaaggcgacaaccccgcgcgctggaaggggaacctagacgctgtcctggcgaagcccagcaaggttgcaaaggtgagccattacaaggcgctaccaattgatgagatgcacacctttgtggcttcgctccgcttgcagcaaggcatggcggcgcgcgcgctggagttcctgattttgaccgccactcggtccggtgaggttcgcggggccacatggcaggaagttgacctagatgccgctgtgtggaccgttccagcggagcgcatgaaagctggcaaagaacatcgcgccccgctcagcgcgcgcgcagtagcgcttctcaaggagttgccgcgcatgggaggcactgagcttgtctttcccgccccaaggggtggcaggttgtcggatatgaccatctccgccgtaatgcgccggatgcaggttgacgctgtgccgcatggctttcgctctacattccgcgactggtgcagcgaacgaaccaactatcctcgcgacgtagcagagatggcactggcccatgcaatcagcaacaaggttgaggcagcataccgccggggggacctattcgtaaaacggacgggattaatggaagactgggccaattttatagactccgctaagtctgaaaacactgtgcttaggttccccagcactcgacgtggagcacaggcaggtgagtga

SEQ ID NO: 497481 - DNA, 825 bp, Stenotrophomonas maltophilia
gtgagtgaggtggacaacttcgccgcagcgggaaatcgcggactatcgtcgtttgtatgctcacagtgtgaaagtttgactggccgtggcgcgcaggagatccgcgttcgctttttgtacgaagcgtacggagagtcagggccattgctggatcagatgagagcttacggcttagccaccaaggaggctcgagagctggttgccaccttagcaaagagagcgcgcagggagggaaagggacgaccgcgaacccgcatcaacaaggatgacatggctggcatcgagggtacccttgctagccagagggcatatcgccacaacggaactagatcagacggtcggccttgctggcgatgctcgtccggacagagtcactgcgggcgtgaggttgctgagcacttccttgtgagtgtgtaccggaagcaccgcctattggaaccgctcctagatcacttcgttgactatgggctgggtactgagggcgctaaggcgcttctcatcagctttgcagagagagctaagcggcctcgccgaggagttataacttcgcagttcttagacgatcaagattaccgcatatgcatcttggtcgcggaccagctaggggcgttgaacggcgatatcagccggccaggcaaggcctgtcgcttagttctcgagaggttgcaacggctgggtaaggctcaaggcaatagagatgaaaggacgttaaggcgcgtctgggcaaaaacctaccctaaatactggtttgtctttgaccaagtaatcgcgaatggacgttcaggtgtactcgacgggctgcaccccatctacccaagtctctag

SEQ ID NO: 497482 - DNA, 1950 bp, Stenotrophomonas maltophilia
atgactgagaccacgcccgcgctcgaccgcaatgcccgcaactggaccctggccagcgcggcgttggcgctgttgccgttgctgctgcagttgccgcccctgctggcgggcgtgatcgcggccgcagcgctcgtgactgcggctctgtcgtggcggaaggtgctgcccatgccggtgcgcctgctgctggtgctggccatgctcggtgccatcgcctggcagatggggatggtccgacctgggcgcgataccggttgcgccctgctggcagcgatgctggcgatcaagtccagcgagctgcgcagccggcgcgatgcccgcagcctgctcggcttcgcgctgttttccccgtttgcggcgttcctgctcgaccaaggaccactgaccacggtgttggccgcactggcggggatcagcgcgctgctcgccctgcaacggctggccggggatgaaggccacgccgcgcagctgccctcgcaagggcagctgcgcggcgttggccgcctgctggcgatcggcctgccgctggcattggcctgcttctggctgttcccgcgcctggccacgccactgtggggtgttcccgagcgcgccgtgggtacgccggggttgtccgacagcatggagcccggccagtggctggacctgatggccgacgacagcccggcgctgcgcgtgcagttcttcggcgcggtacccgagccgatgcaacgctactggcgaggaccggtactgaccgccttcgatggccggcgctggacacgtgaccgcgccagcgagcgacggcaggcggccgtggtcgaggccggcacgcagggttgggactaccagatcgactacgaacccaccgaccggcgccagctggtggcactggacctgcccagccgcgcgcctgcaggcagcacgctggatgcggacatgagcctgagcagcgagcggtcactggcgtcgctgagccgctggcggttgcattcggcgccaccacaacgcttcgacagcacgctgtcaccctatctgcgacgggccgcgctgcagttgcccagtggcttcaacccgcgcaccgccacgttggcgcagcaatggcggcagcaggctggcagcgatgacgaggccatcgtgcgccgcgcgctgcagtggatcaccaccgacttctcgtacacgctggacacccctgcggcagggcgcgacccgatcgacgagttcctgttcggctacaaggccggcttctgtgaacacttcagctcggccttcgtggtgttgatgcgcaatgccggcgtcccggcacgggtggtgaccggctttgccggtggcacctacaaccgccttggcgactactggatcgtgcggcggatggacgcccatgcctgggccgaggtatggctgccgcagcgcggctgggtacgggttgacccgaccgcagccgtggcaccggaacgcatcctggacacactggacgaccgcctgcaggccggtacggacacgccactgcagcaacgctggcagcagctggggcagatgggcgactggctgcgccgcggctggaacgacctggtgctctcgttcgatgcacgccgccagcagcaactgctcacgccgttcgggctggatgatctgggccccacgcaacttgtcgctggcttcgtggtggcaacgatgctggccttggcgtggatggcctggctgctggcccgtggcgagcgcgaacgcgacccgctgctgcgcgcctggcaccggctcggacggcgctacgcccgcctcggcctggcccgtgaaccgcacgaaaccgcacaggactgggcccagcgggtgcaccggcagcgccctgacccggccctgctcgcactcagccagcgtttcgccgacgcgcgctacgctggaacttgcaccgacctcgcttcattattgcgggacctgcgcaggcatcgcccgacttccggagcctccccatga

SEQ ID NO: 497483 - DNA, 918 bp, Stenotrophomonas maltophilia
atgtccatcgaactccgccacctgcgttacttcctcgctgttgccgatacgctgcacttcggccaggcggcggagcggctgggcatgtcgcagccgccgctcagccagcagatccgccagctggaggacctgatcggtgcgcgcctgttcgtgcgcagccatcgtcgtgtgcagctgacgcctgcgggcgagctgctgcaggaacgtgcacgcgccatcgtgcagcaggtggagacggcggtggacgaggtacagcgcgcgcagcgcggtgagcagggtgaactgcacatcggcctgacccgcgccacgccgctgtcgccgcagattccgcgttcgatcctgcattaccgccagcagtatccgcaggtgcggctgcagctgagcgagatgaacaccctgcagcagatcgacgcgctgctcgacgggtcactggatgtgggcatcatccgcaagcgcgcgttgccaccggaactggtggcgcacagcctgttcgtcgatccactggcgttgatcgtgcatgccgggcacccggccctgcaccggctttcgaagcagggcacgctgtcgctgcgcgacttcgcgcaggaaccgttcgtggcattccggcgcagcgcgggcgcgggcatccacgaccacatgatcgcgttgtgtgcggctgccggattcacgccgcgcatcgtgcaggaggcgggtgaagcctcgacgctgatcagcctggccgccgcgggcctgggcgcggcgatcctgccgtcttcgtgcgatcacatccgggtggaaggatcgcgcttcgtggcactggccgatgccggtgcccattcggaagtgcagctggcgtggcatcgcgaacgggtaaccccgttgatccgcaatttcgccacgctgctgcgcggggcattcgccggtagagtcgactgttag

SEQ ID NO: 497484 - DNA, 2538 bp, Stenotrophomonas maltophilia
atgaatggcgacaacggaacgtcggcgccgcacaaccagcaactgcgcgccctgctgttcaccgacctgtgtgactcgctgctgctggtcgaacgcatcggcgatgtcgctgccgccgaactgttccaggaacacgaccgcctggtgctggcgctgcagcagcgctggaacggccagctgatcgatcgctccgacgggctgttcatgctgttcgagcgcccgatcgacgcgcttggcttcgcattggattaccagcgtgggctgcagccgctggggcagagacacgagatccatctgcaggcgcgggccggtctgcatgtgggcgatgtgctgacctgggagaacagcgccgaggcagtgcgggctggcgccaaggcgattgaagtcgaaggcctggccaagccgacggcggcgcgcctgatgcagttggcacgtccgggccagatcctgctttcggcggtggccgaatccatcgtgcgtcgctccagtggatcgctgggggcgatggctgaaggcctgcaatggcgatcgttcgggcgatggcgcttcaagggcgtgagccagccagccgaagtctacggcgtgcaggcggcgggcatgcccacgccggggcggctgcggcacacggccaaggcccggcgtgatcttccgttgtggcgccgtccgctggcgatggcggcgcaggccgccgtgctgctggccgtggtgcttggcgtctggttgctgacccggccacagccggccatcgcgttcgccgaacgcgactgggtggtgctcggcgggctgcataacctcaccggcaatcgactgctcgatgacgccctggaccaggcgttccggatcagtctcgagcagtcccgctacgtcaacgtcgtcagtgacgaccgcgtcggccgcacccttgagatgatgcggaaaccgccggatcgcggtgtccgtgaacgtcgcgatgccgccgctgtggcggtgcgcacgggcgcccgcctggtgttcgtgccatcggcgaccgatgtcggcggccgaacccgcttcagcgtggaggtggtcgagccgtcgacgctgcgcaccctggccgtggtatccgccgatgcgaaggcgggtgcggtactggcggcggtggacgatgtttcgcgccagctgcgcgatcgcctgggcgaagagcccgcattgatccagcgcgacagccaatccctgccggaggtgaccacgggcagcatggatgcgttgcgtgcgtttgccttgggccagaagcgctacagccgaggagatttcaacggcgcgatggcattcttcgggcaggcgatcgaggtcgatcctgagttcgccctggcatggctgggccaagcccgctgtcgcttcgccatgatgaattaccgcgatgcccggcgtctgctggcagaggccgaccgtcgatcagggcaccttacgccacgcgagcgcctgtacgtgcagaactgggcgctgcagatcagtgatccggatcgcgccaccgatggctgggcgcgcatggcggagctgtatccggattacatgcctgcaagctacaacgccggtctgaatcttttccacgagaaccgccttgccgaggccctggcgctttccaggcgtgttgcacaaagcagggtcgagctgcctgagatcgcgcaggaccagtacggccgcgccttgctggccagcgagcgctacgcagaggctgacatcgcgttcagccgtgccaccggcaatggttgggaaggtgcattgatgcgccaggcgacggtggcggcagcgcgttccgagttcgagaaggccaatgcgctgcttgggcggatcgatccaggcaacttccatgctggcaatttcgctaccacgattgcgcttgaccaaggcgatgtcgagggcgccatcaagctcgccgaacagggaaggatgcttgccggacagcgccagggcatggatcggtacaacttcgacatgcccctggccgtcgcctacatgatggccggcagaaggtcgaaggcgctgatggtggcgcgcgtggccgcgaccgcgccgttcgcagagctgagcggcgaacccgcggtggaggtagtggatcgcctggttgcagcacacgcggcagccttgctggcactgagactgggcgatgccgcaccggccaaggcggtccaggcccggatgaacgcgcttcaggatctccctgacagcagcgtgttgcgccagtacgtcaccctgttggccgggcggatgatgcagcatgagggccggccccaggccgggctggacctgctcgtaccgctgttgaagaagcagccacgcctgcaggtgcggctggcagtgcgtgacctggcgctggaggcgggcctgaaggatgttgcccaggagcagacgcgttggctgcgtgatcgccccggatttgcatatgcagaagcgcaatgcagcttctgcctgcaggcgcttaacgtagtggatgtgcggaggctcatggcggcgccggcaatcgaggctgccgacaccatggcctcgatgcctcagcgcagcgtgcgcggcgagccgtaa

SEQ ID NO: 497485 - DNA, 306 bp, Stenotrophomonas maltophilia
atgcccacgttgacgctctcgctgccggtcgcaaggacgctggttcagcgtctcgccaccgatgacaccttccgccagctcttcgccaccgacacggctgccgcgatattgctggctggacacgttccatccaacccggctgaccttcagcagttcgtgcaggattgctgcaagaacatctgcctggcggagaaagacgtcatcgcacaggccgaagagcagatcatcgccatgctgaccagtggtaccggctactccgtgccgatgcttgaggacggttacggctcgccgcgcacgctgcgctga

SEQ ID NO: 497486 - DNA, 1170 bp, Stenotrophomonas maltophilia
atggatgtcaggcgctgcgcgatcgtagtggtacagcccaccgagcagatccggttcgagtttgagggcctgctgcgcggtggtgatgggctggtgcgcacgcttgcctgggaggcactcgctccccacctggatggaccggtggcgctggacgctgcggcacaggcactgctgggaagcctgagcccaagtgcatggaccacgcttgaggcagggaaggcctgttcacctgccatggacctgctgatcgccagtggcctggtgttgacccgcggacaggatgacgatgttgccgctcgtgacgagcggttgcgtgcaacgcattggcatcccctggctgcggtcatgcatgccttctcacgctgggaggatgttgacgccgttcgcaacatgcgtgaatcacaggtcgaaacggcctcgcagatgcgcaggacattgggaccgccgccaccgcacgctgccgctgccgacgctgggttggtaccactgccgcctcagcagtccaacgatttcgacgcactgctggcgcggcgggtcacctgccggaacttcgatgtcacccgatcactgccgctgcccctgctgagccagatgctgcagcgggcattcggcagcagcagctgccagcgcgaaggcgatgatctggtgttcctgaagaagaacgtcccttcgggcggcggactgcatcctgtcgaagcctacgtgctggtgcgcaatgtcgatggacttgccgcgggcatgtacctctatcgagcgcagggccacggactgatgccggttgattgccccgtggccatcgatcgcgacttcgtgatgtccatggtcgggcagcagcactggttcgcggatgcgcacgtgctggtggtcctggccccgcgtttcaacaggacgtactggaagtatcgccagcatgggaaaagctatcgggttgtcgcgatggaagcgggacatctatcccagacgctgtacctggcggccacggatgccggcctgggagcattcattactgcagcgatcaacgaaaagcccatcgaacgtgccctgggcctggacacgatcaatgagggggtactcgcggtctgcggtttcggatggcgtgcatcacggatgacgaccagcgagctggaccctgcaggcacgatctggaaccttgaagaccgcgcgggctga

SEQ ID NO: 497487 - DNA, 141 bp, Stenotrophomonas maltophilia
atgtttgagcgcagcgagttcggcgccgtcccctggttcatcgagaagcgcagggtaccggtgcacagcaccggctcgcggctcgcggctggcggcgcgtttcttttggttacttttcttttcgcgcgaaaagaaaagtga

SEQ ID NO: 497488 - DNA, 858 bp, Stenotrophomonas maltophilia
atgctctacctgtctttggccgtgatctgcagcgtgctggtttcggtgttgttgaaggtggccggacgccgccagctggatgtttcgcagatggtcacctggaactatctggtggcggcaacgctcaccgccgtggtgctgcagccgccgctggatgcgctgcgcgcgccgcacgcgccgtggctgtcattgctggcgctggcggtggtgctgccctcgattttcctggtgctgggccgcgcggtggcggtggccggcatcgtccgcagcgacgtggcgcagcggctgtcgctgctgctgtcattggccgccgccttcctgttcttcggccagactgccacaccgtggaagctggccgggctcggcctgggcctgctggcgatggtggccatcagcctgcgcccacgcgggccggtggtcgcgccctcgcccggcggctggggctggctgctgggggtatgggctgggtttgcggtggtggacgtgctgctcaagcaggtggcgctgtccggcacgccgtcgatggcggcggtgctggccagcttcagcgtggccttcgtgctgatgctggcgctgcagctgtggcggcatgcgcgtggccgcagccggctggcctggcgcaacctgggcgcgggcgcgctgctgggcctgctcaatggcggcaacatcctcttctatgtgcacgcgcaccagtcgatgccggacaacccggccaccgtgttcgccggcatgaacatcggcgtggtggtgctgggcgcgctggtgggcgtgttcgccttcggcgaggccaccacgaagtggaaccgcgccggcctggcgctggcggtgctggcgatcggactgatcgcctgggggtga

SEQ ID NO: 497489 - DNA, 381 bp, Stenotrophomonas maltophilia
atggagactgcagtgcctggaacagcaacccgcaggaccgtgtttcgtgggtggacgggaggactgttcgccgtcctggtcgcctgtccgtccctcgcccatggcacgaactgcgattccaaggtgaccaacgtttccatcgacgccagcggcaaggtgttcgtggcgaccaccgtctcgcccatccacgcggtctgcaacatcgtcagcaaaggcgacttcagcatgccgccggaggtctgcaaggcgacctacgcgatgctgatgagtgcgaaggtctctgccattcccatccgcctgtactacaccagcgtgccgcaatgtggcgatatcaaggcctggtcggcacaaccgagcttctaccacgctgaactgttctga

SEQ ID NO: 497490 - DNA, 687 bp, Stenotrophomonas maltophilia
atgcggtacctgacgatgacagagctccaacgccccaccctgaccctgcccgccggcggcaagcgcctgctgctgcattcgtgctgcgcgccctgttccggcgaagtgatggaggcgatcaccgcctccgggatcgactacgcgatcttcttctacaaccccaacatccacccggtgaaggagtacgagctgcgcaagcaggagaacatccgcttcgccgagcagcacggcattcccttcatcgactgcgactacgacaccgacaactggttcagccgtgcacgcggcatggaaaacgagcccgaacgcggcatccgctgcacgatgtgcttcgacatgcgcttcgagcgcactgcgctgtacgcgcacgagcacggttacgacaccatcagttcttcgctgggcatctcgcgctggaagaacatggcgcagatcaacgactgcggcatccgcgccgcctcgcgctatgaaggcctgcagtactgggactacaactggcgcaagggcggcggtgccagccgcatgatcgagatcagcaagcgcgagcagttctaccagcaggaatactgcggctgcgtgtactcgctgcgcgatgccaaccgccatcgccgcgagaatggccgcgagcggatcaagatcggcctgttgtactacgggcaggacgctgggacgccgcaggacgattga

SEQ ID NO: 497491 - DNA, 1893 bp, Stenotrophomonas maltophilia
atgctcgggggcaagacagtggcggacaagtactgcgatctggtcatgaaaggcggcatcaccagcggcatcgtgtaccccaatgcggtactggcgctggcgcgcgagtatcgcttcaagagcatcggcggcacttcggccggcgccatcgccgccgccgtggcggctgcggcggcctgcggtgatcgtcgtcagcaggccggcgagcacctgcccggcgatgcaggctatggcgggttgtcggcggtgtcggcgcagctgtcgcggcgcggcttcatctacagcctgttccagcccgcacgcggcgcacgcgcggcctatcgcctgctggtggtgctgaccggcaatgccagcctgccgcacaaactgctgtgcctggccgttgccgtgttcgagatcgcgccgctggaagtgctggtgtcgctggcgctgctgctcggcctgggctggtggggcggtggttggagcggggtggcggccacgctgctgccgtcgctgctgtgtgcgtacggtgcaggtgtggccggtgccgcgcttcgtgtggcacgcgtggcgcgacgcaatctgctgggcctgtgcagcggcctcggccgcgatgcacgcacgccggcactgaccgagtggctgcacgaatgcctgcagcagttgtccggcaagccgctggatgcaccgctcacctttgccgacctgcacgatgcgccgcgctatgccggcgagccggacagcccgcatgcgatcagcctgcagatgatcaccacctgcgtgtcgcacaacgagccgcgcacgctgccgctgggcggcgcgcagttctggttcctgcgcgaggaattcgagcagctgttcccggccagcgtggtgcagtggctggtgacgcaggccggcccgccgctggaggtggaagggcgacagtactaccacctgccgccgggcccgaagctgccggtgctggtggccacgcgcatgagcctgagcttcccgctgctgatcagcgcggtgccgctgcatgaaccctcacgccgcgaacgacgctgcgagccgaccgcgccggcggccgaccccgagcacaacgtggccgacagcatggaagggctgaccagcgccgggcaggcttgcggcccggtgatcaccgccttccgcatctgctggttctccgatggtggcatcagcagcaatttcccgatccatctgttcgatgccgcgttgccgcgctggcctaccttcgccatcaatctggtctacccgcagcacgccgaagaggtgaaccacggcagcaatggccgccagtcgctggagcacgcggtgttcctgcccaccgagaaccgacacggctggcagcgcacctaccagtcgatcgccacaccgctggcggccgccgagctgggccgcttcctgttcgcggtggtggcgaccatgcagaactggcgcgatctgctgcaggcgcgcgcgccgggctaccgcgaccgcatcgtgcacgtcagcctgcagggcgacgaaggcggcatgaacctggacatgccgcaggaggtgctgacccgcatcgccgacaagggcagcctcgccggtgcgcgcttctgttcgttctcgttcgagaaccactactggatccgctggcgcaacctggcctcggcctaccagcgctacacgctggaagtggcacgcaccgatgatccggcgcagcaggtactggcctaccgcgcggcctattcgatggttgcccgcggggaaccggcaccgccgtcgtacaagctgggctcggaagacaagcggctggcctcgcagcagctgtgggggttgatggtcgagcagggacgtacctgggaagacctcggcccggaccttactgacggcgcaccgcgtccgctgccgcagatgaaggtcacgccgatctactga

SEQ ID NO: 497492 - DNA, 159 bp, Stenotrophomonas maltophilia
atgctgatgctgatgctgatgctgatgctgatgctgatgctgatgctgatgctgatggtgatgctgatggtgatggtgggtgccgaccgttggtcggcacgctctcgccctgcgcgaaatgcatccacgcatggcgtggatctactgccggctcagtag

SEQ ID NO: 497493 - DNA, 156 bp, Stenotrophomonas maltophilia
atgctggatatgcagcgctacgatgccggtgacacgcaggtctaccgcgtgcgtgggcaggtgttccttgcctcggccggccatctgggtgcggtgttcgattaccagcacgtgacgccgagggtacagattgatctgcgcgacgcccacccgtga

SEQ ID NO: 497494 - DNA, 1782 bp, Stenotrophomonas maltophilia
atgccaaccaacatcgatacccatgatctcgatgccacctccggcgccgtgtatttcgccgtcggccgtggtaccgaagggggtcccgcctcctaccatctggccatcgccggcatcacccagggcgtgaccgaaccgcactggggcacggtgaacaaagtcgcgcagaacagcggttacagcctgggcgcgatccaggtcgacttcggccagcgcggcgagtgggcgctgggcgccatcgacggccacgcactgaaggcgggcgagacgacctatgtcgacgccgtgatcgatcaggccagcacctatgccaaggcgcacaacctgcccttcacccaggaccacgccgacctgcgccgcgacctgctcagccacggcaatggcctgagcgggcgcagctcgatccagttcatcgataccaacacgcgcgacagcatcaacgcctgggccggttcggccgagggcaagcagtggatccacgcgaacatcgactacccgcaggtgcgcaacgccacccggatcggcatggcgatggtggacgcacacggcagcggcatcgccgaggaaaaccgcttcgaagcgatcagcctgatcgccaagaccgccaaccagttgcccagccagctgcccaagctgcagaaggtgctggaagaaggcggtgactacgaggcgctgcgcgcgaaggccgggcagatccgcgagacctaccagtacttcgacgcgcccaaggccggcgacatcgccgtgcgctacgaaaatgcctacgccaacaacaaggacgcaatggaccgcgcccatgccaaggtcagcagccgcgactactcgcccgccggtgagcacaacgatgcggacatcaaggtggcgctggaccagatcggcgcaccgcgccagcaggccggttcgcagacgttgaaggaagggtccagcggccgtgacgtgctgaagctggagagcaatctggtcacgctgggctatgccagtgctggcggccagcagacgctgaatccggaccggcgcttcgatgccaccacccgcaaggcggtggaagacttccagcgcgcgcacaacctggacccggtggacggcaaggccgggccagccacgctggccgcgatcgaccgcgacgcgcgcgaactccagggcaacctggccgcgctggggctgaccgacgccaagggccaggccatcggcagcgatggctatctgggcggtggcagccgccatgcgatcaacgctttccagcagcagcatggcctgccagcgaccggcattgccgatgcggaaacccgccaggcgctggccaatgaagtgcagcagcgtgcgcaggcacagggcagcaccccggaacagcaggccgcggccgagcctgcgcgcgagacggtgtacccgatgtccgacccgcgcagcccgcagaactggctgtacaccgagaccctggtgcaggtgaagttcgccgaggaagcgcgtggcctgccctccggcgagcacagcgagaagctggccgctgcgcttaccgtggaagctgcacgtgccggcctgtaccgggttgatcgcgttgagctgaaccaggatggctcgatggcgcgcgcggtgcaggccaatgcactgcacgacgaaagcgcgttgaaccgcaataccgcgccggtatcgacggcagacgcgatgcgccagagcgtgcaggaaaacagcgagcgggcattgcaggtgagcgatcagcagcgcgagcagcagaagatcgaccagcagacccagcagcacggcccgcgggccatgatggcgtaa

SEQ ID NO: 497495 - DNA, 420 bp, Stenotrophomonas maltophilia
atgcagcacaagcgtttgagcaggaccctcgccaccgcgctggcggtcgccgtactggccatcggcacggcaaccgcagcaccggctgccaccgggctgagcccgaccttcaccacctgccgtgacaaggcacagggtgcgatcgagcaggccgcctgcctgacctcggaaagcgcgcgccaggaccagcgcctgaaccaggcctaccgccagctgcaggcaaagctgagtggcgcaaagaagaccaagctggtgaatgcccagcgcgcgtggctgcagtcgcgcagccgcgatagcgaactggataccgcgctgtacgacgattcgcagcccggcaacctgcagggcgagctgaacgatgtgatgcgcctgagcgcgcgtgccgaccagctgcagaagtatctgcagctgctggactga

SEQ ID NO: 497496 - DNA, 1125 bp, Stenotrophomonas maltophilia
atggagcgtactgaagacgctggactgccacagccgcaggagggaggccgcccaggagccgcgcggcgtcctgcatcgccgttggatgatccttccttggccccgcttctggcaaaatccccaacacttcaggcgggtctcgcccaggcgagacgcgaaggtatcgttgttcaatggggcacagccggtgaaggcacctaccttgttcccggcgtgaagatcgtcatagacgagaatgcaatcgggcaaggcaccagactcgcacgttctctttctcacgaagttgggcaccatctcttcaccgaaccctcaaaccgagcttctaagcaagcctatgtagacagcgagttgcgaggagaagccgccgcgactctcagcaatgtccaggtccagcgtgaaatcgttgcgggtggtggcccagatattggcgtttccggcacgggtagccggccacaacaatatggaaccattgcggcagaactccaggcgggacgaatcaaccgtagccaagcactgggtcagatcgctgaggtgtttaagacggaggctccgtccgttggacctcatgcgacatacgagctttactacggcgacttctacgaccgggaaatagcacccacgcaacggcggcgtaggccagatccagaatttgacgccgagcgtacggcggttgcggccagcctcagctcgaccaccgacgactcgctctcgctgcaacgagctactttctcagtggccgaactcggcaacgctgaccgctctctctacatgcagatcagagcgggtgtggaacgcctggacgccgagagcgggaagcagtgggatgagtcgagccagcgcatgtccgcgagtctgttggtgctcgcgaaggagcaagggctttcaagagttgaccacgttgtattgaacaacccgacagagtcccttgcacgtggcgagaaggtattcatcgtcgagggagcgatggacgatcctgcccaacgtcgtggaaccatgagtacgatggacgcgcttcgtgcgcctgaagcagagtcccttcatcgcgctgaagcgttggccgcagatcttgaacagcagccggcgcagcaggttcatgcgcaggacgggctatcgttctcaaggtaa

SEQ ID NO: 497497 - DNA, 405 bp, Stenotrophomonas maltophilia
atggagcgattcaagaacagcatcgagcgattgtctacagttcgctttgatgatgtcgatgcattgagtgaacttctccacacccgtctgggagagccggcgcgtcaggatctcatggacgagcggatcgcagaacgcggaatgctgggcgaccttgaggtgcggaacatcaggctgagaagtgccgctgacaaccccgccctcgcgaacctgatttttgatatcgcgccaccgagcattgcgctcgaggaaatgatctgggagaactccaccaaacatccacctcgacccgatgcgccgggctcccggccttactggaccgcgcaggtgaacgatgcacaggtcgtgcttgggctcgccgccgacagcgtgacgctgacctacatatcgatccgtcagcactga

SEQ ID NO: 497498 - DNA, 324 bp, Stenotrophomonas maltophilia
atgagcacaccctacccagacctgaaacctttccttgttgagctgcggctggacgaagtggattcgcgcggtggcactgttgccgagatgatcgcctccaccgcgcgtcccagggcgctttccataagccctggagtcatgtggtacagcttcgtgctgaatgaccgcgtcgtcacccgcatcacgcctgggacgcgggcgcactgcacgatctcattcgtcaaccatgacggtgcgaaagaggtattcccctgtggcacggtggccgccttcggagacggatcgtcgacaagagggttgatccgcatcattcggtttgattga

SEQ ID NO: 497499 - DNA, 945 bp, Stenotrophomonas maltophilia
atgtcccatcttctggccaaggctgctgaaaaggcggatctcgaccggatcgatgccttgctggatgcaggcgccgatatcgagtggcagcacaagggcacggggcgcactccgctgctctcggccgtcattgccggaaaatgcgatgccgcagcgcgattgctggatcgcggtgccaacatcgagcatgcctgcagggcactgggctacaccgcgctgggttgggccgccgcgcatggcgatactgacatcggcgacctgctgatcgcacgcggcgccatgctcgaccctgcttcgccggaacaacggcgtacgccgctgatgctggcatgcgcccgtgggcacctggcgatggtcgaacgcttgctggacagcggcgcgtccgtggcaccgctggatttcgaagggtgcaacgcgttggcgatggccgatgaacgcggttacgcggaggtggtggcgctgttgcacgccgccggtgcgacgccgccgcctgcgttgatggaagcaccgccgctggagtggccccagcccgacgccggaggtgagcccgcgtcggtggtgcgtggatacttgttggcatatcacgagtgggaaacgcgtggctacaaggattcccgtgccggtggcggacttctgctcagctcgggcttccaacaggagaaagcggacatcctggcggcctggtgtaccgaccgcaaacgggtctattcgaccggcgtttcggtcgggaaccccccgcggtacgtaccggaggatctcttggtgtcagttgcgatgccgacggtctcgagggccgaggtgctggtacgcgacgaccctcagaaggcgcgttcccttcgttacgaacatctgttcgtactcaagcgtgtgggtgggcggtggcggatcgacctgcggaagaagcgtgtgttccacatcgagacctgggcggcagccatcctctag

SEQ ID NO: 497500 - DNA, 2859 bp, Stenotrophomonas maltophilia
atgtccctgaaaaccaatccgctgcgcaacgcgatcgtcatcgcgctggccgccagctgcaccacccccgccttcgcacagagcgccggcgataccccgaccaacctcgatcgcatcgaaatcaccggctcgcgcatccgccaggccagtgtcgagaccgcacagccggtcgtcgcgctcagccgcgccgagatcgagaaaaagggttacatcaacgtcgccgacatcctgcaggacgtcaccgccgccggcgcaccgagcctgagccgctcgtcgtcgctgagttcttcgcgcgacttcggcggcacgtacgtcagcctgcgcaacctcggcccggagcgcagcctggtgctgatcgacggccgccgcatgggcgtcagcgccggtggctactccgacctggcttcgattccctccgcgattgtcgagcgggtggaagtgctcaccgatggcgcgtccgcgctgtacggctcggacgccatcgccggtgtggtcaacatcatcacccgcaagaacttcgacggtggcgaagccagcgtctacgtcggccagtacggtgaaggtgacggccagaagcgctcctacagcgccaccttcggcaagaccttcgaccgcggctggttcagcgttggggccgagcgcaccaaggaagacgagatcctcggcagcgagcgcgagttcagccgttacccgggtggcccgcgccatcccgacgacgtcaaggcactgaaccagaccacgcagtggggcagcgtcaccgtcgacggcaagtcgctgaccgtgggcccgggcggcgacccgagccagaagggcaatttccacacgcccaatccggccgatggtgccaacaccaagaccaacatgagcctgctgagcggcctggagcgcacttcggtgttcgccaacggtggcttctcgatcaccgatgacctgcgcatcgtggccgacgcgctgtacagcaagcgcgagtcgaccaagcacctggccggctacccctactcggtgtccaccgcacaggcgcgcaacggttcccgtgctgccctgtccaaggacagtgcgttcaaccactggggccaggacgtgctgttctcgcaccgcaccgaagaaatgccgcgtgcgaccgagaacaacctggacaccaagcgcgccagcatcggcctggaaggcagctttgaaaccggttcgcgttactgggactggaacgtcagctacatgtacaaccgcaatgaaggcgagcgcatcggtaccggcagcatgtaccagccgcatgtcgacctggcggtcggcccatccttcatggatggcaccgtggcacgctgcggcagcccgggtgcagtgatcgccggctgcgtgccgtggaacccggccgcgccgatgggctatgcaggcccgggctcgctgagcaaccaggacgtgcaggactacctgttcacccgcttcgtcgacaagatgaagagcaccacgaaggtcgccagcgccaacatctccggttcggtgttcaccctgccggccggcgacgtgatggccgcgatgggcttcgagcaccgcaacgaagaagccagctacaccccggacctgatggtgcagaagggccagattgccggcaccaccggccagccgacccgtggcgactactcgctcaacgaggtctacctggagctgcaggtaccgctgctggccgacatgccgttcgcgcgtgaactgtcgctggacctggccggccgctacaccgactacaacaccttcggttcgaccaccaacagcaagttcggcctgaagtggaagccgatcgacagcctgctggtacgcgcgacctatggcaccggcttccgtgcgccgactgtggacgacctgtacggcggtgcggtgaagagccgtgattcgttcaccgatccgtgcgatacctcgttcggcatcgctgccagcagcgcgaccgtggccgcacgctgccaggcgctgaaggtgccggcggacttccgccagcagaccgcgtcggaaggcaacgtcgccaaccgtccgggccagcagggcatcgccgatttcgactccggttccaatgcgaacctgaagccggaaaccgccaagacctggaccgtgggcctggtgtacagccccgagttcgtgccgggcctggacgtcagcctggactggtggaagatccgcatcgacaacgcgatcgtgggtgagtcggccaccgacatcctcaaccagtgctacgtgcagggcgtggattcggcgtgcggccgcttcacccgttccaccagcgccaagacgctgggtcaggtgacgtcgctggaccgctcgctggtcaatgcgggctaccgcgaaaccgccggctacgacttcagcctgcgttaccgcctgccggaaaccgcgttcggccgctttgccgccacctggaacaccacctacaccgactacctggagcagcgcaacgacagcgccgccaccacgccggtggagcagaagaccggctggcagggcaacttccgcgtgcgttcgaccttcaacctggattggcagtacggcgacctgggcatcggctggaccgcccgctactactcgggcatgaaggaagcctgctcgtatgacctggccggtggcccggactgcaacatggccggcttcgtctcgccgtacaccgatgcgcagccgagccgcaaggtgggctccaacaccttccacgacctgcaggtgcgttacagcctgccgtgggacggcaccgtgtcgctgggcgtgaacaacgtcttcgaccaccagggtccgatcatgtacagccagccgaacagcagcttcacctactacggtggcttcgacatcggtcgtttcatgtacatgaagtaccagcagcgcttctaa

SEQ ID NO: 497501 - DNA, 897 bp, Stenotrophomonas maltophilia
atggatccgatcgccccgtcgctggcccgcctgcagcaggtgcaggtgcgctaccgcgaccataccgccctgcagggcatcgacctgcaggtccgcgctggccaggtgctggcattgctgggccgcaacggtgccggcaagagtaccgcgatcagcgtgctgttgggcctgcgccgcgccgatgccggccaggtcgagctgctcggtggcgacccgcagcagcgcagcagccgcctcggcctgggcgcgatgctgcagagcaccagcctgccgccgatgctgcaggtggacgaactggtggcgcaggccagcgcctgctatccggacccgatgccgctgcaggaggtgctgcagcgcgcaggcctgcaggcactggcaggccgtcgctacggtcagctgtccggtggccagcagcgcgcggtgcagttcgccatcgcgctgtgtggccgcccgcgcgtgctgttcctggacgagcccaccacaggcctggacatccaggcgcggcaggcgatgtggcaggcaatccggcagctggtggccgaaggctgcggcgtgctgctgaccacccactatctggaagaggccgaagcgctggcgcagcaggtgctggtgctggagcagggccgggtgctggccgatgcgccgttgagcgagctgcgactggccgatcggccgcgccgcatccgctgccgcagcgtgctgactgttgaagacgtacagcagtggccgggcgtgcagcaggtgcagcgtgatggcgagcacctgcagttgatggcaagcccggccgagccggtggtggcgcgcctgctggccgccgatgcacagctgcgtgagctggaagtacagggcgcggcactggccgacgctttcctcgacatgacccgggaggccgcatga

SEQ ID NO: 497502 - DNA, 783 bp, Stenotrophomonas maltophilia
atgaacacgatgacccgtaccggcactacacccgcgccggtatcggcgtggcgccaggccttgcgcccgtacggcgctgaactggtggccgagctgcgccgcgcctggcgtacacccgccttcgcggtgccttcgctgctgttcccggtgctgttctacctgttgttcggcgtgctgttgggccgcggccatgcaccgctctacctgctggccacctactgcgtgttcggtgcgatggccccggcccttttcggcttcggcgtgcagctggcgctggaccgtgaaggcggcctgctgaccctcaagcgagcgctgccgatgccggcggcggcaccgttgctggcgcgactggcgatggccgtgatgttcgcgttgctggtagccgccctgttgatcggggtggcgcgcgcgctgggtggcgtgcagctgcaggcagtgcagatgctgcagctgctggcggtggcgggcctggcagcgctgccgctgggggcgatcggcctgctgatcggcagtcatgtcagtgccagcgcggcgccggcgatggtcaacctggtctacctgccgctggccctgctgtcgggcctgtggctgccgttgtcggcgctgccccagctgttctcgatgatggcaccgctgtggccgacctggcatctggcgcagctggcgctgccggtggtcgggctgccgtcggtgggcagcatggccggccacctgctggtgctgctggcggtcacggtggtggcgctgctgctggcgcgccgccgcctgcgccggatcggctga

SEQ ID NO: 497503 - DNA, 1215 bp, Stenotrophomonas maltophilia
atgatcggcagcgatcattcccgcctggattcttccgtgtcgtcgagctggcttgcgtccctgctgcgccccgcaccggactcggcggtggccgacctgctgaggcgtggcaagtcgccctggagtggtgcgatccacctgctgtggtcggtctggatcttccttaccccggtgctcggcaatggcttcacggtgcgctggctgctgctgaccgtggccagctatccgctgttcctgctgctctatgcgaaggtgatgctggcgccacggcaccacgcatggcgctatgcgctgggcatgatcctgatggccctggtgctgctgccgtggtatccgtcgggactgagctacttcgtgttcggttgcgtgatgatccgcatgagcagccgtggcggctggtgggtgtacctgttgcagctcaccggcctgaacctgttgttctgcggcgctgcgctctacgtcggttatccgtggcaagccatggtgtggatgccggccgtgtcgttcatcgtcggcctggtggtgaacgtggaggccttgagccatcaacgggacgttgccctgcagctgtcccaggacgaggtgcggcggctggccactaccgccgagcgcgagcgcatcggccgcgatctgcatgacctgctgggccacacgctgtcgctgatcacgctgaagctggagctggcgcgcaagctgtacgaccgtgatggcgcgcgcgcgcggcaggagatcggcgaagccgaagcgatcgcccgcgaggcgctggcccaggtgcgcagtgcggtgaccggcatccgcgccagcgacctggccggcgagctggcctcggcgcgcctgctgctggaatgccagcaggtacacctgcagtacacaccgccgccgccgatgccggtcgacgtggaacgtgggctggcgctggtgctgcgcgaggctgcgaccaacatcgtgcgccacgcacaggcgacccgggtgcaggtggatttcatgcttgaggaacgacagttggtgatgcagatacgcgatgacggccgcggtggcgtacaggccgagggcaacggattgtgtggcatgcgcgaacgggcgatggcgctgggcggccagttgtcactgcagtcgtcgcgcggagaaggcacggtagtgaccgtgcgcgtgccactggtggccgcgaccacgccgctgtcgccagcgtcattggcacgggatggtgccgcatga

SEQ ID NO: 497504 - DNA, 1104 bp, Stenotrophomonas maltophilia
atgtcgctcttccgctacacccgcgctggccagacgcctggcgcgccacgcaagcattcacccctgctctggatcgcactgatcgcactcatcctgggtgcggtcgcgctggccttcgcctggctggccggctggattggcggccgcctgaccgcgcagcgcttcaccgacaccatcgaagccaccggcccggcacatcccgggttccgccgggcgcacagcaagggcatctgcgtgagcggctggttcgaacccagtgcacaggcccctaccctgtccagtgcacgggtgttctcgcagcgccgcgtgccggtgatgggccgcctgtcgatcggcggcggtgatccctacggcgccgacaacaccgcgcgcgtacgcagcctggcggtgcagctggtcagcgatgacggccaggaatggcggatggcaatgaacagcttcccgttcttcgcggtgcccgatgccgaggcgttctacgagcagacgcgcgcctccattcccgacccggccaccggcaagcccgacccgcagaagatggccgcggtgctggcgaaataccccagtgcacaggcgttccagcagtgggccaggacggcaccttggaccagcagctgggctgacaccaccttcaacagcgtcaacagcttctggttcaccaacgcgcagggccagaagcgcgcggtgcgctggcgctggcagccgcaggcgccggtggtggagatggatgcggaaacgcgcaagcaggccagcgtcgatttcctcagccaggaactgcaacagcgcatggccagcggcccggtgcgctggaacctggtcgtcaccaccgccgagcccggtgatgccattgatgatccctcggtgccgtggcccgagtcgcgtgatcaggtggtggccggcgtactcagcctggaccgcatgcagtcgcaggaaaaaggcgcgtgcggccagatcaacttcgatccgctgatcctgcccagcggcgtgcgcggcagtgacgatccgatcctggcggcccgctcggcggtgtattcgcaatccttcaaccgccgcgagcgcgagcgcgccagcggcaacgtcgagcaaccgaaggaggccgcacgatga

SEQ ID NO: 497505 - DNA, 1110 bp, Stenotrophomonas maltophilia
atgagcgagtccctcctgtccccgccaccggccggccccgacgagccagaggccgcgctgccaccaccgtcgcgcccgcgcgggcccatgtcgctggtggtgctggcgaccctggcggtgggctacacgctgtgggccgcgcaggacatcatcctgccggtgctgctggcgatgttcttcgccctggtcggcaacccgatcctgcgcctgctgcagaagctgtggattccgcgcgcgctgggcgcactgttgatcctcggcgccggcctgggcgtgaccggttcgctcgccgtgcagctgatcggcccggcgatggaatgggcgcaggaagccccacagcagctgcgcaaggtcgcccgccaggtgcaggacctgaccaagccggtgcagcaggccaaccaggcggcggaaaacttcgcccgtgtggccggtggtgacagcaaccacaaggtgcaggtgatccgtacccagctggacgacccgtaccgcatgctgacccgtgcaccgcggctggctgcctcggtgttggccgtcgtgctgctgacgctgttcttcatgatctacgggcagagcctgcagcgcgcggcgatcgccctgttccccaaccgccagcagcagcgcttcactacggacatcctgcgttcgatcgaacgcgaggtctcgcgttacgtgctgaccatcagcgtgatcaacactctggtcgggctggtgttcgccggcgtgctgatgctgctcggtatcggcctgcaggaagcgctgctgtggggcacggtggccgcgctgctgaattttgcgccgtatgtgggtccgctgatcggcgtggcgctgatgctgttgatgggcttcgtcgagttccgcgacccgctgcagcccctgctgccagcggccgcctacctgggcctgcacaccctggaagggcagatggtgaccccgatcgtgctgggccgtcggatgaagctgtcgccgctggtgctgatcctggcgctgatggtgttcggctgggcctggggcatgatcgggctgctgctggcggtgccgctgctggtgtgcatcaagctggtgctggcacgcctggacggcatgcagggctgggcacgcctgctggaatga

SEQ ID NO: 497506 - DNA, 672 bp, Stenotrophomonas maltophilia
atgcccccgtttccctcgccccgcgattctccctgccgcttgttgctgctggatccgcatccactgttgcggcatggcgtgcaggaactgctggcccggcagacgggcctgcaggtcgatggaagctacggccgcagcggtgatctgctgcagcgcctgcagcagcaggcagctgcgatcgatctgctgctggttgacgccttgccgatcggtgacagcggggaaggcctggaactgctgcggcacgtatcacgacattggccggcagtgccgatcctggtgctgtccgcacactgcaacgcgggtgtcgtgtccttggccctgcaggccggtgcgcgcggattcctgtccaaggcctgcgcgccgcagatgctgctgcgcgcggtgagcgtggttgcccgcggcgggcgcttcgtgccgccggagctgcgtgcacagttgaaccagtcccgccggcagcgccagcagtccatgcgttcaccacggttgagtacgcgcgagcgcgctgtcctgcagtgggtgctgcgtggctgcagcaccggcgagatggcacgccgcagcgggcgtgcggccagcaccatcagcacgcagaaacgagcggcctaccgcaagctgggcatccgcaacgatggcgagctgttccgcttccgccatctgatcgacgctgattga

SEQ ID NO: 497507 - DNA, 489 bp, Stenotrophomonas maltophilia
atgcgccggtatctgttttccgcactgctgctcgccagcagcttcgctgccttcgcccaggaccgcttcgtacccgtcgagcggcgcctgagtgcatcccaactggccgaggtcgggctcagtccagcgcagttgcaggcgctgaaccgggtactgcgcgaggcagagcgcgcggccaccgggccgacggcagcggtggcccccgccgctgcgccgctgcccgccaatgtgccggcaccggcagcaatgcatctgggcctggaagaaggaccggtcaatgcacgcgtggtcggagaggtcgcaggctggcagcccggcacgctgttcacccttgataacggccagcaatggcaggtgatgaaggggcagatgaagctgcgcaaggtgctgcagtcgccgcagatcgccgttgttccaggaattgccgggcgctggttcctgcaggtcgacgaagacctgcccaaggccagagtgtttcgcgtgcgttga

SEQ ID NO: 497508 - DNA, 627 bp, Stenotrophomonas maltophilia
gtgcatccgcgcatcatcatcgccgacgaccatcccgtggtcctgcatggcatccgtatcgtgctgcagacctacctgatggacatcgtcggcagtgcgcgcgacggcgcccagctgctggagctggtggatcaccacgactgcgatgcggtgctgaccgacctgtcgatgccgggcgccggtccggacggtccggagctgatcgacgcgctgcgcatgcgccgccctggcctgccggtggtggtgctgaccggcgcccgccatcccggcctgctggacagcctgctgcgggagggtatcagtggcctggtcgacaagtgcgccgatttcgccgaactgccccacgcgctgaacgccgcgctggccgggcaggtattcgtctcccagcagctgcgccaccacctgcaggcgcgcgacctgctgtttccgcgtcagccggcgccgttgtcggcacgcgaacaggaagtgctggagctgctggcagccggcctcagcgtgaacgaagttgccgagcgctgcgggcgcagcccgaagaccatcagccggcagaaggccgaagccaagcgcaagctgggcctgcagaacaaccaggaactgttcgactacctgcagacccggcgcggctga

SEQ ID NO: 497509 - DNA, 1374 bp, Stenotrophomonas maltophilia
gtgaccgaggctgccaagccgcgccgaccgtggcagcaggtgttgtccaacctgagccagcgcaaggtgctggcgatgctgctgctcggcttcagttccggcctgccgatctatctggtgggcaacacgctcggcttctggatgcgcaaggaaggcatcgagctgagtacgatcggcttcctgtcatgggtcgggctggcctacaccatgaagttcctgtgggcaccgatcgtcgacaagaccgacgtgcctctgttcggccgctttggccgccgccgtggctggatgctgctgtcgcagctggtcgtggtggtgggcctggtcggcatggcgctggtccagcccaaggggggccagatccagttcctgggtatcgcctggcagcacatcgtcgtgttcggcgtgatggccgtgatcgtagcgtttgcttcggccacccaggacatcgtcatcgatgcctggcgcattgaaagtgctgacaacagcgagcagctcggtctgctgacctcatcatccgcgctgggctatcgcaccgcattgctggtcaccgatgcgctgatcctgatcatcgcggcccgtgtcggctggcaggtctcgtacgagatcatggcggtactcatggcgcttggcgtggtggccgtggtcatggccagggaacccgccagggaggtggctgccgtgcaggcgcaggcgacctcgctgtggacaccgcgcggattgttcgacgccgtagcgggaccgttcatcgccttcgtccgcgagcatcgcagcggcgcgatcctgatcctggtggccatcagcgtctatcgcatggccgacttcgtcatgggaccgatggccaaccccttctacgtcgatctcggcctggacgaggacaccgtgggcgcggtgcgtggttcggtcgggctggtcgcgaccttcgtcggtattgccgcagcgggcctggtctcggtccgatggggcgtgctggcggcgctgatggtaggcgccgtgctggggccggcctccaacctggcgtttgcctggctggcctattccggcccggacacaacccatttcgccgtggccatggcaatcgacaacttcgccagcggcttcgccggtacggcgctgatcgcctacatgtcgagcctgaccagcatcggatacaccgcaacccagtacgcactgctgagctcgttctacgcgatgcccggcaaggcgctcaaggggctctcggggtggtcggtacagacgctcgcacagggccggacgctgctggaaggctacgcgctgttcttcgtcggtaccgcgctggtggcgatcccggtagtgatcctctgcgccctgctgatcctgcagcagcgccgtcgccaggccgccggctcgacctga

SEQ ID NO: 497510 - DNA, 279 bp, Stenotrophomonas maltophilia
atgcagcgcagcatcatctgcccacactgccataccggctcgaaccacggcgtaagcgtatgcgtgggatgccaggccgaggtccattacggcgcatcaaaggaggccgtaatgcttgtctttgtcgccgccatcatctgcggcgcacttgtcggcagccgatttcaggccactgccggctggctcgcatgcggcgccgtacttgcggcggggatctgggccatttcccgattgtcttccgaccgggtggtgttcaaacgcgtctatcgcacgcgctga

SEQ ID NO: 497511 - DNA, 1212 bp, Stenotrophomonas maltophilia
atgaaactgcatcaccaactcctgacggtggccgtggctgctgcgctgtatgtgccggctgcacacgccgaagtcgccatcgacgtgatcggcggttcggaaatcaccttcgaaggcctggtccaggccgatggcaactggttccacaacgatgtggtcgacctcaacggtggcgacgccggcaacggcaagaacagcgaattcgaactgcgtcgcgccgagctggtgctgaagggcaagggcccgggcaacgtggagtgggtggtcggctatgacgccaaggccgacaagttcctcgacaccaacgtgaagtacaagctgctgggcaacgccaaccacttcctgcagctgggccagttcaagcagcccaacagcctggaagaactgtccagcaccaagaacaacgatttcatttccaaggcagcggtcaccaacacctatgccatcgcccgccgcctgggcggcgcgtacagctacggccaggacaactggtcggtgactgccagcgccttcggccgcgagctgacccgcaacctggcccacggcagcggctacggcgcgcgtggcacctgggccccgatcaatgaaaagggccaggtcctgcacttcggactgagctacgtcaactacgacaccgacgccgacaccctgcgcgtgcgtgcacgtccgaatgccgacctcgccacggcccgcctggtcgacagcggcaacctgaccgacaccgaccgcgtcagcaccatcggtgccgaagcgatgtacttccagggcccgttcaaggcccaggccgagtactacaccagcaaggccaagcgctacgaccacgacaactacaccagcgacggctattacatcagcggcgtgtggaacgtcaccggcgagacctggagctacaagggcggcaccccgggcaccggcctgccgaacaacccggccggcggccagtggcagctgggcgtgcgctacgaccacatggacctcaatgacggcaacctcgccgccaacccggttgccggtcgcccgccgatcgtcgatggcgtgctgggtggcaagatggacatctggaccgtgggcgccaactggtacctgcgttccaacttcaagctgatgctcaactacgtgatggtcgacagcaagaagtacagctccacggcgcgcggtttcgtcaacgacgatcccaacatcctggaagcccgcgcgcagttcttctggtaa

SEQ ID NO: 497512 - DNA, 642 bp, Stenotrophomonas maltophilia
atggctgcagttgcgttgtcatgctccgattcgccgaagctgccgcgcatggcggcgtggctggtggtactgctggtgcatggcgggctcgctctgtggctgctggacagcggccggatcgaactgcgtagcggtgagggcccgcggatctcgctgcattggctgccgccggaaccgccggcgccggcacctcaacagcccgccttgccctccgcaaagatgacgcgtccggccgcatcgatgatgccccgccctgccccggttgcacaggcagagagcgccctgcctgccccgggggacgtggctgcagtggcgccactggtcctgagcctgcctgcgggcagcatcgacggtggtgacggcatcagcgcagctggcgtggcgccgcgcctgatcggtcggcgcgaggtccatcctgcgttcgggcctcgccgcaattacttccggatccgtcggcagatgagccccgagcagatcgtgcatggcgtggcgcaactgctggggctttggccgccgggatacatcgtcgacccgtgcgaactgggtaaacaggacatggactatttccagaacgcggtcgaagaagccgaccgcgacatgctgcgtgcggcagtgctgcaggtgagtgcccgctgccggtag

SEQ ID NO: 497513 - DNA, 1614 bp, Stenotrophomonas maltophilia
atggcgcgttcaagcaacccgcacggccgctgccatgtcacgagcaagggaggctcgggtttggaccgattcaagaaggcagttgaactgagcttccgtatccggccagccggcatcgcactcgcggccgtctatgcgctgagctgcctcggctcgcgtcagttttcgctggatcagttcttcctgccggcgggcatccgcgcagcggcactgctgatcgtcccgacccgcctgtggccctacctgctgctgggcgagtacgcgtactttgcaacgctgcgcatccccatgatcgacacctacggcctggattgggtcatcctggcttcgacgctgctgatgccgatggcgatgctggtggtctacctgcatcggatgagaataccgtccgaagcagccaccggtctgtggctgctgtcgctgtcgttctgcacagcgttgttcgtgccgggtctcaacctgggcatttcatatgtcctatggtccaacccaccgcccagcaacctgctggacgcggtcgaccggacgatctttggccacttcgccgccatcatcaccctggtaccgttggcattcctctggtcgcggcggcaggccgaccccggttggacagaccgtttcgtcgcccctaccgcctcggcgatcctggtgatgctggtgctgggcctgtgcatgcaattgacacgcgccgacgcccacacgacgcggacacacatggtgctgctggccgcccttcccgccatcgccctgaccttcatgcacgggtggcgcggcgcagccatcgcgattccgttgttgaacctccccctgcacggcgcaacgcccagcactggcctgccttcctcgttcgacctgggcacgttcgccacccaacagaacatggcggtgatgagtgtcgcactgctggcactcggttccagcatcagctatcaccatcagcgcgcccggtcccgcggcctggccgaggcaaccacgctgcgcctggcacgcggctcacttcagaccagcgagcgtgagctgcgtgaacgggccgtccacctgaagcacctgggcgagggcatggacaattcgctcagcgagatggtcagctggctgaagtcccaaggccaccatgcggtcgcaaacagcctgcagcacgcgtcgtcggtacattcacggctgtttcgcgaacaggccagcctggtctatcccaccggactggagcaggtcgggctctacatcgcgctgcaagccggcggtgcatgcgaaatctggaacaacacgcatcgcgtcattccacccaggctggcgggcaatccctgcctgctgaccgtggatctgcaactggccatctatcgctcgctgatcgaggcggtttcacttctgctggaactggaaaccgggcaggtctgcgtgcgcgcccgaagcggtcgggcaggcaagcatcgcggcattgttgccgtggtgagcctgctcgaccgtggttgcccgctttccacgcgtaccacccaacaggccgtcgagcgcctggccggacggatgcttgcctacggcggaacggtccactgccgcggcaatcggctgcggctggtcctgcatgaaccgatcacccacgcgtcgccagcggcggcctga

SEQ ID NO: 497514 - DNA, 1605 bp, Stenotrophomonas maltophilia
atgcagtggtggaaggacggcctgctggtgaggatacgggtcagccccgaagggctggcgctggcgctgctctatgccctcgcctgctggggtgcgcgcaagctgtcactggaccagttcttcctgcctgccggcgtgcgggtggccgcgctgttgctgtgtccgccccgtctttggccctacctgctgatgggtgaatacgcctacttcgcgcatctgcgcatccccctgatcagcaaatacaacctgacctgggtaattctggcctcggtgttcctgatgcctgccgtgatgctgatcgtgcgcctgcaccggaaactgctggcacgcaccacgatcgtcggcgtgatctccattgcggtatgcgccgcgacggtcatcagtctgctcaacctgggaatctcgtacctgctctgggagccgttgcagaacgcgtcattcatcaccaacgtattgcgctatgcgctgggcgacttcaccggcatcctgatcctggcacccctggcattgctgtggatccgccgcgccgaggaaaaatggacaaccgggtctgtcgcggccacggtcgcagcactcggcgccatgctggtcattggcctgcaggcgacgccggtaccggcctcgatcacggcccccggctcgctgcagctgctgttgatcctgcctattcccgcgatcgccctgacctgcctgctgggatggcgcggtgcggccatcggtgtcgccgccgttaacatgattcttggcctcagcacccccgccgaccatccgaccgcattcgacccggctaccttcgctacccagcaggccatggccatcgccagcatcgccctgctgttgctgggtgcgcgcatcacccacttccagaaccagcaccggctgcgcgaggaagatggcagagcggccctgcagcttgcgcggaactcacacctggccagcgagatggacctgcgtgagcgcgcggcccatctgcgccagctgggcgatggcatggacctgtcgctgaacgaaatggtgaactggctgcatgcgcagggtcatcacgccgtggccgacagcctgcggcatacctcggaggtgcattcgcgcctgttccgggcccaggccagcatgatctatcccgccgccctggaacagctgggcctgtacgtggcgttgcaggctggcggggtgcgcgaggcatggaatgctacgcatcgcatcggccagccgaggttgaagggtgacccctgcgcactcggggtcggcctgcagcttgctgcctatcgactcgtggtcgatgcggtctcgcttctattgaagtgcgagtgtggacagatctcggtcagtatccgctgcggaagctccacccggaagcgtggtgccttcatctgcgtggctcttctggaccgccacgcatcactgggaagccgtgcaaaggcgctggcaaacgagcagctgctgggccgagtgctcgcacacgctggccacatggacctgagtggcaacaggctcaggatggtgttgaccgaagcacgggacgctccccgccaggcaggcgctgctgaagccttgagggaaagcacacgctccatggacgctggcgccccccgggccgcgatctga

SEQ ID NO: 497515 - DNA, 762 bp, Stenotrophomonas maltophilia
atgcgccgcctgccctgggtgggcctgcccaccgacagcaccgtgctcggccatcaccgtttcgcggtggctggcgagaagtacgtgcgcgcgctggtcgaggccgccgaggtgaccccggtactgttgccgagcatgcagccgccgctgccggccggcgactggctgcaggggctcgatggcctgctgttgaccggtgcggtcagcaacatcgaaccgcagcattacgacggcggtcgcagctggccgggcaatccgcatgacccggcccgtgacgccaacgcgttcgcgctgctgcacgaggcgctggcgctggacctgccggtgctggcgatctgccgcggcctgcaggagctgaacgttgcgctgggtggcacgttgcatccgcaggtgcacgcggcgcccggtctttcggatcatcgtgaaaacccgaaggcgccggttgatgtgcagtacgggccggcccatgcggtcgccctggcggcggatggctggctggcgcagtggcaaggcggtgaccgcgcacaggtcaattcggttcacgggcagggcatcgaccgactggcacacgggctgcaggtcgaggccagggccgatgatggactggtcgaggcagcgcgcagcccacgccatcgtttcgtgctcggcgtacagtggcacccggagtggcgtgtcatggactcgccgttctatcacgctattttccgtgcgttcggccaagcttgccggcagcaccaacagaaccgactggattcccgatga

SEQ ID NO: 497516 - DNA, 1401 bp, Stenotrophomonas maltophilia
atggccctgatcaaggccttgcatggacccacactggtgatttccccggacagcccctctcctttcccgccccgcctgccgggctccctgcctgcaaggctgccgctggtcatcatcggcgccggccaggccgggttgtccctcagcgcgctcctgcaggaagccggcgtcgagcatcgcgtgctggaggccgaaaccgtaggcgccagctggcagcggcgctgggagtcgttccagaccaacaccgccaacgcgacgatggccctgcacggccatgcctatgcgggtgacgacccggaaggcttcatgggcgccccggaggtgatccggcacctccgcgactatgcccacgagcgttccctgccgatcaacgagggatgcggggtgcatcgggttgggcctgggcccggtggctacgccatccacagcagccaggggctgatccatgcccgcgcagtggtggtcgccaccggtgaataccgccgcgcacggatgccccgggtcccgttcgcgcccgcgccaggcctgaccgtactgcactcgggcgactaccgcagtgcccgccagctgcccgatggcgccgtgctggtcatcgggggtgggcagtccggcgcgcagatcgcccaggacctgcgcgacagcggtcgcagcgtgcactggtcactggcccagcggcattcgcatacccgccggctgcgcggcaaggactcgatgacctggtgggacatggccgggcgcatccatcaacatgtgagtgaagcggcgggcgtacttgccggggaaccggatgcactgcgcaaggcccgcaccgcagagttcccacttatttccggcaagggaaacggtggcctgggcagctcgatcagcctgctggcgatgcaccgcgcgggcatcaggctgctgggccggttgcagggcttcgatggaaacgtcgcccgcttcgccgatgtgcgcccgcagctgcgtaccgcgatcgaggccacgcggggcgagtacgcttatctcgattcgctggccagcgcgtactacgccacgcgtcccgaaccacgcaccgacgatgcccgctacattccggaggaggtctatctgcactgggaaccggacgcatccccgcgcgaactggatctgcaggcggaaggcatccgctcggtggtgctggccaccggcttcgtcgccgaatggccctggctcgacgtaccgggcgcgctggatgcacatggctacccgctcggcgacttcggtgtttccccgcaaccggggctgttcttcatcggcatgcacaacctgcagcggatgagttcatcgttcctgtgcaacggcggtcgcgatgcgcgcgacctgctgcctgccatcctgcggcacctgggccgaagcgggagtaccggcatcgaccctgggtaa

SEQ ID NO: 497517 - DNA, 1365 bp, Stenotrophomonas maltophilia
atgaccgtcgagatcgtcgacccggccaccggacaggtgacctaccgccatgaactgatgggcgcagccgacatcgagcagcgcctgcaggccgctgcccatgcatttccgggctgggcagatcgctcgctgcaggaccgcggcgccatccttcgccagatcgccgcgcagctgcgcacgcggcgcgacgacctgcagcaggcgatgacgcacgagatgggcaagctcaaggccgaggcgctggccgagatcgacaagtgcgctgccgcctgcgagtactatgccgaccacgcggccgactatctcaagccgcagctgatcgataccgaagcccagcgcagctacgtgcgctacgagccgatcggctgcgtgttcgcggtgatgccgtggaatttcccgatctggcaggtattccgtttcctggccccggcgttcatggctggcaacgtcgccctgctcaagcacgccagcaacgtgccgcagtgcgccgacctgatcctggcggtgtgccgtgacggcggcctgcctgatggcgtgttcgacgtgctgcacatcgacaacgaccaggccgccgacgtgcttcgcgacgcacgggtgaaggcggtgacgctgaccggcagcgagcgggcagggcgctcgatcgcctccaatgccggcagccagctgaagaagtcggtgatggagctgggtggcagcgatgccttcgtggtgctcgacgatgccgacctcgacaagaccgtggccgcggcagtgaagtcgcgcttcgacaacagcgggcagacctgcatcgcggccaagcgcttcatcgtggtcgaggcggtggccgatgaattcacccgtcgctttgtgcaggcggcgggcgagcgccagtacggcgatcccgatgagcggggcaccacgctggcgccgatggctcgcgccgacctgcgtgacgaactgcacaagcaggtgcaggccagcgtggccaagggcgcgcgggtgctgatcggtggtgagccgattgccggcacccatgccggctatccggccacggtgctcgaccaggtcggcccgggcatgccggcgtatgacgaggagctgttcgggccggtggccgcagtgatccgggtcaaggatgaggccgaggcactgcgcgtggccaacgacacccgcttcggcctgggcggcagcgtgtggaccggcgatccggtacgcggcgagcgcttcgcgcagcgcatggaatgcggtgcggcgttcgtcaacgccatcgtcaagagcgacgcgcggctgccgttcggcggcagcaagcagtcaggctttggtcgggagctggctgaccatggcatccatgagttcatgaacatcaagaccgtctacgtggcttga

SEQ ID NO: 497518 - DNA, 609 bp, Stenotrophomonas maltophilia
atgaacccagggaacagcttcacgacgtttgcgatggccgccggcctgctcgcgggcctgctggtgctgggcgctcacaccgtgcgccgcatcagcgcccgcgaccccggcggcaggcactggctgctgcgcagcctggccctgctgtcgcccgtgtgcctgctggccgggctggcgatcggcatgttcggcccgcacttcacaggtagagcggaacccgcccacctgccggggctgtgggaaacgtcgatggtgctgatactggtcggtgccttgaccctgccagtgctgtggcgaacgctgctgcagcagcggtttggcaggccggtcaatgcactgccgttcttccacgccagccgcacctcgctgctggtgctgttcgtgctggccgtgatctacatgaaagtggccaggacagccgcggcggaactgatgccctggctgaccagcccgggcctgtggccggcggtggcgcgcatcgcggggcaatcgatgcaggtcgccatgcttgcggtcgtgctgactctctcactgatggtcgtacggcgggcgatgaccgatttcctgcgccttctcagcgggctgttccgacgctcgccggggctatga

SEQ ID NO: 497519 - DNA, 609 bp, Stenotrophomonas maltophilia
atgaccctgcccgcacttgtgcttgccgcgctactgcagtccggggcaggcctgatgcccgatcctgaccgtccctcaccgttccccgccagcgacagcgaggccgacatcgccgcaaagatcgccgaactacgggcgttcttcggcagcagcgagcgcgacacccgcaacatcgtcgccactgcccagcaacgggcactgatcgagcgcctggaagcgcggcacgcggcacgtctggccggcatctgggtggacaatgcgaggggctggaacgttgtcgtgcgactgacaggcgccgcacccgaggccgatgagacacatccaggggcggatggcccgcaacgtgtgcgctacatcaccggcgccgcgatgaccgaagcggagatgacgcgccgcctgcacgcacagcaggactggctgcgggcccagctgcccgacctgttaggccatggcctggatgtcaagaccggggagctggaggtggagctgcgggataccccagccaaccgcgcgacggcggcggccgtgcgtgaccacctgcaggcgcgactgggctacccggtcaggctgcgctggtacccagcggccacgcgctggagtccgccctga

SEQ ID NO: 497520 - DNA, 3306 bp, Stenotrophomonas maltophilia
atgacccacccactccggatgtccaagctcacccttggtctcgtggctgcgctcgccgccgctcccgccttcgcccagagcacctctgccggtgtcggcggccaggtgatgtctgccgcaggccagcctgtcgccggcgctgaagtcaccatcacccacaccgagtcgggcaccgtttcgcgtgccaccaccgatgcgtcgggtcgttacgctgcgcgcggcctgcgcgtgggggggccgtacaccatcaccatcaccaagccgggtgaaggcaccaagacggaagaaggcgtctacctgaacctggacaaggtcacaaacgtcagcaccgcgctgagcggtgacgttgccaccttggattcggtcagcgtcgttgcctcgcgcctgccggaggcattcacccaggacaacaagggtgttgcgaccaatctgagccgcgccgacctggaccgcaccccgagcccggatcgttcgatccagaacgtggtacgcatggatccgcgcgtcgtggtgactgaccgtgaccgtggcgcgttctcggccatgggccagaacaaccgctacaacagcatcaccatcgacacgatcaacgccggcgacccctttggcttgaacgacaacggcctgcctaccaagggcacgccgatctcgcaggatgcgatcgaaagctacaacatctccaccgccaacttcgacgttgccacccgccgcggcgtcggtgcatgggtcaatgccgtcaccaagagcggtaccaacgatttccacggttcggcgtactacgtgtaccagaacgccgacgacatggtcggcaagagccagaacggcgccaagtggactggcttcaccaaggacaccaccaaaggtgccaccctcggcggtccgatcgtgaaggacaagctgttcttcttcgcgtcgtacgaagaaagcatcaaggaaagcccgggggcactgtggggcgcccaggattccgacgccgccagccgcgtgcgtggcgtgaccaacgccgacctggcccgcatcagccagatcgcctcgagctacggcatgaccgccggtgataccaccgcgtccaacgccgatatcgagagcaagcgttacctggccaagttcgactggaacatcaacgatttccaccgtgcaagcctgcgcttcagccagaccaaggaagatgagccgatcatcaccaccagcttcaccgaccagctgaagctgtcgagcaactggtacgtggtcaacaagaagagcaccagcaccgcgctgagcttctatgacgattggtccgagaagttctcgaccgaagcctcgatcggctacagcaagttcgaccaggtgcgcaccccgctggtgggtggctaccagccggaactgaccatccgcaccagtgggctggatacgggcagcagcgtcgtcctcggtaccgaggcttccagccaggccaacgtgctgggcaccaagtcgtggaatgcctacttcgctggcaacctgttcctgggtgaccacaccatcaaggccggtttcgactaccagcaggacgaggtctacaacttgttcctgcagcgctacaacggcacctacgagttcaactcgatcgacgacttccagaacggcatctatcgccgttatcgcctgaaccagccggccgccggctatgacctgggcagcgatgtcgccgcgcagttcaagctgaagcagtacggtctgttcattcaggacacctggcaggccaccgaccgcctgtcggtgcagtacggcctgcgttatgacgtgccgaaggtcagcccgctgccgaccctgaacccgtgcttcgccgctgatccgggtcgcctgggcaatctgtcggtctgcggcctgcgcaacaacccggccaatgcgaacgccgctactggtggcttcggctacgccaacaccggcaccatcgacggcaacagcgtcgtgcagccgcgtgtgtcgttcaactacgacttcgacaccgatcgtccgacccagctgcgcggtggcgcgggtctgttcatttccaacactccggcggtatggatcggcaacccgtactccaacaacggcgtgtcggtcacctcgtacgacgtcaaccgtcgtaagaccgcaaccgatccggcgttcagtggcaatgccttcggccagaacattccgggtggctcggtgaccccgccgggcctgggcagctcgaacatgacggtcaatgtcgtcgacccgaatttcaagctgccggccgtgtggaagtacaccctaggcctcgaccaccagctcccttggcaggacctggtcttcaccgctgagtaccagcacctggaagtggacaagggcgtcatctatcgcgacctgaacaccggcaccccgaccggcaccctgccggatggccgctatacctacgcccgcgacccgaagggcgcgccgggtagcgcgaacaccgtgaactggaacaagaatccgtcgttcggcaacgtcatcctgctgaccaacaccgacaagggttcttcggacaacttcaccgtctcgctgaagaagccgttcaatggcagctggagcggcatggtggcgtacacctacagccgtgcgaaggacgtcaacccgggtacctccagcgttgcctacagcagctaccagaacaacgcgtggtacaacccgggtgaggacgtggcctcggtatcgaactactcgattccgaaccgcataatcgcctcgctgagctgggaacgtaagttcttcggtgactatgccacccgcgtgtcggccttctatgacggccacagcggcgcgccatacagctgggtgttcggcaacgacgcgcagggcctgggcatctccggccgttcgttggcctacgtgccgaaccgcaacgacatcgtgtgggccaacgcgacctcggccgccatggctgagtcgttctggagctacatcggcaacaacaccgacctggccggtgcgcagggctcggtggcccgccgcaacgccagccgtgcgggctgggtgaaccagttggacatgtccttcagccaggaaatcccaggtttcatgaagggccacaagggtgagatccgcctcgacatgttcaacgtgctgaacatgatcgacaagaactggggcatcgagcaccgcgccgacttcccgctgacccgtcgcttggccaacatgtccggtgtcaccgcagatggcaagtacatctacgacatctccggcaccgactacaaccagagcggcacctactcgccgaaggctctggcggtcaacgagtcgttgaacccgtcccagcgctggtcggtgctgctgacgttgcgttacaccttctaa

SEQ ID NO: 497521 - DNA, 516 bp, Stenotrophomonas maltophilia
atgtctttgcgccggcaaaacggcttcacgctgattgaactgatggtcaccatcgccgtgatggcgatcgtggccgcgatcgcctttccaagcttccagagcacgatccgctcgaatcgcgtggcctccaccaacaatgaaatccttggtctgctcaatctggcccgcagcgaggcgatccgcagcaatcgtggtggcggagtctgcggcagcagcgacggtgtcagctgcgacggttcctggtccggcggcatgctggcatatgctgatgtgaacggcgatggcgcattgtcatcgggcgaaaccgtcctgcgcttcgttggtggaaatccgaagctgaagatcaccgggccgtcggcagttgttgccttcgacggacgggggcggcgccgggcgagcagtgaccaggaaattcttctgcagccggatgtctgcagccagggcgcgccgcacaagcgcacattgatggtgaacgcctccgggcagatccgcagcaccaaggacgcctgcccatga

SEQ ID NO: 497522 - DNA, 474 bp, Stenotrophomonas maltophilia
atgaagagctgctcccctcgcgcacggcagtccggcggcttcactttgctggaggtgctgattgccatcatcgtgctggcgttcggtctgctgggtttcgcgctgctgcagacgatgaacgtccgtttcgtgcagagcgccaattaccgcacccaggcgacgaatctcgcctacgacctgaccgagcagatgcgcagcaatcgctatcaggcggcgtggtacaccaacgcgtcgtttgccgctgccagcaagactgcgacaacggcatgcaccagtgataccggtgacgtttccattgagaagaagattgctcggtggcaatgccaggtggtgaaggcgttgggcgacgatgcaggtgccgaggtcacctacaacggtggcgtggtcagggttgccatcacatggggtgaccagcgctgggatccggatgatccggacaaggccaccacctttgcactggctacggagctgtga

SEQ ID NO: 497523 - DNA, 1161 bp, Stenotrophomonas maltophilia
atgcgcaagaaccgtcgtgccgcgatggccggtctatcgctggtggagctcatgatcgcgctggtgatcagcctggtgctgatgctgggagtgatccaggtattcattgcctcgcagacggcctctcggctgtctgaaggagcatcgcgtgtgcaggagaatgcgcgctttgcgctggacttcctggagcgtgacatccgcatggccggtcacatggggtgcgtcaatgaccaggcgcatgttgtgaagaaccaaggggatcctgtttcacatctgggggcctcctctggcgacggcagtcctctggatttcagtgtctccatccagggctatgacgctccggggacagcgccggggggcaatcttgcactgggtgctgcatgggcggcgccttcaaagctgcccgcggcgatcaccaagctagttccggccccgacgggtgggagtgacgtcctcgtcctgcgttacctggccccggagggagtgccggtgacagccatttctgccgatagcggcaacgcgctgctggacgttgacggcaagggtgtgggtcggctgagcagtggcggggccggcgcacccaccttgttcgggatcgctgactgcggtcacgcagatatcttcgcaggaaagctcagcggcgcacgcatcaccgctgcatcagtcgatctttcccgctatacggcgcagccaacagggcaggccatgctctacagggccgactcgatggtgtactacgtcggcatcaatccggagacgaagcagccgggactgcggcgcgcacgcgctgggagcgacggaagttacgccatcaacgaggagctggtggaaggcatcgaaagcctacaactgttgtatggcctggacagcacgctcgacatcggcctgtcgacaccgccgacaggcaacattacccagctggctgctgcaggaggcgtcagcgtggatgccaatgcgaagggggccgcgcaatggctgcgcgtcgggcaggtgcaggtggggctcctggcgcgtagcccgacgcctgcgtcttcgccgggggctgcaaatgcgctgtcggtgctcggcgtgagcttcgccaacagtgacaagcctgatggtcgctaccgttccagctacgaagtctcgattgccttgcgcaatcgcctgttcgggaattga

SEQ ID NO: 497524 - DNA, 519 bp, Stenotrophomonas maltophilia
atgaaaacccttcctcggtccttcaggtcggtcggtgcctcataccggcagcgtggcgcggtgctctatgtcgcgctcatcatgctcatcctgctggcattgctgggcattgccggcatgcaggtggccggcctccaggaaaggatggcagcgaactaccgtgcggccaatcgcgctttccagaactccgagggcgtggttcgcgcagccgaacgcgccgtggaagggatcgccaaccgtacaggcgatggcagtggtggcctggttcaggaatccagcatttccaccaagtgcgacgacggattcgatccggctgcatgggctgctgaacgcgccaacgacaaggctgcagcagtgaatgtgcgccagatcgatgcttgcatcatcggcgagtcttcgctggacatgggcaagccattggaaaaggcacttccggtctatcagatcaccggtttcgccacggatgatgccgacgcggcgtcgtccgctgtggtcatcgacaccgtattcaaactttga

SEQ ID NO: 497525 - DNA, 3765 bp, Stenotrophomonas maltophilia
atggcttcgcgcacgttccgttggatggtcgcaggcagcaccgtcgtgttgtttggcggcggctacttcatctacagcctgatggccgcacaggggcagggcacgctggcccaagcgccgctcaacatcgaggtacagacgcctcctgcattcgtaatggcgctggacgattccggctcaatggtgtgggaaacgctgaacaatacccgcgatggtgtctatcactggattgacgggcggggcttctacaacggcagcacgccgtacgggtacgatcagccgaaaaatgccaccagccttcgctactactacttgactccgccctatgggcggggaaactccgcaattccaccattggatgccttcgggttcgcccgctcgccggacatcaacggcgcatacttcgacccacgcgatgactatcctgcgtggaaaaccggctcgagcgacccggctaagatggactacatgaccatcgatccgacggcggcccccgtcgatccgcggccaagcggcagcagcggaactacctcgcttgtgcgtaatctgaccacgaccgagacgcgactgcagaatgactggaagttctcgctgcgcagtggcatggtgctacccaaagggacggtgatccagaggtacaatttcgtatgcaccaccaacccgtcgatcgatgatcgaaacaccacggtcgacggtagttggcggagactggatcgcgatttcaccgtcacccgtgagtgcgacgcgtccttccagtacttcgcgcccactttcttcctggtcgacaagcgcacattgcctgctgcctacggctacaccgccgatccggttgcggtgaccgatccggtgggggggcgaccgggcacgttgtacaagtatgagatccgaccggagaacttcagcggtaccaatgagtacaaggcggcgatcaataatttcgcccgctggttcagcttctacaggacgcgccgtgaagcgttgatcggtgcggccaccaatgcgctgcaaccggcaacgaacctgcgggtgggctggttccggatcaatgaccggacccaggcaaagatgtatgacatgtcggctgagtcggagaagatgagcctgctcgccgacatcaccctgaagatgcgtgcttccagcagcacacccaatcgtcgtgcggtggatttccttgggcagcagttccagcggaccaagtcctctaccgaccccagtcctcctgttcttctttcctgccagaagaacgcaggaatgttgttcaccgatggctacatcaacgacgactacaccgccaagtcgatgactgcattggcgttgccgtattacgaggagagccttgtttccgggctggagaagtactcggtaccggtgccttccgagtgcaacggcagcaatccggacccaagcctggactgcaagaccaacctgcatatgaacttctatggcgtgaccttggggacgttgggcaacctctatggtgtcacttatgtcccggatcccaagaagccctggctggtgtcccctgatccttacaagaacccgccaaagtggagctcggcgatcgagaatctgaccccgaacgcggtggatgagatgtggcgggccacgctggagacacgtggcgagatgatgaatgccacacgtccgggtgagatcactgcagcgatgcggcggatcatcgagaacgtgtcggcgggcgcaaccccgtcgggcacgcagtcgctgactggagcgcgtattggtaccggttcgctaaccgtggaacccttctacgaggcgaccaacaacagcactgactggtacagccgtctgaccgcatattcgctgaaggtcgatgccacgacgcgcaaggtcgtttccacgcgtgcctgggaggccagcgagaagctgcccgcagcctccagccgcaacatcctgtactggaagaatggcaatgccgtggacttctcggatagcaatgtgagccttgctgacctgtgcagcaagccgaccgggctgtacggcaacatggcctactgcgcgaccagtgagatcaccgatcttgccggcagtagttctgccgcgatcgcttacctgcgcggcgatacctcgcgcgagaagcgcaacggcggcaagctgcgcgaccgcacgaccgtgcttggcgacatcatcaactcgggcccggttctgagctctccgaccgacgactacgggtaccgtaccctcccgggcatacttggaaccacgtatacggcctatctgcaggccaagcgcaaccagcgccgttacatggtctatgcgggcggcaacgacggcatgctgcatgggttcgatgggggcatgacggccgatggcgtgcaggattccgatggtggcaaggaggtattcgcctacatcccatccacggcgattgggcacatgggcaatcttctgctgccccatgatccgtccaagcagaacaaccagcgtttccagcatcgctattacatggatgggcccgtggttgtcggcgatacctataacggcagtgcgtggcagacgtcgctggtcgccacggcgggcgccggtggtcgcagcgtgttcgccctgaacgtgtccacgccgggagcgttcgcggcgggcagcctgatgtgggagatcagtgacctcaacagcaacctcgatgtgagtgtccgtgacaacatcggccacgtgctgggcaagccggttatcgtaccgctcaaggacagcagtggcgcggtcagctggaaggcgatctttggcaacggctatgacagcaagagcaagaaggcagtcctgttcgtggttgacatgcagcgggcagtcggcgcgagttctcccggaatccggatgatcacagcggaggaaacgggaaccagtctcccggccggcagcaatggcctgggcaatgtggtcgtggtcgatcgatggggtggagcgggccagtccagtcgcgtccgggatggctttgccgacacggcgtatgcagctgatcagcgcggtgcggtgtggaagtttgacctgcgcggtacggccaagccggcacgcccggttttcaccacggcaaccagcgtcgattctgccgacaggttgacctaccgccagccgatcaccggcggcctcacggcgactgcgggcccctccggtggcgtgatgctgctgttcggaacgggcagcttctggtttgccggcgatcaactcgacaaggcggtgcaggggctgtatggcgtcaatgacgtatccgatgcagatccagcgacgaccctgactccggccaatctgcgccgatatgcggtgaccagcacatcagcgggcgtacgccagctggccgccgatacgccaccggcgaacgcacgaggctggcgggtcgagctgcctgcgggtgagcgtgcggtgggttacccgacggtcgcatccggtatcgtgttcatccccacgtatgtcccggcagccagtgagcagagctgttcagtgggcggagcgaactggctttacggcctgtcctccaatagcggtgagccggcgttgtcgcaggtccggcagggtgcaacgaagccggtcgctggaaccgcggcggtatcgctggccaccggtggcagtgcacccgtgcgtgatgtcaatctgtccatcattcccaggcttgcgccacctggcccgggcaagcccggcgatccacctccgacgcctcctggtgacgtgtgcctgatgcagatttcggtagcgggagctgagccgatgtacctgccttatccctgtggccgccagtcgtggaggcagatccagtga

SEQ ID NO: 497526 - DNA, 423 bp, Stenotrophomonas maltophilia
atgcgcagagcactcgcagcgggcggcatggcccgcggtttcagcctgatcgaactgatgatcgtggtggctgtggtggcgattctcgctgccattgcctacccgagttacggcgagcacgtgcgcaagtcccggcgggcccaggtcaaggccgatctcgtggagtatgcgcagctggccgagcgttatcacacggtcaacaacacgtatgtcggcttcaagttccccggcaatgcagattcgatcagctctcctcgcgagggcggggcggcagcctataccctgtcgatgaagacagcgcagtcgacgtttacttttactgcgacggccgccaactcccaggtgaaggacaagtgcggagacctgacgctcaaccaagccaatgtgaagacgtccaaaggcacgctgtcggaatgctggtga

SEQ ID NO: 497527 - DNA, 537 bp, Stenotrophomonas maltophilia
atgcatcgcactcccgcccactgtcgttcagcaccacgcggcatgcatctggtcgagatgctggtggtgatcgcggtgctcgcggtactgctgacagtcagctggcctgccatgcggtcaatgctgttgcagcagcgatcggaatccacccgtttcaacctgcaatcgggcctggccacggcacgctcacaagcgatcacgcggcgagcgctgatcggcctctgtgcgagcagggacggccatcaatgcggcagcgactggagcgagggctggatcgtgtacaagacagatggcggtcgaaagcctccctcgtccgtcaatgccattctcctgcatcaggcgggtcacccgaacatcagtatccatgccaccagcaacagcggccggccacaactctatttccaaccggatggccgaagccccggcgccaacctgacactacgtatctgcgcggatggccgtgagcgttcgcgggtaattgtcagcaacagcggccgcgttcgatcaactcggtcgcaaaccgaccaaccctgctga

SEQ ID NO: 497528 - DNA, 333 bp, Stenotrophomonas maltophilia
atgccgatgcttgccctgctgctgttgtgcgctggcctgttcggccgcgatgccgacgccggggatgcctccctgcgcagccagatcctgcaggccgacgccgggcaggcgggcgtgcccgcggcacatgaccagacaccggagccgacggccctgcagttgtaccggttgcgccaggaccgcgtgctgcgcgtgggcaaccagcgcctgcctgcaggcggccagcagcatcaggccggttcagcacgtttcgcgcaggtctgggaacgcgtggacgggcactggcggctgcagcgcatgatcagcatcgacgaatggcttgcccagcgctga

SEQ ID NO: 497529 - DNA, 189 bp, Stenotrophomonas maltophilia
atgatcggaaagaaagtgctttcgtccgtcgccggtatcgtcgttgtcgcggccatggccttcggcgccagccaggccttcgccgtctcgcccaagaccggatatgcaccgggctgcgaaccacacccgcagtgcccgttcggcaacgcgggcaagcacggccagctgctgtgctgcgatccgttgtaa

SEQ ID NO: 497530 - DNA, 570 bp, Stenotrophomonas maltophilia
atgctcaagcgcgtcctgttccccgttgtcgccctgctgctgtccgtgctggtcatcgcgctcggatggcagaaccgccagctgcggcagatcaatgagcagatggccacgcagctgcaggacatgcgtcttgcagcacatggcctcgaactgggtagtcgcccggatgcgctggcgctgcgcaccacgcagcagactttcgtcgatatcggcggtgcccgcgaggttccgcagatcctctatttcttctccaccgcatgccgctactgcctggcctcggtaccgcagctgcaacagatcgccgcggcccgcggcaacagcgaactggtcggtgtcggcatgccgccatacgaccagctggcggactacgccggcaaacatgcactgcgcttcccgatcgccatcgacaacgaagccaccgcgtccacgcgctatcgcgccaccgtcacgccgatgctgatggtgctggctgccgatggccgcgttgcctacaagcatgtcggccagctcgacgcccaggtcgtgcaggctgccgtcgcgtcgcttgcaccgaagccggcgctgccctga

SEQ ID NO: 497531 - DNA, 141 bp, Stenotrophomonas maltophilia
atgagcgatcatgtgccggtttccaggcccaatccgttctttgaactgctgttcggcggcaacatgctggaaggtacgttcaaggcagtgatctgggtcgccctgttgtccgctgtgctggcctggaccacgttccgctga

SEQ ID NO: 497532 - DNA, 2400 bp, Stenotrophomonas maltophilia
atggttcccgatcgatccgccccggccctgtttggctttggctgcgctgcaggcctggtgctgggggcgctggcctgcgtgcagatgccgatgttgctgccgctgtggctgagtgtgccgatggcgatcgccggcgccggcggctggctgttgccctggcgcggccgtgcctgggccgcggccctgctcggcctggcctgggcaacggtgcacgggcactgggtcctgcatggccagctgccacccggcgcgccaccgcaggatgtgcaggtgcggggcagggttgctgaccttccccagcaggggcccggctacacgcgtttcgtgctgcatgtcgaagatgccggcgcgctgccatcgctgcgtggcaagcgcttgcaggtgacctggaacgacccgtggcgcggatcgccagcgcacgaggcggagggcgggcgccatgcggttcgcgcaggatcgcattggcagttgtcgttgcgcgtgcgcgcgccacgctcgcggatcaatcccggcggcttcgatggcgagcgccacgccgtgctgcggggcatctccggcaatgcctcggtgcgtgatccggcccgtgcgcgggagtggctgccggcgcagggcctgcaggcctggcgggaacgcagcagtgcggcgatcgccgtgcaggtggcacatcctgccgcgcggttcgtgcaggcgctggcactgggcgatacccgtggcctgtccgatgccgactgggaacacctgcgcgcgctgggcctgacccatctggtcgccatctccggtttccacgtgggcgtggtggctggcttcggtgtactgctgtgccgcttgtggtggtggctgtgcccgctgctgggacggtactggccacggccgcaggccgccgcatggggagcggcgctggccgcagccacctatgccgtggcggcgggtggtgcgctgccgacggtgcgcgcggcgctgatgatcgggctggttgcactggccagggccgggcgtcgcccggtgggcgcagggcaggggctggcgttggccgcgatggtgatgctgttgcctgcgccgctgtcggtgctctcggctggattctggctgagcttcggtggcgtgctgtggctgctctggtgcttgccgaggacggggccggagggaatcggtggcgggctgcgcgggttccttgccgcgcagggtgttgccagccttgggctgctgccgctgtgcatcgccttgttcggcgggaccgcgcggctggggccgctggtcaacctgccggtcatcccgtggtggacaatgctggttgttccgctgtcgctgctcggtaccggcctgcacgtgctgcatgacggcgcggggcgttgggcctggcgtgccgcggcctggctgttcgagctcagctgggaggccctgcagccgttggcactgcatccgcaggcgatgtggtggctggccgaggcgccgcgctgggcgctacccgtggccttgctgggcgtgttctggtggctgctgccgcgcggcgccggcggtggcctggcgggcctgctgctgtgcctgccgctgctgtggccggcccggcatgcaccggctgcgggggaactggagctgctggtgcacgatgtcggccagggcacggcggtgctggtgcgcacggcgcggcacgcgctctggtacgacgtggggccgccgactggcggcgagggccacgaacgcatcctggtcccggccctgcgcgcgctcggccaggggccgccccgacaggtgatgctcagccatgaccacctggatcacaccggcagcctgcccagcctgcgacggcagttgcccgggctgcagctgctggcgccaccgggcagcgccatcggcggcgccacgccctgccagcaggggatgcgctgggagtgggacggggttgatttccaggtcctgcacccggcgccgggcagccggcaagccgaaaacgaggacagctgcgtgctgcgcatcgccagccgtcacggcgtggtcctgctgccgggtgacatcggtcgaccggccgagggggcgctgctgcaggcgtgtccgcacgcgctgagggcggacgtggtactggtgccgcaccatggcagcggcggcagctccagtgcgccgtgggttggggcggtgtcgccgcggctggcggtggtctcggccgggcaccggaaccgcttcggccacccgcgccaggaggtggtccagcgctggcaggcgcaaggcgcggaggtgctggccacggccgactccggggcgatccgcgtatggcttggcgcacaaggcctgcagctgcgtgaacagcgcatccatgcatcccggtggtgggatgccgctgggcgggcgcggtcggctgctatcctatcgccgatcgaacaagcggccgttgggccggagggttga

SEQ ID NO: 497533 - DNA, 2685 bp, Stenotrophomonas maltophilia
atgacgcctgtccgccctacccgcctgtccggcctggaacccctggtcatcactccggacctgctgttcatcaacgtcggcgaacgcaccaacgtgaccggcagcgcgcagttccgcaagctgatcaaggaaggccgctacgaagaagcggtggacgtggcccgccagcaggtggcaagcggcgcgcagatcctcgacgtcaacatggacgagggcctgatcgactcggaagcggcgatgacccgctacctcaacctgatcatgtccgagccggacatcgcccgcatcccggtgatggtcgactcctccaagtggagcgtgatcgaggccggcctgaagtgcctgcagggcaagagcgtggtcaactcgatctcgctgaaggaaggcgaagcactgttccgcgagcacgcgcgcaaggtgctgcgctacggtgctgccgcggtggtgatggccttcgatgaaagcgggcaggccgatacctgcgcgcgcaaggtcgagatctgcacccgcgcctaccgcatcctggtcgacgagatcggcttcccgccgcaggacatcatcttcgacccgaacatcttcgccgtcgccactggcatcgaagaacatgacaactatgcggtggacttcatcgaagccacccgcatcatcaagcagaccctgccgcactgccatgtctccggtggcgtctccaacgtctcgttctcgttccgtggcaacgaaacggtgcgccaggccatccattcggtgttcctgtaccacgccatcgccgccggtatggacatgggcatcgtcaatgccggtgccatgccgatctacgatgagctggagccggagctgcgtgagcgcgtggaggatgtgatcctcaaccgccgcagcgatgccaccgaacgcctgctggagatcgccgagcgctacaagggcaggaagggtgcggcgaagaccgaagacctggcctggcgcgacaagccggtggcgcagcgcctggcgcatgcactggtgcacggcctggatgccttcgttgaggaagacaccgaactggcccgacaggcctccagccgcccgctggacgtgatcgagggcccgctgatggacggcatgaacatcgtcggtgacctgttcggcgccggcaagatgttcctgccgcaggtggtgaaatccgcgcgtgtgatgaagaaggccgtggcctacctcctgccgtacatcgaggcggagaaggcgcgcagcggcgacactgccaagagcaacggcaagatcatcatggccacggtgaagggcgatgtgcatgacatcggcaagaacatcgtcggcgtggtcctggcctgcaacaacttcgaggtggtcgaccttggcgtgatggtgccggcgcagaagatcctcgatgccgcgcgcgagcacaacgccgacctgatcggcctgtccggtctgatcactccctcgctggaggagatgagccacgtcgcccgcgagatggagcgccagggtttcaatctgccgctgctgatcggcggcgccaccacctcgcgcgcgcacaccgcgttgaagatcgacccgcactacaaagcgcctacggtgtgggtgaaggatgcctcgcgcgcggtcggcgtagcccagtcgctgatctcgcgcgacctgcgcgaagccttcgttgccgccaacgaggccgactatgccgagatccgggcacggcaccgcaatcgtggcgatgccaagcgcctggtgtcgctggaacatgcacgcgggcacaagttccagggcgactgggggaactacacgccgcccgcaccgaagcagccaggcctgcacgtcttcgatgactatccgctggccgagctggtcgagtacatcgactggacgccgttcttccaggcctgggagcttgccggcaagttcccggcgatcctcaccgacgagatcgtcggcagccaggccagcgagctgtaccgcgatgcccgcgcgatgctcgaccgcatcgtcggcgagaagtggctgaccgccaaggccgtgttcggcctgtggccggccaacagcgtcggcgacgacgtgcgcgtgcagcacccacagggcgagacgaccctgcacttcctgcgccagcaggtggccaagccggccgagcgtccggatttctgcctggccgatttcatcgcgccgaccgacagcggcaggcaggactggatcggcgcgttcgcggtcaccgccggcatcggcatcgatgcccacgtggcgcgcttcgaagccgagcatgacgactacaacgcgatcctgctgaaggccctggccgaccgcttcgccgaagccctgaccgagcgcctgcatcagcgtgtacgcactgaattctggggttatgaccaggccgagacgctggacaacgacgccctgatcgatgagcagtaccgtggcatccgccccgctcccggctatccggcgtgccccgagcacagcgagaagcggcgcctgttcgatctgctgcgggccgaggccaacgccggcatggaactgaccgagagctttgcgatgcttccgaccgccgcggtatcgggctactacttcagccatccgcaaagccagtacttcgtggtcgggcgcctcagccgcgagcaggtcaccgactacgcccggcgcaagggcgtggagcgcgcccaggccgagcgctggctggcctccaacctcgactacgatcccgaatga

SEQ ID NO: 497534 - DNA, 918 bp, Stenotrophomonas maltophilia
atggaaagagcaccactacgacgcttcagccgccccgcccttctgcttggtgcgctcttcgcggccagcagcgtccaggacgcacatgcggcaggcgttctcgtctgcgacaactgtcgcgatccacgcgcgctggcgctgtcctcgggcacggggcccaccatcgtcgccgacttccagcagcgccggatccatggcttcgatgtggaatacgatcgcgagctgcgtcgctatcgcgccaccagggcgcagattcccgggccaatcaacgcatccttcaatcggatcatggggatgctcgacaacaacgtgccaaccgtacagttcgcgccgcggcagtgggccggaagaggagtccagtacgaggttcatcctgatgacccgcaatacgccaacagcataggcttcccggaagagcacaagaacctcaacgcctacgatgtcgtgcagatggcaaccgagcgattcaggctggagagcgccatgggcaaggcattcactggcgccacgacatcgtcgagggcctggaacagcatggcgatattcctgtcctcgatcggcctgagcttcgtcagcaaggccctcggaatcgacggtgcaatctacaggatcacctggcgcgatggctcgaagactacgctggtcatcgtctcttcgtcagtggacaccgccagatacgtgcaaggccagagcaaggacgccaatggcaacatgattcccgacggcgcggcaaccagccccggcctggcccaacacttcgccggcacctacaacttcaacagccgggacgatctggatcgatggatcgactccggtcgcctctatggggtgaacatgttccccggtgctccacctgagtcgctgcagatcgtctgtgaatggaacggaacggatatcgtttgccgattgccacgttga

SEQ ID NO: 497535 - DNA, 294 bp, Stenotrophomonas maltophilia
atgctcatctatcgaggcgcagggctgctgaccctgctcacaccgatcgctgccgtgctgctcatcctcatcctgttcccggatccagcggtaggtcgcggcaatacttcactcagtcaggtcctgctggcgttcggccttggctcggcaatcaacacggtgctgggtttcgtgctcaatcgaaagccgcgtgcacctgggcagcatgctccgcatcacttcttcttcctgccgatgcaatggcctgcactggcgattgtggcggcatgcgtggtgatcgcagtgttacgctga

SEQ ID NO: 497536 - DNA, 2529 bp, Stenotrophomonas maltophilia
atgtccgccacgccgcagtccgctcctgctcccgtccgcgcctcccggcatcccctcgtcaccgtgctgtcgctgctgctggtcgtgttcggcctggtcatcggtggcctcggtgggtggctgctcagcctgggtggctcggcttactacgccatcgccgggctcggcctgctggccagcggaatcctgttgttcggcaaccgccgcagcggcgcgctgctgtatgcgctggtgttcttcggcacgctgctgtggacctggtgggaatcgggcagcgactactggcgctgggtaccgcggctcgggctgctgactgcgctcggcatcgtgctggcgctgctggtgccaacgcttcgcgagccggtttcaaaacgcctgtcgcgcagcgtggcgggcgtgctgatgctggtgttcgtggccgccttcggcctggcctttgcgccgcatggggaagtggacggccacctgccgttcccggaaggcgcagtcagcgccggactggaacctacgcgcgataccacgggcctgcagccggctgaccagcccgccgagggcgactggccggcgtggggccgcagcaatgcgggcacccgctattcgccgctgcagcagatcaccccggccaatgtggccacgttgcaaccggcctggcagttccgtaccggggatatgccgaagaagcgctggggtgccgaaaccacgccgctgaagatcggcgaccgcctgtacctgtgcaccgcacgcaaccgcctgatcgcgcttgatgctgccagcggcaaggaactgtggcggttcgatccaaaggtgaaggatgcctcgattccctataccgctgcctgtcgtggtgtgagctattacgagcagcccagcacgccgacccttgccgacgcagcattggccgatgttgccgctgatctggcgttgccggaaccgcctcccagcgtcacccgcagcgctgcaccgggcagtcgaccggcgtgctgggcgcgcatcattgaaggcacgctggacggtcgcatcatcgcggtggacgcggacagcggccgcccctgcgcgaatttcggcaacaacgggcaggtcgacattaccctgggcatgggcgaggtgccaccgggttacgtgtcgatcaactcgccgccggccatcgtgcgcggcgtgatcgtgaccggccaccaggtgctggacgggcagcgccgcgatgcgccgtcgggcgtgatccaggcgtacgacgccatcaccggcaagctgcgctgggcgtgggacatggaccagcccgagcgcagcggcctgccgccgcgcgagcagacctatacgcgcggcacccccaacatgtggaccactgccaccggtgatgaagcgctggggctggtctacctgccgctgggtaattccgcgggagactattggagtggttcgcgcacggagaaccagaatcgctatgcgacctcgctggtggcgatcgacgtggccaccggcaagccggtctggcatttccaggcggtgcgcaaggatgtgtgggactacgacctgggttcgcaggccagcctgatcgactacccgacggcggcgggcaaggtgccggcgatcctgctgccgaccaagcaaggcgacatgtacatcctcgatcgccgcaacggccagctcctgaccgcggccgaagagcgcaaggtgccgatgggcggcgtcgaacccgagcagcgttctcccacccagctgttatcgctgtaccacacgctgcgccgcgaacatgacctgaccgagcgtgacatgtggggcatcaccccgattgaccagctggtctgccgcatccagttccgcaaggcgtactacgaagggttctacacgccgccgagcagcgagcgacattccatcgagtaccccggctacaacggcggctcggactggggcagcgtgtccatcgatacgcgccgcggcgtgatcgtggccaactacaacgacatgcccaactacaaccggctggtgccacgcgcggaggccgaccggctgggctggctgccgcgcgagaaggtccggttcgacaagggcggtgccgaaggcgcgggcgacccgcaggtgggtacgccctacgccatccaggtcaacgccggctggcggctgccgttcactggcctgctgtgcaagcagccgccctatggcggtatccgtgccatcgacctgcgcaccggcaagctgctgtgggaccgtccgtttggcagtgcgcgcggcaacggaccgttcggcatccgttccggcctgccgatcgagatcggcacgccgaacaacgggggttcggtagtgaccgccagcggcctgatcttcatcgccgccgccaccgatgacctgctgcgtgccatcgatctgaagaccggcaaggagctttggcacgccaagcttcctgccggcggccaggccaacccgatggtgtacgagcagggggggcgccagtacgtggtgatcatggctggcggccaccatttcatggaaaccccgaacggcgattacgtaattgcgtttgcgttgccgaggtaa

SEQ ID NO: 497537 - DNA, 327 bp, Stenotrophomonas maltophilia
atgggccggaagcctccgggactgcagtatgtaggttgcagccaggatgacgcgtcctacatcaaacccatggaagcccactatcgtgtttcaggtgcccaggcggcgcaggtggaagcctatctgcgcgagacatttggcatgcctgcattgcgctacgtctgttgcggctggagcaatggcgcgccgtactactggcgcgacggcccggatacggtgcggtatcagatcggcatgggggtggagtcgctgccgtacgaacgggacgaatggccgcgcatcgaggcattcaacgtcaccgtcgaggtgttgaggcagagtccctag

SEQ ID NO: 497538 - DNA, 1431 bp, Stenotrophomonas maltophilia
atgaaggctgttggacgcctgtttctctgcaatgcgttggcctgtttgatcctggttgccacgtcggcgtttccggcatttggcgcagcatcttccgagcgcgaacatccacgtgcgcaggatgccatcgatgactggcttgcggccttcaatgcaggcagcctcgaggggttgcaggcatttgccgacagatatgcgaagcaggagggcagcactcccaaggactatctcgagttccgcgagagcaccggcccgctgaacgtgctggaaacactcgagcgcgcgcccagccaggcgaagctgctggtaatgggccagctgagcgaacgtgcgatatgggtgacggcggtcatggacccggccaacccgtcgcacgtgaagcagttccagatcgagggcactgatacgccggacaagtacaagccggaacgggttgctttgcccgcgctgatggccgatgccacagcaaaactggaggcgctgcgggcgcaggacgcgctgtcgggtgcattgcaggtggcacggaacggcaaggtgctgctggactggcgcggtggcgaggctgatcgtaccgctggcattccagtgggcgtggatacgcagttccgccttgcgtcctccaacaagatgttcactgcagtggccatcctgcagctgatgcaggagggcaagctcagccttgatgacacgatagggaagttcctgccggactatccgaacagggtggtagccagcagcgtgaccgtacgccatctgctgtcacataccagcggtctgggtgatttcttcggcgacgatttcgagcagtattccgcgtcgttgaagacgctggatgactacgtgcagcgctttgccaaggatgcgccgcagttcacgccgggcagccaggacagctactccaactatggcttcatcgtattggggcgcatcatcgaagcggtttcggggcagtcgtactacgcctatgtggacgagcacatcctgcgcccggcgggcatgaccggcaccggcttcgagccggaaacagtgaacgtcccgcagcgagccgtcgcctacacgaagaaggatgggcaatgggtccgtgaaacgaagtcgctgccctggcgcggcatgtcagccggtggtggctacagcacggtggccgacatggtgaaattcgccggggcactgcaaagcggaaagctggtctcgcccgcattgctgaagcaggccaccaccgcgcagaaccacaagggctggtatggattcggcttcgtggtgcagggcgagggcagggaacaccagtatggccatgaaggcggtgcgcccggatcgaacagtgccatcgtggtgatgcccgcacagggctatgtgatcgttggcctggccaatgtcgatccggatgcgatcggcaacgtggtcaactacatcgcgcgtagagtgccgctgtga

SEQ ID NO: 497539 - DNA, 321 bp, Stenotrophomonas maltophilia
atgaaagccatcgttcttgctgcaacgttgtcgttggtcctggtttcaaacgcccatgcccagtcgctgcccaccgagctggcgcagctggggatcatcgccggcatgccctacgccaaggccaagcgcctgctggatgctgcgggatggcaggtgaagccggcgcagggcgcgccggaatcgctggagggctttccggaagtggggtgccagaagggcgggaagcagtgcgcgacgaccttcgagaagggtgaacagcagattgcggtgcggctgggcactaccctggcagggcagccgttcgtgcagagcgctgattga

SEQ ID NO: 497540 - DNA, 960 bp, Stenotrophomonas maltophilia
atgatcctgcgcggcctgttggccctggcctatgccggggcggtaggcgtggccaccgcagcggtaccggcagggccgcagatcctcaccgaggatgtcagccgtttctatgcactttatgacagcgctggcggcaagcccagcgttgcgcagctgcgtggatacctggccgagggttcggccggcctggccgaactggccaaggcgcgccgggtcactcccgaaggcattgccgagtccatcgccagccagcccgagctgtatgcacagggacgaaactgcctggccgaactgcccgcggtgaagcaacgcctgacgcaggtgttttccaacctgcaggcgatctacccgcagacccggttcccgccggtgaccatcgcggtgggccgcggccggccggtcgggctgacctctaaaagcggcgtgatcattggtctggaagcgctgtgcgcggccgacttcatgaatgccaatgtgcaggatcgcttcgtgcatgtgatcgcacacgaatacgtgcacatccagcagaccggcctgatcgacttcgagccgggtgacccgcgcgcgacagtgctgcgtgtttcgctgggcgagggcatcgccgaattcatcaccgagctgatttccggcaacgtcggcaatgggcgtcacgcggcctggacccgtggccgggaagtgcatatcgaaagcgcgttcgcgctggatctggacagcaccgatctgtcgccgtggctgtacaactacaagccgggctcgcaggaaccctacgacctggggtactgggtgggttaccgcatcgccaaggcctattacctgcaggccaaggacaagcgtgatgcggtgcgtgcgctgatccagcaggacaacccgaaaacgatcctcgccgccagcggctggacgccgggcatgtggatgccggcgaaagtcacgggtgtagcggcgcgtacggctgcacgctga

SEQ ID NO: 497541 - DNA, 885 bp, Stenotrophomonas maltophilia
atgctgaggcattggccaccgctgaacgcgttgcgtggtttcgaggccgccgcccgcctgggtagtttccacagggccgccgaggaactgcatctgacccagtcggccatcagccagcagatccggggcctggaagcctcgctgcagcagccgttgttcttccggcagggccgcagcgtcaccctcaccgacgccggcatcgacctgctggaaaccacccagtccctgctgcggcagctggccagcggcatccgccggctcgatcagtaccgcaagccgaatcaactgatcgtcaacaccagtccagcctttgcccggcattggctggtgccgcgcctggccagcttccaccgcctgcatcccgacgccgacctgtggctgctgaccagcgaggaggcaccggatatgaccacgcagacgctggacgtggcggtacgcgatgacctcgactcacaggcgcagtgccagcatcgcgtgctgctgcaggatcgcctctttccggcctgccatccggccctgctcgccacgccggtgcacgaacgcctcaccctgcatggcgagcgcgaaatggactggagccagtggcaggtacaggggggcgccgatgtcggccagcgccgcgaaggcatgaacttctccgaacccgggcagctgctggatgctgcctgccaagggctgggtatcgccctggtcagcgagctgctggcggcacgcgcctgcgatcaggggctgctgcagccgctggatgaggcacgcgtgcgcggcccacgctggagctggctggtgcatgaggacagcgcggccgatccgctggtgatcagtttctgtgagtggttgctggcgagtctgcccgcagaagctacttctgctgcagcgcgcgcttga

SEQ ID NO: 497542 - DNA, 1134 bp, Stenotrophomonas maltophilia
atgagcagccgtcgtcacttcctcacccagctggcgggcgccgctggccttggcggcctggccgccctcggcctgacagggctgccgacgcgcgtatccgcagcggggccgggtgcgggtatctggcgcatgccggacgagcacgggccgcaggaacgcgttttcctggccttcgccgcgcaaccgcgggtgtggggcgcgcaggccgatgcggtgaacaccgccgtggcacgcctggcccgcaccatcgcccgccaccagcccgttagtgtgctgtgccgcccggcgcagcggaagctggcgcaggatcgctgcggccgcgacaacatcgagttcctcgaggtgccgctggatgacatctgggtgcgcgactacggcggatgtttcgtcaccgatggcaagggcgggctgggcctggttgatttcaacttcaacggctggggcggcaagcagagcgcacggaacgatggtgcggtggcgccgtggctggcgcaggtgaccggtgccacgctgctggaaagcgatctggtgggcgagggtggcggcatcgaagtcgatggccatggcacggccatcctcaccgaaagctgctgggtgaaccgcaatcgcaatcccggctggtcgcgcgcggatatcgaggccgagctgatgcaccacctcggcctgcgcaaggtgatctggctgcccggcatcgccggcgaggacatcactgacgcacacgtggatttctatgcgcgcttcgtgcgtccgggcgtggtgatcgccaatctggacgacgatccggagtcctacgactacgatctgacccgcgagcacctggagattctgcgcggcgccaccgatgccgatggccgtcgtctgcaggtgcacacgctgccgccgccgctggacgggcgcgacaacgtgcatacccgcgacaacgatgatctggcgatgggctacatcaactacctgccgatcaacggcgcggtggtcgcgccgcagttcggtgacgacgcagccgatggctactgccgtgaactactggaagacatgtatcccggtcgtgtgatcgaacaggtggacatcgatgcgatcgccggtggcggtggcggcatccattgcgtgaccaagaacatgccgaaggtaggctga

SEQ ID NO: 497543 - DNA, 153 bp, Stenotrophomonas maltophilia
gtgaagtcgtgcgtgcggctggccgcgcacgcggtggccatgatcgtcgcgttgaccggcgccaccgttttccatgcctcgggtctgcagtgggcggccgctgtcgatgcaatgccgctgcgctacccgatggcggtagtgctggccgggtag

SEQ ID NO: 497544 - DNA, 846 bp, Stenotrophomonas maltophilia
atgcgacagcgcattgcaaggaaacgcgtcctggccacaacggtcgttctatcgatggttgcagtcgtagcgctgctggccagcgtgcgcccgcagtggcggcgggaagtcggcccgcctccgatcagtctgggaacggcacggatgcaggccgaagtgatggcagagctcatcgacctgcgaccgacaccgccaggaaagccgccggttccaccgattccaatgagaggagtctcctccccgatgctggccggtaacagtgggttcgcgaccgcagaggtgcggctggaagacgtcgcgccagcacacttcgagccgcgcggctgggagcccgacattccattcgctgtgatggaatggactgcgccttcctgcggtgaaggatatcccgccccggtctgccaggttcgtcacagcgtcgtcgagtggcgcgatgatgacagtgcggcgtcctttcaactgcagcagcatctggagtcgatgctgcaggttgcgaaccgccgggcttcacgggtacccggtctcgcgttcgagcttgcacacgtgcgggcgcaacggatgacgtgggacgagcttcagcaacggcgcgcgcgcggtatcgagggatgcacgggtggcccgggcagtccggatctgggcgttgtctatctgcagcgtcctgtgttcagcctggatgggaactgggcaatggcatcgatcgcctcggatctgtgcagtggaggaacggcgatgcgtgtcctctaccttctgcatcgcaggaagggcggctgggagcgtgttcgagtggagcctgtccgctatacgagctttggacagggcctgtggcccgcgttgccggagtcgtga

SEQ ID NO: 497545 - DNA, 873 bp, Stenotrophomonas maltophilia
atgacagatacctcgttcaagccagaccgtgactgccaacaacggatcgcctggcgacgcattgcatcgctggcggctgcgctgtcggccttggcgctcatggccggaatctgcagcctgcgcccgaggtggcagcaggcgatcggtccgccaccggtcaacctgggaacggcgcagatgcaggcggaggcgatggcgctggcgatccggcagagtcctccattccgtcttccagccccgccagtgccgcagccaacgccagttctgccatcgtcgctgagcaaggtgcccaccgcaccgcagacgccgtccacgcgcgtcgatcgatggcgcctgcaggagcagccgcagttgaccgacccggtgggggaggacatctacgtgatggagcagaccttgccctattgctgggcgggcagcagtgcctcgacctgccaggaggtggacgatctggtcctgccgctggacgaccggtggccgccggacatccatgcgctgcgattgcagctgcaggcggacctggttcccaccaatcgccgtcccacgccagtacctgcgggcgcattggccggtgcgcagcggatggacggcgcggggcttcgagcgctgcgggagcaggggtgcagggcaacggtgcatgggccgattcggacatacgaccacgtcgcctatctgacccggcccgttttcagtgtcgatgggcagtgggctatgatcgcggtcgcctgggattcgtgttccggcgatttcgtctaccgggagcttgtcgtgctgcatcgggaacaaggacgctggatggccgaacccccggaacggggtctgggcggcgtatgggacggccgcatactgcggccttggacgtacaaccactga

SEQ ID NO: 497546 - DNA, 573 bp, Stenotrophomonas maltophilia
atgaccgccaccacccacgaagaccttcattcgccgcagctgccgcacgattcaagcgcgcagcacaggcccacgtcgccctggatgtggatcgcgctgatcgtggcgatgtttgccggcgccctgctctggctgcgtcattcgaaccaggaagacgtggcaccggcgccggtcggtgagcgcatgctgccggcccctgagcagcccgcggtgacggatgcagcggcccctgccgcgcgccaggcaaccccggctactgcttcgcggaaggccgcgccggcagtgcgcaatcgtgaagcccgcccgctggccagcaaccgcatgcccacctaccccgccgccgcgctgcgtagcggcgtgcagggcagcgtgatcgccagcctgaatgtcgatacccgcggcaatgttgccagcgctgcgatcgtctcgcgcagcggcgagcgcagtcgcgatctggatcgtgcggtgctcaataccgtgcagaactggaagttccagccggcggtgcatgacggccgcgcagtagcaagcgtagtgcgggtcccggtggatttccgtaccgagcagcgttga

SEQ ID NO: 497547 - DNA, 1323 bp, Stenotrophomonas maltophilia
atgaccaagaagggactcacggttgaggatgttctgcgcagcgtcgcggagaacggctcccggcgttatgaaattgacttgccgggcttccgtcttcggaccacggatgcggccgaccatgctcgagcaatggaggcgctggaagaaatcggcaagttccacttccgtgatgcgggtgcagttccggcggcggctgggccaaacccgttggaatcagcggcggcgcagcccctgccatctgagaccatcagcctgatcgatgcgaagcgaatctggcaggataaagtcgccgccgaggacatcgaggtcaaaacggtcggcatcaaactgcttcccgtgacagagctgatcgagttcttgggcgccgagcgcgagctgcacaccatcacgcggcctgagatggcccgcttctacgaccatttggccaagcgcgggttaacgcgttctacgctcaacaatcgccagagctacctcgcaggaaagagaggattcttcacttgggcaatggcttcaggctacgtgctcaagggagacaatgtcgccgcaggtcacgtcagcgtttcgatggcggagaagcgcaagcgcagaaaatttggcttccaggcctttaccttggatcaggttcatcaactcttcgcgcctgatagcttcaagcagctttcaacgggagcgcgctgggcggctttgttgggcctgtatacgggcgcccgggcaggtgaggtggggcagctgtttaccctcgacgtcaaggaagaggagggaatcccgtgcatacggtttaccgatgagggggaggatcagcgattgaagaccgatgtttccaatcgggtcgtcccgttgcatcccgacctgatcaagcttggtttcttggactacgtcgccgaacgaagggagagcggggactggcgattgtttccgcaggctgacagtaaggcgaagaatggtgcggggaactggatatcgaaggcgttcagctactacctccaaaagcacagtggtgggtggtcgaaagcgaaacgtggtttccatagtctccgaaagaccgtgattcaggagatgcagggcagcggtgtggcctctgagatgcgagcccaaatcgtcggccacgaattggacgacgaacaccacgcgacttacagcaggccctttacggtgagtgagaagctcaacggtgccggaggaacgccagctttgggtgtcctagattacggaatcgacctggaggcgctgcgcaccctgccggcgcgcaaggtcgggcggcgaagcagcaatgctgccgcgcgctcttcaaaggtcggccgtaaggggagcgagccgaactaa

SEQ ID NO: 497548 - DNA, 732 bp, Stenotrophomonas maltophilia
atggcccttactgctgctgatgcttaccgccgcgccatcgatcgctttctcggcaagctctctggcaccgaaaacgtgggccagatggagaagaagatcgcagaccatttgcgcctagcgaaacagcggcccaaggtggacgtggcgttgagcttcaatgaggccgctggggtgttggcgatcagcacggcccaattgcaacacctcttgaaggaacactccccaaaagggacgctgttcacggtgaagggaactcgcaagcgctcgaccacccttgttccgttgatggcctgggcagccgagctcaaggctaagggcctgtggaagccgttgagcgaacggggcgttgcgatcgacaccctcctaactgcagaactgccgtttctggtggccaaagggtccaaggctaagcagttcttcctggagccactgactgaccaacccatcagcgatgcgttaattcgccagctccaagcattgggcgtgcaaatcgggcttgggattcgggtctgcacgctgaccgaggccttcgcccagccttggcaaaaccctgacgtcaagcgccagtgggtggacgcattcaacaacgcagcccaagcccaggccagccgtctgcgggacctggctcagcagctcgacgcctcgcgagctggggtgatcgaacaagcgctgcacgaacgcctgcagccggcgcctccaaagatgcccgacaagcgcaatgggcgaatgtaa

SEQ ID NO: 497549 - DNA, 354 bp, Stenotrophomonas maltophilia
atgggcctcgatatgtatgcggtcaagacccgcactgatgtgcgagatcgcactcaagaactatttttctactggcgaaagcatccgaaccttcatggttggatgttcaagttgcacagtgctaggacggggcaggttgatcccttcgatttcaaccaagttcccgtattccttggattggacgatcttgatgcgttggaacaggctgtgctgaacgatgatttgccttatacccaaggcttcttcttcggtgaatcggatcccgatcgagctgaagaagatctggacttcattgcgcaggcccgcgcattgatcaacgacggttgggacgtgttctacaactcttggtggtaa

SEQ ID NO: 497550 - DNA, 657 bp, Stenotrophomonas maltophilia
atgcagcccaagtccaacgttctgccgttcaacgcagcaacccgctccaagcgcctcgtagcggctaaacccacccggctcacctccgtttgctacaaggcaagcgacaaggcccacacgagcgtcgattggtataccccgcctgccatcgtcagggcgctggggggaaggcgcggctttgacctcgatccttgcacgcccgaagacccgtcgcggctgcccgcacccacggccagccggatgatcccgccgagccaggacggcttggctacgccgtggcccaagcaggcattcgtgtggatgaatccgccttacggaaaagggattgagaagtggttgagcaagctggccaaccaccccggcggcggtatcgccctggtgccggtcaacatggagacgggatggatgcacgactgcgtgctttcccaccccaacgcgacggcgatcctgttcacccgtgggaggctgaggtttgtgcgtcccgacggaaccaccggcacggcagcgccgtcgggatcgttggtggtgacttacggcaagcgcgccgccgatcaccttcagcaagcgcaggcgagcggtgcgttgcacgggaagttctttgccatccagcgggtagggcaggtggccacggcgaaccaggagagctccaatggctga

SEQ ID NO: 497551 - DNA, 252 bp, Stenotrophomonas maltophilia
atggctgatcgctggaacgttgttgtcttgggccgcgcgacggccgaattggaaatccgaatcgacgcggactcagaggcggcagccttggagattctgaactcgatgggagtggctgacattcatgccggtggctggcgtaccgagttggaggagatctacggctttgtggaggtcatcagccccgatggttccgaacgcgaagatctcaactggccttgtccaaccatgcgccaccacctcaactattag

SEQ ID NO: 497552 - DNA, 264 bp, Stenotrophomonas maltophilia
atgggaacttacgaattcgtcgtccggggtgactacttggtgagcaaggtgattgaggtctttgcccagacccagtccgaggcaatggaggcattcgcgcgactgtccttggcggagttggatgccatcgattggcaccatggcgcccttacgattgaagaacacgtggtggtgacggaggtggaaagcgggagggagtttcagcatccgttcttgaccgatcgcaagcgcgagcaactggagtgtttggccgaaaatgagtag

SEQ ID NO: 497553 - DNA, 1932 bp, Stenotrophomonas maltophilia
atgtctacaaccaatgtgtccccaaaagggaaggctgtcaacccgacgacggaagagccaagcaacatcgtgccattcgaagcgtcgcgtttcctgggtgcggaagcctccgcccgcaaggtcaacctggaggcagaggagcacaagcagctctaccgccactcggttgatcgagagggccagcgcaagccaccgtcgctccccatcctgtttgcccgccgcaccaccgaatgcgtcgatcgcttgtgggcgtgccaagccaccagcggcaccggcgagatcgtacaccattggaacggtacctactggcaagcgatcagcgacgcggaaggtgtgggtgtggcatccgattggatcgaccgcaacgccgatttcgcgggcagccccaagctcgccaaggactgctgggacatggcttcccttcggttgcgccagaaaaaccccatgccagcccaagccaagcgggccatcgtgccggtggcagacggctacgtggaaatccttcccggcggtttccatgtgctcgctcctgatcccgccttgggcatgacccacgcggtcagggtggcctgtggtggcaggcagggccatgcatacaagccccagcctttgccggctgactcgcgattcgccaagttcctccgccaagcccacgacgacccgcgcgtcatcgacctgctccaggagcagtgcggcatgaccctgttgccgggtgtctacagccaggccgcctggtggcacggcgtcgcaggttctggcaaatccaccctggcggaaatcgtggaagcgatgcaccgtcaggtggcccgctgcaaccttgaaactttgggcgaccgcttcagcctggaacccatgattggcgccagcctgatcctggtggacgaagtggagtgcgagaagtgggccgaaggtcggttcaagacgatggtctctggcaatggcattggcatcgaccggaagaaccagaagcagctggcgagctaccattccacggccaagtggatcatcacgtccaattcggcccccttcatccgcgacaagagcaacggggtgtggcgccgcctcaccgtcgtgcactggaagaaggcggtaccggtcaaccagcacgaccctgatctggtcaagaacatcctggcagaggaaggccagcttgtgctggactggatgctcgaaggcgcccgacgcatcgtggcccgtggtagggcgttgtccgacaccgacgccgacatgcccgaagccgtgcgcgcagcgaagctggccgcccgccatggcagcgaccaggtcatggcttgggctcaagccgagcgcgtggtgcgcattgagacggatgagtgcacgctttccatgcggcaggtctacgagaactacaaaaactggggctaccgacaagggctggcggacatcgatctcctcaccggtcgccagttctggcgaggcttgaaagagatgggcctggacgacggcgcccgctcgaaccgtcgcatcaatggcaaacaggaagaatgcgtgcgcctgcgaatcaacggagcagccaccgtcggcgaggcctgtggcgatctgccgttgagatcatcggcgaccgtgacagcactgcgcgtggcgcaggagcgctctcagtctttggagccttgggaaaccgatgtgacgcccaccctcgaacagcaaggggctcggcaggaagagatggagcgtcgattcgaccgcttgagcgctcagcagcaggcggctgagatgggagctctccatgccgatgcgttgagggaggaggcagggcgcaccagagccaaggcaatccaactccagctgcaggaacgtatcaatgaactggagattcgtgcgctgttcggtgagccgttggcgggccgagaaagcatcgaaacccaaggtggcggaaaggtgggagatggggatgcgcgccaacggcggtcgtaa

SEQ ID NO: 497554 - DNA, 357 bp, Stenotrophomonas maltophilia
atgcgcgccaacggcggtcgtaaaggcggggccaaatccgtgttcccatcttccgtatcagctctagccaatggattggtcggtgacgctaacggtccagcccggacttgccaaatccgtatcctgtcgcatgctgaaaccatgaccccttccgatgcctttgtagacgacagcatggaccgccaggactccctggcggcgtccccccgtttcaccgtgcaacgaacccccgagggcatccgcgtgcagctccaggagggcgacgggggccccggcaccgctttgaccatcgaacgggccttggctttgctggagaacctgttggagcagggacgcgccgtcaccattcacgattga

SEQ ID NO: 497555 - DNA, 1026 bp, Stenotrophomonas maltophilia
gtgtccgatgccacccccaacgaaagcttccttcagcgccattcccgcgacgtcgtcgagcgcttgatccgccagatggaggagggcaccggtccctttctcaaaccctgggacgcccgcgtggacctcgggttgcccatgaaccccacgactggcaagagctaccggggcggaaacctgctccacctgtgggcccttcagagcgcctgggacacccaggacaaccggtggatgacttacaagcaagccgcggccgtgggcgctcaggtgcgcaagggcgagaaggccagcgtgattgagtattgggattggtcgcgggtggaggaggccaagaagagcggggaccccgacctcatcgccaaggcccaccccaaggtcttcttcccacgcgtgttcaacgcgatgcagatcgatgggttgccggcactggtcctgccagccgcgcgcccagagcccgacattcaccaggcctgcgaagcggtgctgagagacagcggagccgagatccaccacgacgggggcaaccaagcgttctaccgtccgatgaccgacagcatccacttgccccagcgcaacacctttcactcggccagcggctactacgccaccgcgttgcacgaactgggccactggaccggctttcccacccgcctcaaccgcgatcagaaaggggcttttgggagcatcgactacgccaaggaagaactggtcgcggaggtgtcatccatgctgatgggcgaacgcctgggcattggccacgatcccacccagcacgcggcttacgtgaagtcgtggatccaaatcctccgggacgatccccgggagctcttccgagccgcggcggcggccgagcgggtggtggagttcctgaaggtgcccgagttggttcgagagccgctccagaaggttgagcagcagcggcagtccgtggcggccaatctgcatgagatcgaaaaacatgctgccaacgaccggtctcgatcgcgcttcaaggcaagaggggcgcgcctgaacttggcagtttga

SEQ ID NO: 497556 - DNA, 609 bp, Stenotrophomonas maltophilia
atgtccgacacaacctacagccaccgcatcctcaagacttatggcctgctggtggacttcgaaggtaaaccacgcctcaagaacgttccgtcgcctctaaccggtcaaaagaaggcaaaggagacgatggaaaagtggacgcagcgagtgctgggggatgaggtcagcaaggtccgcgtctaccgaccggcacgcgttaaaagtgacacactcattgccagccttacagacacgcacgacgccaagctggtgcgtgacattgttcgcggcgccgttcgcaagaagagcaaatcagcgaaagcaaagattgaagagatcaaggtggagcacgccgccgagcttagaaagcgcggagccaccgcgagagaacttcggaaggcacacgaagaagacctgtcgggaaagctcgatgatatcttggctgcgacggcctatctgccgttagacgaccttcaggacttggtggtggaactgggagaggacttgagcccatcggtccgcaactgggcacttgccctggctccggccaaggatgctgacgaggtttccgtcatcgacgttctcaagcagatgctcctgcgcatggacgtgctgtcgaagaataaataa

SEQ ID NO: 497557 - DNA, 279 bp, Stenotrophomonas maltophilia
atggcaaggaagaagagttcatcggccgcaggtgccgcgatttcgaccggcggcggagccgtcgctggcgcaacttctgcgatcctcggcgtaaccagtggtgcagcggccgggaccgccggtgcagccgccgtgacctccggcttggcaaccgtcgggagcgttgtgggcggtggcatgcttgctggactgggggtggtcgcggctgcaccaattgcgggtggtgcggcgatgttcggcgtctacaagctctaccagcgcatggcatccaagaagtaa

SEQ ID NO: 497558 - DNA, 573 bp, Stenotrophomonas maltophilia
ttgaaacccatcgttctggcccttgcattggcgttgtctgctccggccgcctttgccgccgattccacctccgctcgccgttacggttcgtccgaggccctatccgtccaggacgcccgactgggcgaggtcctgatggttcgcacggttcaactgacgtccgaccagcgtctgaacgccggctccgccatcgggtcggccgttggttatggggctgctaaccaggtcaagaaccgggaataccgcaatgcagcccgggtgaccggtggcgtcatcggtgcggctgccggaaccgcggttcaaaagggcctcagcggccggcgtgcggtggagatctacgtgcgcgatctgtccgatcgccgccagcgcgtcctcgcggtggtccaagacgccgatgtggatgtgcgcgaaggtgatcgggtcttcttggtggggaagggtaagaagacccgggtggtgccgcttgatgcttcgccggtgcgcattggcgattattcgtgcggaagcccttgtgccattggcatcaatgcccggtcggacaacaacagcgctcgcgtgcgcgtggggccgtaa

SEQ ID NO: 497559 - DNA, 432 bp, Stenotrophomonas maltophilia
atgggcctgcaggtaagcgtggactgcctgtcgggtcacgcccaggcgcttggcaattgcagggccgttgttcccctgctccaggaggcgcaccaccagagcgtgttggtcagccagtgggcgccggggcttttgacgcaaccccaggtgggccagatcggcgctcaccacgggcgatggaacgcccagggcttgggcgatggcggcgcggccgtgtccctctcggaccatccgggcgacttcggagcggcggtgggcaacggatggccgcttcatgagctcaaccagaagcccgcaagccgtgccttcgcaatacacgcctccaccaacgtgttcgcttttgtgcatccttacggccccacgcgcacgcgagcgctgttgttgtccgaccgggcattgatgccaatggcacaagggcttccgcacgaataa

SEQ ID NO: 497560 - DNA, 339 bp, Stenotrophomonas maltophilia
atgaccgttattctggtggtcgtgctgtttgagctcgccatgtttgcgatcaccttcggaatcgcgtggctgtgcgcgtccaaagcccgcagcgcacgcaggggctgggaggcgttccaagccggccaagaggacgccccatccgtggttgcgttgatgtggcatttggccgtgttctacgcgtgcttggcactgctggcttaccagctacagcacgtggtgagccaagtctggttggatccttccaacctatacctgtcatccacgctggctcttgtcgtttattcgatcgcatgcgggctgcttcacggcagcgggctggcgcggaggcgggcatga

SEQ ID NO: 497561 - DNA, 480 bp, Stenotrophomonas maltophilia
atgagaacgagtcacggtcggttgcgcccagaccccgtcgacgcccgcccacgccacgatgggctgttccaaggcgaagacacaggcgaagagattcacgaagagcgtgacccgttgcttcaagcgctttacaccgaatcgctccatgcccgcggggacgtggacgctgtcgatcgcttgctggatgcccaccgagaggcgcttggggagcccgagcaagtcgcctatgcccgtcagcaagacgaacgccatgatcggacgttgccattgccgagcggtggcctgccgttgaggccgtccacggagcgctacctagaggagcatcggtcatggaacccgccgaccgccaaagaggccgccatcgcacgttccaggggtcccaccatggtgctcgaagggaaggcatggcgcgctgaagacgacgttgccgaggttacggtggaggctcccaaggacgacccgtggcagcggatgcgttga

SEQ ID NO: 497562 - DNA, 357 bp, Stenotrophomonas maltophilia
atggcaagcgtgacagtaaggacgcgggatgagctggaagcggccaagaatgcaaaggcgcagcagattgtggttgtgggcaagttggcagacgacctgaagaagacgcgcaagttcgccaagcttggtgccgtcggtgttgcagcaatcgttgctgcagttgggctcgctccagtaacggctgggctcagcacgctcagcctgggggcggtcgcgacagtcactggagtcgagatcatcggcatcatcaccgccgcaagccttggtctctctttgatcctcgcaatctacaaaggctacgatgtggaatacgaggctggcggaaaggtcattttcaagcgcaaggaaggaaagtga

SEQ ID NO: 497563 - DNA, 1014 bp, Stenotrophomonas maltophilia
atgagctacctggacccgcaaaccgtcacgagaccccgatggactaccctgaccttgccccccctggaggaaatctccggtccgttcgcccttctttcgaagggcccaaaattcatcgccgcctggcttgccaagcgcactgaggagcgctaccgggagttcacccgtgccgcgcttgagggtcaggtgttccccgagaacgcggaggccatgacctcggaagattttctggccatgctgcgggcattggagatggacatcgaggccgagaaggccaccgtctatggccgccttgcctgttcaatcgctaccggcaaaaccgcaggccatctcaagcgccacttcattaaggcgctgagcgacctgtcgtttggccaggtcgatcttctgcgacgcgctttaatcaccgagcgtcaccacgtgtttcctggcatcggcgggggtaacctggacccaaaagaattccttggactgcagtcgaaaagcagcatcaatcgccagacctttgaacgctggggcctgatcgaagagaaaggactgagcctcgcaggccgacggttcgtggaggcttgttttaccagcgatgagttggcgccctcctcagtgggctttcaggaatgggccaagggtcgcatccacatcgtttgcaacgagatgggcgcgccgagctgccacagcgtcctggtccaactgaccgaagatgggcaccgccgggccatccatgtccacaacagcgcagcacttcggggacgctccaaccgcctgctgacacccggccccgtcatggtggtccttctcaccgataaaccccagcgtctcgccgacgaatggaccacggtggaagacaccatccgaggaagagtcctggccgtggtggccacgaccgatccgaatgcgccgttgcccgtcgccatgacgggcttggaacgcatagatgcgtcaccggaccgtgccgcagaagccgtgacggcgatactggagcgctttgaagcaaaagggttacggggcacctga

SEQ ID NO: 497564 - DNA, 981 bp, Stenotrophomonas maltophilia
gtgattgaactgatcaaggccggggcagacatcaatgcgcagaataaccaaggggaaacaccgctttttaacgcgagagggcaaggggatgccagggcgttgattgcggccggggcagacattcatgcgcgcgataaccgagggaaaacgccccttttcggagcgagcgaaggggctttaagggagctcgtgaaggctggcgctgacatcaacgctcgcgacacccaagggaacaccccgttgtttggcgcacacaacgacagtctcaaagcgttgctgaaggcgggagcggatgtcagcgcgaggaataatgaagggcaaacccctctcttccgagcaaccgggcagacggaggcccgcgccttgattgcggccggggcagacatcctagcccgggataaccgagggcgaacccctctcttcgaggcgaacacgggcgcgcttaaggaacttctgaaagcaggccttgatcccgcggcgagcgatgaccaggggaatcaaccgctgcatatagccagggaccccgaggcggtggccttgctcacccgtgcaggcgcagacgtcattgcacagcgaatggacggccaggcgccgatccaccgtgcgatttttccagagacgattgaagcgctcgctaaggcaggggcggatatgaacgcccaagacaacaacgggaatacctctcttcatgcgggccgcgatgccactgtctggagtgcgctgattgaggcgggcgcagatccccacatccaaaaccaaaagggcgaagcgccgatcaacagcggcaagccatttttcaacgacttgcgggctcaagagagggccaagctcctggtcagcctgctcccgcccgccaacgcttggaagccaccggaaggcgggtttggggccgatgccaaacgccaggttggtgcggccatgaaggcccacgggcaggacagccaaacccaggaagcccctcgcttgcgagcgcgcttctaa

SEQ ID NO: 497565 - DNA, 480 bp, Stenotrophomonas maltophilia
gtgaagcgagccaacgacattcgggcccaataccagctggccatggacgatgagggcatcctcttggccgcctcgcacatcttggagcgtcgcctgcagcgccacgaggccatcaccgacccctccagtgccagcaactacctcactgcccgctgcgcgcacctggatcacgaagtgtttggcacggtgttcctggacgcccgccaccgcatccttgccaccgagcacctctttcaaggcaccatcgatgggtgcgaagtccatccccgcatcgtcgccaagaaggcgttggaccacaacgccgccgcggtcatcttctttcacaaccaccccagcggaaaccccgagcccagcgctgccgaccgcgccatcaccgaccgcctcaagcaggcccttgcccttttcgacattcgagtgctggatcaccttgtgatcgcgggcacctcgcacgtgtcgatggcttcacgagggtgggtgtga

SEQ ID NO: 497566 - DNA, 939 bp, Stenotrophomonas maltophilia
atggctgatgtccgggccagcgtgcatctgtgccatcagctgtgtctgctcgctgaagcgtcgcagcatcgccgtcatctcggcggtggcagcgagcatcctgccggcttcatccttgctggtggcctgggtgctgacgctgagatcaccgcgggcaacggcctggatggcatgcacggccttgccgagtgggccggtcactgcccgcgagatgacgatggccagcgcggcagcgaccagcgacagcagcacgatgcagccgatgatggcaatcatgctggtgcggtgggtggcgttggcgtcggcaatcttgccgtccatctggccggcgatgtgggttcccagtgccttcattgcagcgaagaggtcgcgacgcgccgggcgcgactgctcgtcggagatctgctgggcctgtgtgccatcaccggcggccacggcgtcgcgcatcgccttgtttgcggcgaagtagcggtccagctgcgcgctggccgcgcgatacagttcacgctccttgtccagcgccggcagcgccgcgtacgccgccaactcgtcatgcacggccttggcggtgtcgtccatgcgcttgttgtagtcggcgaccttgtccggctggtcgagcatgctcagctgggccagttcgtaggtgcggaactcgcccagctgcgagcgtgcctcgcccaggtgctggaccgaggggatatcgttgccagccatctcgcgcaactgcgcgttggcctcgctcaggcgcaccagtgcgaaggcgccgaggatcagggtcatcaaggtggtgagggtgaaccccacggccagcttgcgggcgatgggcagatcttggaaccacttcatgcagggtgctccaggtgggcagagtgccggcgtctgtgcgccggttcgggggtggttgcagagcgaacgggggtgcccggtggggttcggtga

SEQ ID NO: 497567 - DNA, 1989 bp, Stenotrophomonas maltophilia
atgagcatggacctgcaacgcttccacgccaccttcttcgaggagagccgcgaaggcctcgatgcgatggaggctggcctgctggccctggaatcggggcagcaggacgcggagatcatcaattcggtattccgcgccgcccactcgatcaagggcggcgccggcaccttcggcttcgacgcgatcgccggcctgacccacgtgctggaaacgctgctcgatgagctgcgcgccggcaagcgggccctggaaggccacgccgtcgacgccatgctgtcctcggtggacgtgctgcgcgccctgctgcgcgaagccgaacacggccaggctgccgatccggctgcagtcgctgcggtgaaggcgcgcctggaagcggttctttccggccaggccgcagcgagcgccccgtcggccgccgcagccaaggtggacgatacgccggaagcctggcagatcggtttcactccagcgccgtcgctgttcatgagcggcaacgacccgctgcgcatcatccgcgaactggaacacctcggttcgctgcaggtcgccgcgcgcatggagcgcctgccgggcttcgcccagcttgatccgctcgaagcgcatcttgcgtgggacctgggcctggttggcaaggtgccgcgcagcaagatcgaagacaccttcgcctgggtgctggacgattgcgagctggacatccgtcccgccgcgccgccgagcctggccacccaggcgccggccgcggcggctcccgctccggtcgcagcggccccgtctgcacctgccacgcctgctgccaacggtggtgccagccaggaagcggaaacctcgatccgcgtcagcgtcgacaaggtcgatgcgctgatcaacctggttggcgaactggtcatcacccaggccatgctcaagcaggtctcgcacgcactggacccggtccacgccgagagcctgttcgctggcctggaccagcttgaacgcaacacccgcgacctgcaggaagcggtgatcggcgtgcgcatgctgcccgtcgatgcggtgttccgccgcttcccgcgcctggttcgtgacctgtccagccgcctcggcaagcaggtgcgcctgcgcaccgtcggcgaaggcaccgaactggacaagggcctgatcgaaaagatcgccgatccgctggtgcacctggtgcgcaactcgatcgaccacggtctggaaatgcccgacgtccgccgcggtgcgggcaaggacgagaccggcacgatcacgctggcagcttcgcatcagggcggccatatcgtcatcgaagtcagcgacgacggtcgcggcctggaccgcgccaagatcctggccaaggctcacgaacgcggcctggccgtgccggacaacccgaccgattcgcaggtctgggacctgatcttccaacctggcttctccacggccgatgcggtcaccgacctgtccgggcgtggcgtcggcatggacgtggtccgccgcaacatccaggcactgggcggcgaggtgcagatcgaaagcagcctcggtaccggcacccgcacgctgatccgcctgccgctgaccctggccatcctcgatggcatgacggtggccgtggccggcgaaaccctgatcctgccgcttgcctacgtgcttgaggcgttgcagccgcagcccgaggatatccgcagcatggccggcgaaggccgcgtgctgcgcgtgcgcggcgagtacctgccgatcctgtcgttgagcgagtactacggctacggcaaccgcgcaccgggcagcgaatcgctggtggtggtggtggaaggcgatggccagaaaatcgcgctggaagtggacgaactggtcggccagcagcaggtggtggtgaagaacatcgagaacaactaccgccgtatcggcggggtgtccggtgccaccatccttggcgacggccgcgtcgcgttgatcgtcgacatcggcggactggtgcgctcgctgcggatgccgcaggccgcctga

SEQ ID NO: 497568 - DNA, 1260 bp, Stenotrophomonas maltophilia
atgaacagcaccggcatcctcgacgattacctggacgaactgctgggcgaagcgatggtcgcgccgccgcctgccgtgctgccgcacgcaggcgccgggcaaggcccggcgatcgaagcagtcgccgaacgcgaaccgacctgggacgacctgccggccgaagtgatctacgaaaccgaaaccatcgccgccacgccgagcggggacagcgctgcgctggaagccgccttcgagagcgccgcaccacccacgcgcgaacccacctgggatgacctgcccgccgaggtgatctacgaaacagaatccgtcgccgccgcgcaaagccgggacgacgcagcactggaagcggccttcgagagcgctgccgcttccggtagcgctgggcagggtccggcgggagaagcggtttccgaacgcgagccgacctgggatgacctgcctgaggaggtcatccacgaaaccgcgccggcacccgccgtcgttgcaaacgccggtccggaacctacctgggacgacctgccggacgaggtgatctacgagaccgatccggccgacagccatcgcctcgcccacaccgacagccccggcctgcaggccgcgttcgaagcggccgccggtggcgaagacgtagccacgccaccgcccgccgtggtcgcagctccggtggccccgacggttgcacctgcagccccggccccggccgcgcgcaccgccactccgccgccgcgcgccgccgtcgatgccccggcaggcaaccgtcccggcacctggcaggagctgcaggcgcaggcccaccaaccggctcgcagcccgcatccgcagaaccgacgcgccggcgaacgcacttcacgctggctgcgccttcgctgcggcacccaggcctatgcgctggaactgctgaaggtgcaggaagtggtgctgccggtgccgctgctgccactgcgtggcactgcagcggccatgctcggcatcatgaacctgcgcggccaggtggtaccggtgatggatctgggcctgcaccttggcgccgcggccgccgaagacgacgcacagacccgcatcgtggtcctggaggaggacggcgaaaccatcggcctgcgcgtgtcagcggtcgaagatgtcgccaacctcaccgattcgcagatcgaaccgcccgataccgcgcgcatctgccagatctcaaacgacctgttccgcggcgtggcccgggtcagccagcggccgatgatcctgctcgacgccacccggctgttgagctga

SEQ ID NO: 497569 - DNA, 783 bp, Stenotrophomonas maltophilia
atgcgcatctgggcagtcgccaaccagaagggcggagtcggcaagaccaccaccaccctcgccctcggccgcggcctggccgcgctcggccatcgcgtgctgctgatcgacctcgatccgcatgcctcgctcagccgcgccttcggcgtgccggtggacccgccgccggccggcgtactggaattgttcggcacaccgccagcggacctgtccagcctgtgccatgccagcaacatccatggcctggactacgtctgcgcacagtcggcgctggccacgctggaacgccgcagcgccaaccagcccggcctcggcctggccctgcagaacgcgctggcgcgccaccagggccagcacgactacatcctgctggactgcgcacccaccctcggcctgctgatgatcaatgcgctggccgcagccgaccgtctcatcattcccacccaggccgagcccctggccctgcacggcctggatggcatggtccgcaccggcgagatggtcgagcgctcgcgccgccgcccgctgccgatctcgatcctgccaaccctgttcgaccgacgcacccgcgccggcaacgagtcgctgcgcaccatgcaggaccgccatcgcaaccgcgtgtgggaagacgccattccgatcgatacccgcatcagcaacgccgccgggctgaccctgccgagcgccggcgaggactacccgggccgtggcctggccgcctaccggcgcgccttgaactggatcctcggcgaggatgcccgcgccctggagcaggccgcatga

SEQ ID NO: 497570 - DNA, 1017 bp, Stenotrophomonas maltophilia
atggcccgccgcaagcaccacgaagagcacgccaaccacgaagcatgggcgatcccctatgccgacctgatgacgctgctgctcgccttcttcgtggtcatgtacgcgatctcctcggtgaacgagggcaagtaccggatcatggccgacgcgctgaccgatgcattcggtggcgcaccgcgcaccatcaacccggtgcaggtgggcaacaagcaggtgcagggcggcggctgggacagcccctcggtgatcaagtccggcaccaggatcggtccctccgcgccggcgccctcgcacgacccgaccctgctgccgtcgatggcctcgcagatgcgcatgccggtgtcagtgcacaaccaggagcagatcgcccgtgccgagcgccagctcaacacgattgccgatcgcctcaccgccgcactggcgccgctgatcgaccgcggcatgatcagcgtgcgccgcaccgaactgtggatcgaagtcgagatcaacagcgatatcctgttccctaccggctcggccgcgctggacgtgcatgcgcggcagaccctggccagcctggccgaggtgctgcgcgacgtgcccaacagcgtgcgcgtggaaggccacaccgacaacgtgccgatcgccaccgccactttcccgtcgaactgggaactgtcggccgggcgcgcagccagcgtagtgcacctgttcgccgaccagggcgtgcagccgtcgcggctggcgatggtcggctatggccagttccgcccgcgcgaagagaacgacagcgcgcagggccgcaaccgcaaccgccgggtgatggtcatcatcctggccgacacgtcgcactcggtggatccgctcggccaacgcctgaacgcagccaccggcgccaccgacagcaccgtcaccgaacaggccgacgcaactccggccagcgcccccacctcccccatcgcaccggtgaagttgccgccggtgccggctggcagccgcgtcggcgccgccgttcccccggcaatgaaggagtaa

SEQ ID NO: 497571 - DNA, 1860 bp, Stenotrophomonas maltophilia
atgagcgcggtatccgacgacatcactgccgatttcatcatcgaggcgcaggaaatcctggatcgcctgggcgaacagctggtgtcgctggagcaggcaccacaggacaccgagcagctcaacgcggtgttccggggctaccacacgctcaagggcggcgccggcttcctcggcgtcaccgccatggtcgagttgtgccacgccgccgaagaagcgctgggcatcgcgcgcgcgggccaggccgtgctgcaggcccatcacttcgatgccgcccagcaatcgctggactacctgcaagcgatgctggatgcagtttcctccggcaccgagccgggctatgcgtcgccggagctgatcgcccagttcgacatgcatagcggtgccgtggctgcacccgccgccgccgcagctcccgctgcgggtggcagcgacctgatcaccgacgacgagttcgaggccctgctcgaccagctgcacggcggcaacgcaccgactgcggtggcgccggcaaggaaggccgacgacggcctgatcagcgaagacgagttcgaagccctgctcgaccagctgcacggtggcgccgcacccggcgccaagcccatcgctgcggcagcgcccgcaccgatcgcggcaccacgcccactggccgcaccggccgcaccggcacctgcagcggcgaccaagccggccgccaagccgctggccgaagccgaacacaccgtgcgcgtggacaccaagcgcctggacgcgatcgtcaatctgatcggcgaactggtgctgtcacgcaaccggctcaagaccctgcgtgcgcgcctgcgcgacgaggaactggaccgcgccgtgtccaccctggacatcgccaccgcgcgcctgcagtcggcggtgatgcgtacccgcatgcagccggtaggcaaggtcttctcgcgcttcccaaaggtcgcccgagacgttgcccgctcgctgaagaaggaagtggacctggagctgatcggcgccgagaccgagctcgaccgcaacctggtcgaagcgctggccgacccgctggtgcacctggtccgcaacgccatcgaccatggcgtggaaatgcccgacctgcgcgaagcacagggcaagccgcggatgggccatgtacgcctgtcggcccagcaggaaggcgactacgtcagcatcgaagtgcaggacgatggcgccggcatcgacccggaaaagctgcgcgcgaaggcacgcgagaagggcctgatcgatccggaggccgccgcccgcctgagcagcgaggagtgcctgcacctggtgttcctgcccggcttctcgaccaagcagcaggtcacggatatctccggccgcggcgttggcatggacgtggtgcagtcgcgcatccgcgaactgagtggccagatccagatccagtcggagctgggccgcggcagccgcttcctgatccgcgtgccgctcaccctggcgatcctgccgaccctgctggtgcaggccggcgaagacgtctatgcgctgccgctggcgcgcgtgatggaagtgctgcacgcaccgcgcacctcgctgggctggttcgatggccgcgccgtgctcgaccgccgttcgcacacgctgccactggtcgatctgcgccagtggctggatgtgacgcccgccgcgtcgacactgctgacgatcgtggtgctgcaggccggcgaagcgcgcttcggcctggtcgtggaccaggtccgtgggcgcgaggaagtggtgatcaagccactgccgaaagccctgcgcggcctgcgcggttacgccggtgcaaccctgatcggcgatggtcgcatggcgctgatcctggatgtggacggcctgcgcagcccgcacgactga

SEQ ID NO: 497572 - DNA, 606 bp, Stenotrophomonas maltophilia
atggataccacggtcgacaagaatgccctcgccctgcgcctgcaggaagcactggacgcactggagtccggtgacgaaaccgcctggcggcaacgcatcgacggactggtcgcgctgcgcacgcagccgatgatgagcggcctctcgcggctggcccgcgagctcgggcaggccctgggtgaactgccgaccgtgcccagcgaggccggcgaactggacgatgcctgcgcacgcctggaccacgtggtggcgatgaccgaacaggcgacgcaccgcaccctggacctggccgaggaatgccgcagcctgaccgaacagctgcgcgccgaaggcctgcagccgggccaggatgcacagctcgagcgcatccgccacaacctcaccgagatcgccctgacccagagctaccaggacctgacggggcagatcatccgtcgcgtggtcggcatcgtccgccgtgtgcatgagggcttcggcgcgctcggcctgccgccggaacagcatcgcaccgatccggaactggccgggccggcactgaagggactggaccgccacgcggtctcgcagaacgacgccgacgacctgctgtcggacctggggctgtaa

SEQ ID NO: 497573 - DNA, 888 bp, Stenotrophomonas maltophilia
atgccgtcgcgtgagtacgccaagctgaccaagaccttcccgctgtcggccacccgcagcgagccgctcggccctgtgcgcaccatcgccgtgaccggcggcaagggcggcgtgggcaagaccaacgtgtcggccaacctggccgtggcgctggccggcatgggcaagcgcacgctgctgctggacgccgacctcggcctggccaacatcgacgtgatcctgggcttgaaccccacctttacgctggccgacctggtggccggccgctgctcgctggacgatgtcatcgtcgaaggcccgaacggcgtgctggtggtcccggccgcgtccggccgccggcacatggccgagctggccccggccgagcacgtcggcctggtcaacgtgttctccgagctggagcgcgagctggacatcatggtggtggacaccgccgcgggcatcaccgacggcgtgctgaccttctgccaggccgcgcaggacaccgtggtcgtggtctgtgacgagccggcttcaatcaccgacgcctacgcgctgatcaaggtgctctcgcgtgaacggggcgtggaccgcatccaggtggtggccaacatggtacgcgaccccaatgagggccgcgtgctgtacgagaagctgacccgcgtctgcgagaagttcctcgccgatgtttcgctgaactacctgggctgcgtgccgcaggatgactggctgcgcctgtcggtgcagcgccagcagccggtggtgaaggcctacccgtccagcccgtccgcactggcgatcaccgagatcgcgcgccgcacggcccgctggcaggcgcccaccgaaccacgcggcggcgtcgagttcttcctcgaacgcatcctcaagcagcgcggggtggcggcatga

SEQ ID NO: 497574 - DNA, 1695 bp, Stenotrophomonas maltophilia
gtgcagaccaccgaccacccgagttccccgaccgccaccccgccgtcttcgccccgtgaccacagcatgaaaatcaaacgattcgtcgccgccgacatgcgctcggccatgaacctggtgcgcaaggaacatggtcctgacgccgtgatcctgtccaaccgccggatcgaggaaggcatcgagatcgtcgccgccgccaactacgacgagagcgcggtacagcgtgcactggaagcctcgcgccgtgacgttgcaccgccgccggcacccaagccgcgcaccgccgccgacgcggtgatcgccgccgtcacccgccgccgcagcagcaccccggcaccggaaccggttgccgccaccacctcggcggtggccgccctcgcccgtgcagcagtgggcgctaccggccgcaccctcgacagcgccgacgagatcgtgccgacccgcggcagcaccggctttgccgccacgctggcacgcgccgccgtcaatgaaccggcactgccggaccagatcttcgccccgttcgccgaggccatcgttgctccggcgccggcaccggccgtcgtcgcgccggccaaccgcgcccgtttccagatcgatccgccgcaccaggcacatcacgaaagcgtggcgccggcggtgcagccgccgccgctgccgaccgcagccctgtctgaaacgcagccggaggtcgccgtcagcgaaccggcgttggccgatgccaccgtcgaagccgcgccgacgccgatgctcgccccagccccggtgctgactgtggtcgcccaggacgacgccgagatccgccagctgcgccaggaagtggccggcatgcgccaggtgatcgagcgcgaaatgaaccgcttcaccgacgagcgcctgcgcggctgcccggtgcgcgccaccgcgctggacctgatggacgagtacggcttcgatgctggcctggcccgcgacgtcgccatgcagattccgctggagaccgaggcgcaccgaggccgcggcctgatgctggggctgatctcgcgcaagctgccgattgccccggtcgacccgctggaggaaggcggcgtgatcgcgctggtgggcccgaccggcgccggcaagaccaccaccatcgccaagctggcctcgcggttcgccgagaagcacgcgccgcgtgacgtggctctggtcaccaccgacaccacccgcatcggcgcccgcgagcagctgtatggctacggccggcagctcggcatcgccgtgcacgaggccaacagcggcaccgacctggaccagctgctggaacgcctgaaggactacaagctggtactgatcgacaccgccggactgggcccgcgcgaccgcgcgctggccgcccagctgcagtggctgcgcgccgcgcgccaggtgcgcaccctgctggtgctgccggccaacaccagcttcggcgacatggacgaggtggtccgccgcttcggtgccgccaacctgcagggcctggtgctgagcaagctggacgaaaccggccgcttcggcaacgccctgtcggtggccgtggaccacgccctgccgatcacctgggtgaccgacggccaggacgttccggacgacctgcaccgggccagtgcggccaatctcgtacttcgccttgaagatttgcgccgagcggccgatatgccctgcaacccggagttgaaccatgccgtcgcgtga

SEQ ID NO: 497575 - DNA, 2133 bp, Stenotrophomonas maltophilia
atgctggtaggcacgtacaacccgtggctggtggcgatctcgctgttggttgccgtgatggcgtcgtacacggcgctggccatggcaggacgcacggtcaccgccccgggcagggcagccgcctggtggtggcgcctggggggcggattcgccatgggcctgggtgtctggtcgatgcacttcatcggcatgctggccttcgatctgcccattgcactgggctacgacctgcccatcaccctgctctcgctggccctggcgatcgcctcgtcggtgttcgcactgtggctggtctcactgcgtaccctgccccatcctcgattggccggtggtgccctgctgatgggcaccggcattgccggcatgcactacgtcggcatggcagcgatgcgcatgcagcccgggatcgactacgacccgggctggctgctgctctccctggtggtggcggtggccgcttcgtggaccgcgctgtacgtggcgttccgcctgcgcgcgcagcgcacccgcgtcggtgaccggttggcggccgccggcctgctcggcctggccatcgtcggcatgcactacaccggcatggccgccgcgcgtttcccggaaggcagcatttgcggcgccgcggtcggtgatggcctgcagagcgagtggctggcgatgctggtggtggtgttgacggttgcgatcctggcggtggtgctggtggtctcgtggctggaccagcgtgtggaggcgcagctgctgcggcttcgcaactcgatgctgagcacctcgttgaccgatgcccagcaggaattgacccaggccgcactgcacgatccgctgacccgcctgccgaaccgcctgctgctgcagcggcgcatcgtgcaggcgctggccgaagccgaacagggcggcagccgtttcgcggtgatgttcatggacctggacggattcaagcaggtcaatgatgcctacggccatcaggccggcgacgcactgctggtggcggtggccgagcgtacccgccagctgctccggcccaacgatatgctcgcccgtctgggcggcgacgaattcgtgctggtggtgcgcatcgagcacgacgaggacctgcccaccctcgcccggcgcatcctgcaggcggtgggcagcggcccgttgctgccggacaacgaacttcaagtgaccgccagcatcggcgtggcgatctgccccgaccacgctgccagcgagcgccagttgatggccttcgccgacgcggcgatgtaccaggccaaggaatccggacgcaacgccttcgtgctgttcgccgactggatgaacgacagtgccgagcagcagttccggctgctggccgacctgcgccgtgcgatcggcagcgagcagctgttcctgcactatcagccgaaaatccgcgtggccacccagaaggtggccggtgccgaagcgctgatccgctggaaacacccggagcacggactgatcccaccggaccgcttcatccgcctggccgaacgcagcggcgcgatcaacgagatcggtcgctgggcactggaccaggcctgccagcagctgcgccgctggcgcgacgccgggcatgaaggctggtcgatgtcggtgaacctgtcgccggtgcagttcagttcgccacacctgctgcaggatgtgcgtgaagtgatcgaacgctatggcattgccccgcgccacctggtgctggagatcaccgaaagcacggtcatttgcgataccgataccagccttcgcctgctgcaggcgctgtcggcgctgggcgtgggcatctccatcgacgatttcggaaccggctattccagcctgctgtacctgaagcggctgcccgccacggagatcaagatcgaccacgcgttcgtgcgtgacctggaacacagtgcggaggacgtggtgatcgtctctgcgatcgtggcgctgggccatgccctggacatggacatcgtcgccgaaggcgtggaaaccgccgcgcagcgcgcctacctggagcgcctgggctgcgacttcctgcagggttatctgctcggccgcccggtcgacgcggcgcgcttcatgcagctgcacgacctgccccggccgcgggtggaactggcgcagagcccaccgccgcaacacccgcccggctga

SEQ ID NO: 497576 - DNA, 1509 bp, Stenotrophomonas maltophilia
gtgagcgaatcgcgcatcctggtactggacaacgatgccgtgcgcgccgagcgcaccgttgccctgctggaattcatggatttcaacccgcgctgggtctccgacgcggccgatttcgacctgggccgccagcgccagaacgactggatggcggtgatcgtcggcagcctggacgaaagcccggccagcaccgcgctgtacgcgtggcttggtggcagcagcctgccgccgccggtgctgctggccgatggcgatgccgccacgttcgcccaccagcatggcctgcacgaagccaacatctggccgctggaagcaccgctgcgccacgcgcagatggaagccctgctgcgacgtgccagcctgaagcggctggatgccgagcaccaggccggcgccgtgcaggaccagggcccgaccggcaccggcccggcagtgaccaccctgcgcaccatgatcgaacaggtggccgccttcgacaccaccgtgctggtgctgggcgaatcgggcaccggcaaggaagtcgtctcgcgcgccatccaccagcgctcgccgcgccgtgacggcccgttcgttgcgatcaactgtggcgccattccggccgacctgctggaaagcgaactattcggtcacgaaaagggcgccttcaccggcgcactgaccgcgcgcaagggccgtttcgaaatggccgagggcggcaccctgctgctggacgaaatcggcgacatgagcctgccgatgcaggtgaagctgctgcgcgtgctgcaggaacgcagcttcgaacgcgtgggcggcaaccagaccatccgctgcaacgtgcgcgtggtcgccgcgacccatcgggatctggaaagccgcattgccgaaggcaagttccgcgaggatctgttctaccgcctgaacgtgttcccgatcgacgtaccggccctgcgcgaacgccgcgaagacctgcccgcgctggtggaaaccatcgccgcgcagctggcccgcaccggccgtggcgaagtgcgcttcacccccgaggccctgcaggcgctggccggctacgaatggccgggcaacgtgcgcgaactgaccaacctggtcgagcgcctggccgtgctgcacccgggtggctcggtgcgcgtgcaggacctgccggcccgctaccgtggcgacgccgcgctggccccggtggcgcccgcccctgcccctacgccggtggccagcagcgaagaccgcctggacctgcgcagcttctccttccacacccccggcagcggcggccagccggcgctggaacacggcatcgcagtgaaccgcgccaacgccccggcggccctgcccgacgacggcctggacctgcgcaaccacatggccagcatcgaactgggcctgatcaacgaagccctggaacgcacccagggcgtggttgcccacgccgcccaactgctgggcctgcgccgcaccaccctggtggaaaagctgcgcaagtacggcatcgaacgcgagcaggccgaactggccggctga

SEQ ID NO: 497577 - DNA, 300 bp, Stenotrophomonas maltophilia
atggacgccgtgcttgccccgctgcacgccgaactggacgccctagacgctgcgctgaccaccgtttcgggcgaagactgcgccgcgctgctgggccagtacgatgccaacctgcgcaaggccatggacgtgcacggtgcgatcctgggcgccgatgcgctgcagggcctgctgcagcaccagcacgacctgagcgcgcgcatgcgcctgctgcgcgatgaagcggccagccacctgcagcagggccgcacctcccttcgcgcagcccatgcatacctgcaggcagaatcgctggcatga

SEQ ID NO: 497578 - DNA, 420 bp, Stenotrophomonas maltophilia
atgtacggttccagccgtcagtacgcagagcagtaccgcaaggtcggggtgaacaccgccgtgtccgacgccgacccgcacaagttggttgcactgctgctgaccggagcgtgcgaacgcatccgcctggccgaagcctgcatcgagcgcaacgaccaggcgcgcaagggcaaggccatcggcgaggcctgcgccatcgtcggccacctcaatggttcgctggaccatgaggccggcggcgagatcgccggcaatctgtcggcgctgtacgactacgtgcagcagcgcctgaccgaagccaacctgcacaacgatgtggtggccctgcaggaagccctgcagctgctgaccgagatcgacgcggcctggaatgcgattccgcaggaccagcgccagcgcgccgccggggctcctgcctga

SEQ ID NO: 497579 - DNA, 1353 bp, Stenotrophomonas maltophilia
atggccatcggcaccatcggtaccggtctcgacatccccaccctggttgcgcagctggttgccaaggagcgcgagccgcaggaaaaccagatcaacgcgctgggcacggcggcgacctcgaagctgtcggccatcagcaccatcaagagtggcctgtccaatctgcagaccgcgctggccgctttggtcaagagtgccgacaaccccggctacaagaccaccctgggcaccgatgtcaccttcaccgccgccgtcgataccggcgacaacgccaccagcccggtggccggcacccaccaggtgcaggtgcagcagctggcacagaaccagaagctcagctccaaggcattcgacaaggatgcggcgatcggcggcggtaaattgacgatcggctacggcgacaccagcctggacgtggacattgccgccgacagcaagctggccgacgtggccaaggcgatcaacaaggcctccggcggcaagggcgtggtcgcctcggtggtgaccgccgacgatggccagcacctggtactgaccgcggtggattccggcgaagccggcgcgatcacggtcaccccgtccggcggcaacggcaccctggatgacctggcttacgacggcaccgcctcctcgaagatggaagtgatggtggaagccaaggacgcgatcgtgatcgtggacggcttcacccgtacctccagctccaacaccatttccgacctggtgccgggcgtcacgctcacgctgaccaaggccaacccggacgtgaagcagaccctgaccgtcggccgcgacaacagcgcgctgaaggccaacctgaccgccttcgtgactgcctacaacgcgatcaacacgcagctgaagtccgccaccgcctacaacagcacgaccaatacggcctcggcactgactggcgatgccatggtgcgtggcctgcagcagcagctacgcgggcagctgagccccaacgtgaatgaactgaaggcgctgggcatcaccctggccaccgacggcaccttgacgctggacagcaccaaactggacgcggccatcgccaaggaccccgaatcggtcgccaacatgttcggcgccgacggcaaggtcggcaagtcgatgaccgacatgctgaagagcaacctggacgccaccaccggcaccatcacccagcgcaccaacacgctgaacaagcagatcaaggatctggaaaagcgcctggacgatctggatgcgcgcatggaacaggtgtccacccgctacaccaagcagttcacctcgatggagtcgctggtcagccagatgcagaccaccagcgactacctgacccagcagctggccaagaagaccagcagctga

SEQ ID NO: 497580 - DNA, 1221 bp, Stenotrophomonas maltophilia
atggcacaagtcatcaataccaacgtgatgtcgctgaacgctcagcgcaatctgtccaccagcggcaacagcctggccaccaccatccagcgcctgtcctcaggcctgcgcatcaacagcgccaaggacgacgccgccggcctggcgatctccgagcgtttcagcacccagatccgcggtctggacgttgccgtgcgcaacgccaacgacggcatctcgctggcccagaccgccgaaggcgcgatggttgaaatcggcaacaacctgcagcgcatccgtgaactgtcggtgcagtcggccaacgccaccaactccgacagcgaccgcgaagcactgaacggcgaagtcaagcagctgacctcggaaatcgaccgcgttgcccgccagaccaacttcaacggcaccagcctgctggacggcacgttctccggcgcgcagttccagatcggcgcggatgcgggccagaccattggcatcaactcgatcgtcaatgcccgcaccagctcgctgggttcgggtctgttcgccgcaacccagacgagcactgccgcagtggtggctgatgctgcggagtcggacggcaagatcaccggcatggagatcaatggcgtcgccatcgctgatgtgagcttcaaggccggcgcaacagccagcgacatcaacaacggcatcgtcaacgcgatcaatgacaagatggaccagaccggcgtctacgccaagctggacaaggacggcaatctggagctcacctcgctgaagtcgggcaaggatttcaccttcaccgccggcactgccgacggcggcggcactccggacgctgaccccgccaatccgccggccgatctggccattgacttcgctggtatcggcggcactgccaccgcggttgtcgcttcggagaagaagaccgtcgccgacctggacatcaccacggtggaaggcgcccagcgcgctctgtccatcgttgacgacgcattgacttcggtgaactcctcgcgtgccgacatgggtgcgatccagaaccgcttcacctccaccatcgccagcctgaacaccacctcggaaaacctgtcggcctcgcgtagccgtatccgcgacaccgactacgccaaggaaaccgctgaactgacccgcacgcagatcctgcagcaggccggtaccgcgatgctggcccaggccaaccagtcgccgtccagcgtgatgagcctgctgcagggctga

SEQ ID NO: 497581 - DNA, 1206 bp, Stenotrophomonas maltophilia
atgaacaaccgcatttccaccgggatgatgttcagccagtccgtctcgctgatgttgtccaagcaggccaagatgagtcacctggaacagcagctggccaccggccagcgcctggtgtcggccaaggacgacccggtcgccgccggcaccgcggtcagcctggaccgcgccgtggccgaactggaccgcttcaaatccaacgccgacgtggtgcagaaccgtctgggcctgcaggaaaacgccctgtccggcgccaacgaactgatggcgcgcattaccgaattgaccctgcaggccaacaaccctgccctgtcggcggccgacctgaagtcgatcggctcggagctgcagacggtgtacgacagcctgctgtcgctggccaacaccaccgacggcacgggccgctacctgttcggcggcaccgacgatgccgacgcgccgttcaagctgagtaacggtacggtcagctacaacggcgaccagacccagcgccaggtggaagtggcaccggataccttcgtgaaggatgccctgcccggcagcgagattttcctgcgcatccgcaccggcgatggcaccctggatggtgcggctgcagccggcaataccggcaatggcgtgctcaccacctttggtttgaattcttcttccggcaattggaatggcggcagctattccttgaactttaccgctgccgaccagtacgaagtgctcgattccaccggcaccgtggtcggcaccggcacgttcaaggccggcgaggacatcagcttcgaaggcgtgtcgatgcgtatcgaaggcgcgcccgcggccggcgacagcttcagcatcggcccgtcgggcacccgcgatgtgttttccacggtgcagggcatgatcgatgcgctcaacaccgccgccaacacccccgccgaggtggccaaccagcagaacgcactgcagtcgggcatccgcgatatcgcccgcgccgccgaacagttcatcgacgcgcgctcggccggtggtgcgcagctgaaggccatcgacgatgccgccgccacccgcgaatccaacgcggtcaccctgaaaaccacgctgtcgtcgatccgcgacctggattacgccgaagccgtgggccagtaccagcttgaacagatcgcgctgcaggccgcgcagacgatctttacccagatgcagcagatgtcgctgttcaacgcgatccgctga

SEQ ID NO: 497582 - DNA, 1881 bp, Stenotrophomonas maltophilia
atgtccagcgtcctttccaccggtaccaacgccctgctcgccttccagcgtgccctggcgacgaccagccacaacgtcgccaacatcaacacgcccggctacagccggcagaaggtcgactttgccaccgccgatccgcagaacttcggctacggtgatgtcggcaacggtacgcgtatcgttgacatccgccgcaccgccgaccagctggccatttcccgcctgctggacagcagcggcgaactggcgcggctgaagcagctttccaccatggccgaccgcgtcgatgcgctgttctcggacaccgccaccaatgtgtccggcgtgtggtccaacttcttcgattcggtcagcggcctgtcgtccaacgcgtcgggcagcgccgaccggcagaacgtgctggacagcgccaacacgctggccaaccgcttccagcagctcaacaacagcctgaacacgctcaacagcgaagtgaacaacggcctgaccgcggccgccaccgaaatcaaccggctggctgcggaaatcgcccagatcaacggggtgatcggcagcaatgcggccactgctgcgcccgacctgctggaccgccgtgaccagctgatcgccaacctggtgggctacaccggcggcaccgccgtggcccaggatggcggcaccctgaacgtgtacaccgccggcggccaggccctggtggtcggtaccaccgcctcgaaggtgaccacggtcaccgacccctaccagcccgagcgcctgcaactggcgctgcagacccagggcggcaagatcaccctggacccgaagcagctgggcggccaggtcggtggcatgctggaattccgcgacaccgtgctgaccccggcccaggccgaactgggcaagctggccgtgggcctggcgaccacgttcaacgagacccaccgcaacggcgtggatctgtacggcaacatgggcggcgacctgttcaacatcggcagcccgcgggtgaccggcaataccagcaataccggcactgcctcgatcaccgccagctacggcgacctgtcatcgctggatgcacagaacatcgtgctgaagtatgacggcacccagtggctggcgatgcgttcggacaccggcgccagcgtggccatgaccggtaccggcaccgccaccgatccgctgaagatcaatggcgtggagctggtggtgagcggcaccccggccaccaatgaccgcttcctgctgcagcccaccgcgggcgtggccggcagcatcggcgtggcgatcaccgatacctcgcgcctggccgcggccgcgccgatcaagggcagtgccgcgctggccaacaccggcaccggcaagctgagcgacgtgaaggtggccgacgccagcaacgccaacctgcgcaaccctgccgcaatcgtgttcacctcggccaccgaatacaccatcgatggcaatggaccgttcacctacaccgccggccaggcgatcaccgccaatggctggagtttcgtgctcgatggcgcgccgaagaccggcgataccttcaacatcacccccaccccggtcggttcgtccgacaacagcaatgccctggccctggccaaggtcgaggacgccaaggcattcaacgccggcaccatcacgttgaacggcgcactgggcgggctgaccacgcaggtgggcgccgccgcccgtgcagcggaatattcgctggatgcgcagcaggtgatcaccgaccaggcacagtccgcgcgcgattcgatttccggggtgaacctggatgaagaagctgccgacatgctgcgcctgcaacaggcctaccaggccgcctcgcagctgatttccactgccgacaccatgttccagaccatcctgggagctgtatcgcgatga

SEQ ID NO: 497583 - DNA, 1197 bp, Stenotrophomonas maltophilia
atgcgtatcacccccgcccttgagctgcacccgacgcagcagaacgatccggccaagatcgacaaggtcgcacgccagctggaaggccagttcgcgcagatgctggtgaagagcatgcgcgatgccagcttcggcgattcgctgttcccgggtgaaaacaaggtcttccgggacatgtacgaccagaagattgccgagaccctgacccgcggcaagggcctgggcctgcacgaaaccatcgcccgccagttgtccggcaaccagggcgacgccccggcgctggacacccgcgtggacccggccaaggccagccgcgcctaccagttgaacgcaccggcgcaggcgccgtcgctgccgctggaagatgccagcaacgcactgcgcatcctgcagcagatgtccgcaggcgtgcaggacggcgcgcaatcgtcggtggcaccgatggaacaggcgctggacctgattgccggccgcgagagcagcagcgcgcaccgtgcgctgggcaccgaggatccgtatgcgggcagcattggcggtgccgattgggccgccgccagcgaccagtgggcgcccacggccagcaaccgtggcagcaccgccaccgccgccgacgcgctggccagccgcaccgcggtggcccagctgggcgcacacacgccggaaggcttcgtggccagcatctggccgcatgcgcagaacgcggccaaggaactgggcgtggatgcccgcgccctggtggcccaggccgcgctggaaaccggctggggcaagcgccagatcaagcatgccgacggcagcacctcgcacaacctgttcggcatcaaggccaccggctggaacggccagagcgcggtggccggcacccacgaatacgtggatggcgtgcgccgtaacgaaaccgccagcttccgcgcctacagctcgccggccgaaagcttcgccgattacgtgcgcctgctgaagaccagcccgcgctaccagcaggccctgcaggccggcaccgatgtgcagggcttcgcccgtggcctgcagcgtgccggctatgccaccgacccgagctacgccgccaagatcgccgccattgccggtggcccgaccatcgaacgcgcggtagccgcggtgaccgatgccggcgcccgccttggccagaccttcgccagcaccgcaaccgcggcgctgggtatcacccgccgttga

SEQ ID NO: 497584 - DNA, 1224 bp, Stenotrophomonas maltophilia
atgggcttcaacatttcactgtccggcatcaatgccgccaactccgacctgagcgtcaccgccaacaacgtcgccaacgtcaacaccaccggcttcaaggaatcgcgcgccgaattcgccgacctgttctcggccaccagctatggcctgtcgaagaactcgatcggttcgggcgtgcgcgtttccaacgtggcccagcagttcctgcagggcaacaacgagcagaccgggcgcagcctggacatggccgtttccggtgagggcttcttcaccatgaacatgaacggtgcgcgcgtctacacccgtgccggcaacttccagaccgattcggccggctacgtgatcaacccgcagggcgcacgcctgcaggtgttcgcgccgaacgccgatggcaccaacttcgacgccggccgcctggtcgacctgcagctgctgaccaccgacagcccgcccaagcagaccagcgaagtgaaggtgggcttcaccctgccggccaacgccagcgtaccgaccgtgggcaccttcgacccgaccgattcgaacagctacaacttctccagcggcggcatcaccgtgtacgactcgctgggcgtcagccacacccaggtctcgtacttcgaaaagctgccgggcgtgaaccagtggcgcgtgcacaactacgttgacggccaggccgcgggcacgcccaccgacctggaattcgacaacgccggcaccctgatcgacccggccgacggcaagatcagcctgggcacgttcaccccgaccaccggcgcgggcgtgctgaacatgaccctggatgtgaccggctcgacccagtacggcgagaagttcgccctgcgcaacacccagcaggatggctacgcggccggcaagctcaatgaaatcaccgtttcggaaagcggcgtggtgtttgcccgctactccaacggcgatgacaaggcgctgggccaggtggcgctgaccaccttcaacaatccgcagggcctggaagccaagggcaacaacctgtgggtggaaaccttcgattcgggcaccccgcgcaccggctctccggacacctcgaacctgggcaagatccaggccggcgcgctggaatcgtccaccgtggacctgaccgagcagctggtgaacatgatcgtggcccagcgcaacttccaggccaacgcgcagatgatcaccacgcaggaccagatcacccagaccgtcatcaacatccgttga

SEQ ID NO: 497585 - DNA, 681 bp, Stenotrophomonas maltophilia
atgaccaccgtctctacccagaccagccaggacgtgtacagcgccctgggcctgactgcccccaacagcaacgccagcacgcgcaagagcacgctggatcaggccgatttcctgcgcctgatgaccgaacagctgcagcaccaggacccgctgaagccgatggacaacacgcagatggtcgcgcagatggcgcagatgtccaccgtgcagggcattaccgatctgaacaccacggtgcagggctttcaggaatcgatggccagcgaccaggtgctgcgcggcgcggcactggtcggccacgaagtgctggtgccttccaccaagatggtgctgggcgatgaaggcggtgccagcggcgtggttgccgcaccgggcgccggcatcgtgaacgtgacggtgaccgatgccaacggcaacacggtcacccagctgagtgttgaagctaccgccgccggcgaaaccgccttcgagtgggacggcaaggatgccaacggcaaccgcgtggctgccggcgattacaccattgccgccacccacaccgacaccgctggcgcggaaaccaagctgtccacctatgtgcaggcgccagtggaaagcgtgaccgtcggctcggacggcctgtacctgaacctgaagggcctgggcacggccccgatcgactacgtgctccgcgtcagctga

SEQ ID NO: 497586 - DNA, 2103 bp, Stenotrophomonas maltophilia
atgcccgcagaaccgaccggcaacgccccagttcccgacccgcggatggcgcaggcgctgagccgtgaccggcgacgggtggtgttgagctacctggtgatggcgctggcctggatgatctccaccgacagcgtggtgcaggcgctggtgcccgatccgcagcaggcggccctgtggcagggcctgaagggctcgttcttcgccctggccagcgcgggcctgctgtacctgctgctgcgcccgctggccgagcacgtgctgcatacccacgcccgccagcaggcctcggagctgcgcctgcggcagatgttcgagggcaaccccggcccgatcctcgtctatgacctggacacattggcgatcctcgacgccaacccagccgcctgcaccgctttcggctgggagcgcgatgagctgctggaacagaccatcgacgccttgtggccacccggccagggccaggcgctgcaggccaagctggaggcgatccgcgaggcgcccgacgagctgtgcatcctgcgcgcgcagctgcagctgcgcgatggcgcgctgcggcagatggaactgcgctccaacgcgatcagttacgacggtcacaatgcgcgcctgctgatcgccatcgatcgcactgccgaggacctggcccagctgcgtcgcgaccaggcgctggcacgggtggaagaagcccacgaactggcccgcatcggcgcctgggagctggacccgtccaccgggctgggccgctattccaaccaggtctatcgcctgctcggccgccgcccgcccgaagcccgccgctggcaccgcttcgacgaactgctggtgccggccgacccggccaccgccacccagaccgagcagctgctggccgagctgtgctccggcgagccggtacaggtggacgtgctgctgccgctgctgtcgatggacgggcgcgcgctgatggtgcacctgcgtgccgccagtggtctcgatgaggctggccgcaaccgcgtgctgggcacgctgcaggacgtgaccgaacgcgagcagtcgcggcgactgctgcgcgagcgcgaggagcagttccgcgagctggtgcgggtactgcccgacggcgtggtgatcctctccgacgaacatgtgttgtacgccaacgcctgggccgccggcctgttcggctacggcagccataccctgctgggcgagcccttgtcggcgctggtcgctgccgcagacctgccgcgggtgcgcagccagctgcgtgccggccagccgcacctgggaccaggccacagcagcgtggtggccatgcagcgcggcgacggccgcagcttccatgccggcctggcggtgggcgacgtgcgctacggtggccgcgactgcaagctgctgatcgtgcgcgacctcagtgattccgagcgcatccgcagcgcgctggaaaccagcaaccgcgaactgcaggcgatggccgggcggctgttctcgctgcaggaggacgaacgtcgtgcgatttcgcgcgatctgcacgatgacatcggccaggccatcaccgcgatcaagctgtcggcgcacgcggcgctggaagaggacgatccgcagcggcgtgggcaggatctggcgcagatcgtcagcctggccgacaccaccgtggccaaactgcgcgacatctccaccctgctgcgccccccgcagctggatgcactgggcctggaggcagcactcagctggcaggcgcgggttctgttccgctcctcgccggtggagctgctggccgagatcgagccgttgccgcatcgccccgacaacagcatcgaacaggcctgcttccgcatcgcacaggaaagcctgaccaatgcgctgcgccatgcgcgcgccagccaggtcctgctgcagctgcgcgatgtcggccagcgcggcctgcacctgcagatccgcgatgacggcgaaggcttcgatccggacggcccgcgcggcctgggcctcatcgtgatgcgcgagcgcgcacagagcgtcggtggccacgtgcggattgaatccgcgcatggcgaaggcaccctggtcgatgtccacctcccctaccaggcggccagcagggctgccgtcgattcaccggaatactga

SEQ ID NO: 497587 - DNA, 2760 bp, Stenotrophomonas maltophilia
gtggaccaagggatcatcgccagcctgctgcagcacccgcttgcgtcggcgctggtcatcgtcgaccgtaccgggcgcccgctggcggccaatccggccgcgcgcgagcatggcctgccggccaccgtggctgcctatgcgccaatgctggaagatctacgcctgatggccgccgatggcggcatcgtgccctgcacgctgccaggcggcccgcgcggccactacgacggccacctgcgcgccgtgcatgacggtgccggcaacctgctggcgttcaccctgagcattcccgagccggtgccggtcgatgggggtgggcgctgggaactggcactggacagcgccggtcatagcctgtgggactgggacatccccagtgaccgggtggcgcgcacgccggcgctgggcgacgagacggccaccgaactgctgtcgcgcgtgcacagcgaggacatcgaccaggtgcgtgccgcgctcgacgagcacctgcgcgggcgcagtgagcagtacagtgcacagttccgcttccgccaggccgatggccagtggcgttgggtgctggatcgcggccgcgtggtcgcgcgcaccgctgatggccagccgctgcgcatggtcggcacgcataccgatatcgagcagcagaagcagctcgaatcgctgctgcaggaacagcagctgcacctgagcgaggcccagcgcatcgccagcatgggcagctggtcgttcgaccccaacagcgggcacttctggtggtcgccggaactgcgatcgctgctggcgctggagcacggcgccgtgcccggccagcggcgctggctgaagcagctgcatccgcgctcgcgtggcgcgttgcgtgcggcatggcggcggctgtggcgcgatggtcgtgccgccaatctcgagctggagctgacccgtggccatgagccatcacagcacctgcggctgtggatgcagccgctgctggacatggacgggcagcccaagcgcctgctcggccaggtgcagaatatcaccgaacagcaccagaccgacgcgttgattcgctggcgcaccgaactgctgaaccgggtttccgcgctgggccgcatcggcggctgcgagatcgaggtgcagacccggagcatgcaatggaccgaggaatgctatcgcatccacggcctgcgcaaggagccgatcaccctcgatcaggcgatggcgctgtataccgaagactcgcgcgatgcgttcgaggcggcactggcccgcatcgccaacggcggcctgcccgagcagctggacctgtgcttctaccgccagtccggcctgcgtgtctgggtgcaggtgctgatcgagctggatcgtcgtgacggactgccgccgcgcttcgtggtgcttttccgtgatatcacccgcgagcgcgaggccaacgagcgcattgaactgctggcccactacgacctgctgaccggcctgcccaatcgcgtgctgctcggcgaacagaccgccgaggccatcgaggaggcgcgtgatcgcggcacctcgttggcgatgctgttcatcgacctggacggcttcaagaccatcaacgacagcttcggccacgccacgggtgatgcgctgctgaaggctgccgcgacccgcctgcaccagaacctgcgcaacaatgatctgtttggccgtttcagcggcgacgagttcatcgtcgtactgcgcgacctggctgagcccgaggatgcgggacatgtcgcccgcaagctgatcgcctcgctggccgagccgctgcgccgtggcgagaccacgctgaaggtcggtgccagtgtcggcatcgcgatgctgggtgatgcgcagaccgatttcgattcactgctgcgcgctgccgacgccgcgatgtacgcggccaaggaagccggacgcaacacctaccagtattacagccaggatgccctggcccgcatccagcgcaggctggagctcgagcacgcgctgcacggtgcgatcgagcgcgaggagttcagcctggcctatcaaccgctgctgcatgcccaccagggcgagccgccggcaatcgaagcactgctgcgctggcatcgccccggcatcggctattgcagcccggccgagttcattcccatcgccgagaaatgcggcgagatcgtacgcatcggcgactgggtactgaacgaagcctgccgtcaggcaaccgcctgggaccgggctggactgcacttcgaccgcatcgcggtcaacgtgtcggcggtgcagctgcgcgaccgtggcttcgccgaacgtgtgatcgagatctgccatgcccacggctggccgccgcagcggctggagctggagctgaccgaatcggcgctgatccgtgacaccgacatcctgcgccactgcttcgacgtgctcgaacggcacggcgtgccgctggcggtggacgacttcggtaccggcttctccaacctcaactacctcaaccgcttcccggtgggtcgcctgaagatcgaccgtagtttcgtgcagggcatgctgcacgattcgggcacggccgaagtgacccaggccatcgtgcacctgggccacgcgctgggcatgaaggtggtggccgagggcgtggagacgcaccaggaagaagacatgctgcgccgccagggctgcgacgaaatccagggttacctgtactcgcgcccgctcagcccgcgtgacctggcgcagtggctgcgtcagcagcgtccgttaccgatgcgcaccgacgccagcagcgaagcagtgctggtgcgctga

SEQ ID NO: 497588 - DNA, 1020 bp, Stenotrophomonas maltophilia
gtggatcccgattcccttggggcgcttcagcaggcgctgaagacgtttggagcgttccagcagccctactccgctccgatcaatgcgtacgatcctgaagcgggtgtgatcgatgcagcagttgaagtgtccgcggggtgcgtgcaagacggcccgccagtcatcatccttgacgatgatgccgaacaggcgccgcgacgttatctgatccttaaagccccgtggcatgagcttccaacgggcgccttgttgcttgtctccggaagcaaggcaagcgccattccgggcgaggaatcgaacctggagcttgcacgggccgagagcatgctgacatttctcaacctgctgccggaaggtccggaggaccgggaccacccggagaacgtctcggcagtcgtggataccgatacttccgccctcttcacgacgagccttctggatcaactgcaaaccagtactccaggctcgcctgttgctgacaccatgctgacgctctggaaaggcaggttcacggacgcattgctggcactgtggcagcgcgacggtcttgcgcgctatcacgatgatcgactggctttggtgaaccctgcggggtacaaatcggtgctcgccgcccttctggcgggcagccctctatggggcaaagatgatttccatgtctatgcgatctcgccattcggccagatgctgatctgtggcgagcgaaccggagtcgaactcacgcttgaaccccacgaaggttacctatgcgcgccagcaacactgactcttccagcaagcaacatcgaccgcgacagacgcctgcacgacttcctgcttgcattggatgctgccgaactggatgttctggccgaggacggggagccaatgttctggcgagcccgtgagatgttggggccgctgggcgacggagagatttacagctcgaaggagccggtgtcagagcacggctggcggctaggcagcctggtaaaacgcaaggcgctggatgtgctcgcagagcttgcgcagcgtcgctga

SEQ ID NO: 497589 - DNA, 381 bp, Stenotrophomonas maltophilia
atgaacatgctcccgctgaccgctctgctcgtcgcccttgccgtgtccgccagcgcagcgcccgtgcacgccgccgacactctttccacctccagtgactgcgtccagctgggcagcgaccagcaactggtgcgcgccggcgcctcgcgcaacatcctgctgcgcaatggccaggaccactacgtcgtgcatttccaggacgactgctcggcggcaggctactcgcggaaactgagcttcgctactgacggccagcagggtctgctgtgcgctgccggccgcagccagctgaacaccgattccagccgctgcatcgtgtcgcagatcgaaccagttgacgaggccaccttcaagaagaaagcccgccagcgcagccgctga

SEQ ID NO: 497590 - DNA, 639 bp, Stenotrophomonas maltophilia
atgaacttccgcttccgccgtttccttgccaccaccaccctggccgtggcctgcgccgccgccggcagcgcctgggctggcgcccgcgatgacctgaagaccttcaccagcggcctgaagggcctggatggccagttcagccagcaggtgttcgacagccgcggcaaggtgaaggaatcgaccagtggtcgcgtggccctgtcggcgccgcgcctgttccgttgggaatacgtgcgcccgcacgaacagctgatcgtggccgacggcaagaaggtctggatgtacgagccggacctggagcaggccaccgtgcgcgagcagggcaaggaagagcagaacagcccgctgaccgcgctgatcaacccggcgctgctggagcagcagtacgacgtcagcgaagaggccgcgcagcgcgacggcctgcagtggctgtcgctgtcgccgaagcgcgagaccgaagccagtttccagtacgccgcgctgggcttcaacgcccaaggcctggccaagatggaaatcaccgatgcggttggccagcgtaccgtgatcagcttcagtggctggaagcgcaatccgggcttcgcggccggcaccttcagcttcaccccgccgaagggcaccgacgtcatcggtaattga

SEQ ID NO: 497591 - DNA, 390 bp, Stenotrophomonas maltophilia
gtgcaggaaatgattctgccgttgaagcgctacgcccagttcgagggtcgcgcgaaccgccgcgagtactggatgtaccagctgttcctgttcctggtcgcaacggcagtgatgctgctggccggcgtgctggcgatcctcctgcgcaacagtgccgaagcgctggccggcatcctgatcggcatggtggtgctgctgtgtgtgatgtggctggccacgatcgtgccgctgatcgcagtgaccgtacgccgcctgcatgactgcaaccagtcgggctggctgttcctgctggcgctggtaccgggtggcgggatcgtgatcatgatcttctcgctgctgccgggcacgccgcaggagaacgtgtatggtccggtgcctacggggccgtga

SEQ ID NO: 497592 - DNA, 750 bp, Stenotrophomonas maltophilia
atgttccgcaccgttacctgcagcgtgctgctcgcggcaatgattgcttccgcttgcgctgccaatgcggcttcgacctctcaggtttcgctgaccgacgcggccgagaacgcctcgctgatcgagacccgacattccaatagcgacggtgccgctgtgacgtcgatgaagacgcagtacttcgccaacgaggaaatgtcggtgagctgggacgaccagcaggtgctggtgctgtgcagggagacggcgtacctgaagattcctgcgaccaagctcaaggccggtgcgttgacctccgaacagcggcagatgatcgtctatcaggcgctgatgtcaggcctgggggctgtcgcgggcgtcatcgggccggccggcgaggtggtggccgtggccgatgacggcagcgagacccgcagcgttggcgaaagcagctgggcgtatggtgttgagcgatacgaggtgatcacccagcggctgccggacggtgcacttcgggtccggacccacaagacggaaaccgtgaataccacgcctccggcgggcccggacgacatgttcagtaccgaggacgatcaggcggcacgcctgtccgagctggcgccggtggggagctggaccgaagtgctgatccaaggtggcgcacggctgccgcacatggacccggcgacgtcgctgaaggggtggatctcgatgggcgacgaccaggcggcgaccgtgggtgaggcgcgcaagctgcacgactgcaagtag

SEQ ID NO: 497593 - DNA, 2313 bp, Stenotrophomonas maltophilia
gtgaagatgcgcgatcgaatgcgtacatccaccctcctgctgttggcgctcatcctgcttcccgccgcgtcggccgaggatgcgtcatcacttgaatgggggccggggcgcgaagtccgggtggcgaccacgccgtcgctgcacccggtacccgctgcactcgctggcggcacgacgttgccaagcctggcccatggctacgccaatctggttgcacggcgttcgcagctgcagttccaggagcaccagcatcccagcaccggcgcatcggtggctgccgtctgcagacgcgaagcggatctggtactggtgattggcaaccacctgcagccaccctgccccggcctggtggcatccagcacgttccgcggtggcaagacgatgctcgccggccgcagcggcgaacgcctgccacgcgatatcacggaactggaccaccaggtcctggccgtgctcgaaggggggccgtatgcgggatggctggccgcgcgccatccgcacgtccgcctgctacacctggccgatcggcacgccacgctggcagctgttgaaaacggcaccgccgatctggcaatcggcctggaaacgaccctgcggcccctgatccgtcggcatttcgccgggcacttgcacctgcagcctttcgacagcgatttctccaccgacctgcacctgcttgcgcgccacgaagatcgccagctgctggagcgcatcgagcgggcattgcacgacattacgctggaggaacatgccggcctgttgcagctatgggcccaacaggcggcccccgcctcgctggagcacgtcctggactggatgcgtcagctgcccccgcagtggctgccggccctggctgccgcattggcagtcgccccgttcctgtggcatgcctggcacaggcgcctgcgtgctgaaggccgtgcccgcgcccgcgcgattggcatgttgagccacgaggtgcgcaattcggcccaggcagtccttgcctcgatcgacctgctcagccagccgtcggcgcccatggggcagcgagaagcgctggcggctgcacatgccgcgggctcctcgctgcgcaacctgctcaaccgctcgctggagttctcacgcctggccagcggcaccttcaagccgcacgtagaaccttgcgacattgcacgactctgccgccaatcgctggatgcaattcgtccccaggctcggcagcgcgggctggcgcttcgcttcgactgcctccccgagccctgccccattgtcgccatcgatccggaaggactgcgccagatcatcgacaacctgctgggaaacgcactcaagttcaccgacgtcggcggcatcgagctgcgccttcaactgacgccaggcaaccaccctcgtgagctcatgctggatgtgatcgacagcggaatcggcatcactgcagagcaactcaccgtgctgttccagccattccagcagggcggagacggcaaggagcgcggaggcagcggattgggactgatgatcgcgcatgcgcttgcccgcgcaatgggcggcaacctgtcagtacacagcgtccccgggcgcggcagtcgcttcaccctgcgcctgccggtacgccccgccaaggccaaggtcacgtcaaccgccagcgccggcgcgggaacgccgctgggcggggttgagctgctgctggtggtggaccacgccctcaatcgccgggtcatcagcgagcagctgcgccgcctgggtgccgatgtacacgcgtctggcgacgccgccagcgcgcttgccgagcaggccgtgagaccgcgcagcgtgatcctgctcgacatcgggctcggggacatggatggctatgcgctggccatgcagttgcgcaggcaggcgcgcgccccgctgcgactgatcgcgctgtcggcacgccgtgatcgtcggcatgtggcgcgctgccggaaagcagggttcgacgccaccctgaccaagccactacagcttgagtcactgctgcgggcgctggagctgccggcgaccggacaggccatcgcaacgggcacagccgcaggcgaccccgactacatcacggacatcggccacgagctgctgcggatcgaacaggccatcgatgacgccagtgccactgacctatgccatcacgcgcatcggcttcagggggccctgcagatatacggggctgccgcagaggcggacacggcgggcgacctgtgggagctgggtcgcgacgccacacccgactgggccgatgcgcgacgcctgttgcgcgtccttcagcaatggcatggctcccgcgctgcggaagccatgcccggggcctga

SEQ ID NO: 497594 - DNA, 627 bp, Stenotrophomonas maltophilia
atgaatggacctcctgccccgcgcccgctgcgactggcactactggacgaccacgaagtcgtccgtcgcggcactgccctgcacctctcccgcgacgcccgcttccgtatcgtcgccagccacgcccgcagcgacgaactcatcgacagcctccagcagatgcgggtggatgtcgcgatcatcgatctgaccctggcccgcgacgatcgcagcgcgtccgagctgaccccgctgctgcgcgagcactttcctcgcgtcaccctgctcgcttttgcgaccctttcaccctcgatccacatcaaccagctcatcgccacgggtgtcagcggcgtggtcagcaaggccgaaccactgccgatgctcgcggacgcgatcgtgcgggtatcgcagggccttccgcgactgccacccgactgcacgctgccgggagactgcgaagagctcagccgcaacgagcgcgaagtactggagctcctgctggcgggcctgaccgtttcggaaatcgcgctccgccgccatcgcagcatcaagaccgtcagcacacagaaggttgcggccctgcgcaagctcaggctgcgcaacgatgccgagatctacgccatgcggcagcagctggaatcaccgtga

SEQ ID NO: 497595 - DNA, 507 bp, Stenotrophomonas maltophilia
atgggcagccacgcagaagcgacatggaacgggcttgaagtgcggcagatccgtgcgagcgacctggatgtgatctgtgcccaccgcgaagccatgttccgcgagagtgggcggaccgaggaggtcctgcgggcgatggcggctcctttccgtgcctggctggcgccgcgcctggcctcgggcgagtacttcggccatgttcttgcagaccagggcagaaccatcgccggcattggcctgatgctgatcgactggccaccccaccctgcccatccggaacagggctgccgcggctacgtcctcaacgtgtatgtggaaccggagtaccgccgccggggcatcgcccggaagctgatggtcctggcagaccacgccttcgccgagcgtggcgccacctacgcggtcctgcatgccaccgcgcaagggaagccgctgtacgccgaccttggctgggccggaaccagcgagatggcacgcagcctgcgcgacgaggggcgaacgccctga

SEQ ID NO: 497596 - DNA, 546 bp, Stenotrophomonas maltophilia
atgcatcgcttctgggccaatctgctcggcaaccagctggtctggctgtgtgccgtggccggcgcgagccgcggctggcagtggcccgcgctactggccgcttcgctctacatcggcagccagctgttgacctcaccgcgcccccggctggatctgcggctgttgatgttggcactggcctgcgcatggctggtcgacgccagtgccgccgccagcggcacggtgcgctacgcggcggccccactgggttgggcgccaccgccgtggatcatggcgttgtgggcggcgttcgcgatgacgctgaccacgtcgatgcgcttcctgcagcaccacccggccctaccggccctgttcggcctgctgctggcaccgctggcctatctgtctgccgcacgcggtttcgacgcagtgcggttcgcagatcccgtatggccaggactgctggtgctgggcgcgggctggagcattgcgctttccctgctgtgccggaccgcccgtcgcggcatgcacatcccgcagccgcccttcgcaggagcgtcgtcatga

SEQ ID NO: 497597 - DNA, 1278 bp, Stenotrophomonas maltophilia
atgcgcatcgcggtcatcggctcgggtatcgcggggctggccagtgcctggtggctggatggccagcacgaggtcacgctgttcgaggccaacgattacctcggcggccacacccatacccacgacgtgcaggtggcgggccgaggcatggcggtggataccggtttcatcgtcttcaacccccagcactatcccttgctgtcggcgctgttcgacgagttgggcgtggcctcgcaaccgaccacgatgagtttctccatgcacagcgagcgcagcggcgtggagtacaacgccacctcgctggatgggctgttctgccagcgccgcaacctggtatcgccgcgcttctggggcatgctggccgatctgcgccggttctatcgcgacgcgccgttgctgctggccgaagaagacggtcccacgctcggcgagtacctgcgcagccagcgctatggcgaggcgttcatcgacgagcacctgctgccgatggcctcggcgctgtggtcctcgccgacggccaccgtgcaggcgttcccggcgcgctacctggcccagttcatggccaaccaccagatgctgcagatgaccgggcggccaagctggcgggtggtcagcgggggatcgacgcgctacgtggatgcgctgcgtcgccgctggcgcgtgcatgagcggctgcaatgcccggtcagcagggtcgagcgcatgccctggggtgcacgcgtgcacagcagcgccggcgtggaggccttcgacgaagtgatcctggcgtgccacagcgaccaggcactggcgttgcttgccgacgcagatgccatcgaacgtgaggtcctcggcgccatccgctatcagtccaacgaggcggtgctgcataccgatgcatcgttgctgccgcgcaaccgcaaggcgtgggcggcctggaacgcgcacgtaccacaggatcgcgcggcgccctgcacggtcagctactgcatgaacctgctgcagggcctgccgggcgacatccccctggtagtgaccctcaaccgcagcgaggcaatcgatccggccaaggtgctgcggaccctgcattacgcgcacccggtacacgaccacgctgcagtacgcgcacagcagcgctgggcggaactgcagggccgccgccacacatggtttgcaggcgcctattggggctggggattccacgaggatggcatccgcagtgcccgccacgtggtcgatgccctgcaggcctgcgctccacatcggaacgtatccgcctcggatgaggtggcggcatga

SEQ ID NO: 497598 - DNA, 768 bp, Stenotrophomonas maltophilia
atgcgcactgcctggctgctgctgtgcctgccccaagccgcgctggcggcaccctggttgcgaagcgagggcgtggccacctccgcgcagggcgacctcctctaccgtgaagtgcactggcgacgcgaggcaacggagggcgccgagcgctgggtgctgtaccagtgcccggatggccaacccttcgcccgcaagcatctgcccgccagcgcccgcccacaggcacggggatattcgctggaggaccgccgcagcggccagaccgccgaggtcgacgccgccggcgactcggtgtcgattgcatggaaggaggatgccgccagtgagctgcgcaggcgccggcttgaacagccgccggacgcggtgatcgatgcggggtttgatgccgcagtacgcctgcactggccggcgctgctgcgcggcgaacgcatcacactgccgttcctggtgcctgcacgccagcgctacttcccggtgcaggtgcggcgcgtcggcccggtacgctggcagggcatcgacgcccaggccatcgaggtcagcctggacacctggtacggcggcatcgcgccgcgcctggccctggtctacgccacggccgaccgtcgcctgctggagttccgcggcaccagcaacctgcgcgatgcgcgcggcacttatccgcaggtgacggtgcgcttccggtcgccagctgccgagcgaccggcaggtgactggcaacaggcgtgggcgcagcccctggccgagcgttgcgccgtgacgcccaggtga

SEQ ID NO: 497599 - DNA, 693 bp, Stenotrophomonas maltophilia
atggccgggacgggcgcattacggattctgttgaccggtgccgcaggcctggtcgggcagggtgtggcgctggcctgccaacgctcaccgcaggtgtcccgcctgacagcgctggtccgccatccaggaagtctgagcggcgccggcagcgaactgatcgttccggacttcctgcgtatccaggaccggtcggatgaactggccgggttcgatgcctgcttctactgtgccggggcgccaccggtcggcacggcagaggccgagtaccgacgcgtgaccctggacaccaccctggcggtggcccgtgcctgggcggctgcgaatcccgaagggtgctttctgtatgtatccggtgccggcgcggaccctcggagccggctgatgccgttgaggatcaagggcgagaccgaggtcgcattgcacggcctgccggtgcgcaccgtgatgctgcgcccgggcggtgtcaggccggtcccgggcaccggcacccgtcatgccctgttgaagcccctgtactggggcggtgcgccgctgatgaagctggccagcgcgattgcgccatcgctgatgaccagcaatctggctctcggtcaggcgatgattgcactggccggcagggagcatccgccggccacggtggagtgcgcggacatcaaccggatcgccgctggcctaggcgatccggcctcctga

SEQ ID NO: 497600 - DNA, 486 bp, Stenotrophomonas maltophilia
atgaagcggagttcgcaggttttcgggctgctgggatgggtggcgatcaccttcgtcgcggccgccctgggcgcgtgggcgtccacatccgcggccagcttctacgctaccctcgatcttcccccgtgggcaccaccggccagtgtctttggtccggtgtggaccctgctctacgccatgatggcgattgccgcgtggttggtgtggcgcgaacgcggttggcgcggggcacgtccggcgctgatgctctacctggtgcagcttgccgtcaatgcgctgtggagctggctgttcttcggctggaagctgggcgccctggccttcgttgacattcttgtattgattgcgctggtttgcgcagcgatcgtcgcgtttgcgcgcatccgtccgactgcggcggcgctgctgcttccctatctggcctggatctcgttcgcctcggcgctcaactttgcggtatggcgagccaatcccgggctgctgtga

SEQ ID NO: 497601 - DNA, 123 bp, Stenotrophomonas maltophilia
atgcccgagcgctgccaggaagatctgccgccaggattcgacctcggcagagaactgagcaagggattcggcgaccgcctggtcgatggcctcattgaaacgaaggatgtcatcgatcgatga

SEQ ID NO: 497602 - DNA, 264 bp, Stenotrophomonas maltophilia
atgataggacgcggcggactcggggccgggtttcaacggtgcaagcccgtgggactttgcgacctgctgggaggctgtttgaggcgatctgagatcgtctacgaccgcctgaagaatctggggaagatgattccgaagttgctttgcgctgaactcgacggtatcgggcgcctgcgtttcggcgaatgccaccgcgtcttcgaggatttcccgcgcattccgttcgataaaatcagccaggcgcatcgccaaacccgtccttaa

SEQ ID NO: 497603 - DNA, 570 bp, Stenotrophomonas maltophilia
atgaccgccgtcaacgaactacttgacaacgtgaaaattcgcttgaatctcgcgtccgatatggctttggctgaaaggctgaccgttacccggtcactggtgtcccgctggcggaagggcgacacgccgctggccgatgagcgaattgcgcagatttgcgcgctggcgaagctggatgggccaacgtggattgcgatgatccatgccgagcgcgctacctccgcaacggaacgtgccctctggcgcctcatgctggacagaatgagcgcggcggctgcggtcgtcgcgctggtagcgctgtcgatgccgggcctcgcaaacgaaaaaaccgcccaaattcaggcggttagcggtgccgagaacggcggtatgtatattatgttaccaagaggtctacccatacgaaccccaatcagtccagtcctggccgcacgctgctccccttcaagcaaccctcccaacgcccgcagaacctggctccacggcgccaacttctcacccagcatgcaggcccgccggtgtaggctcgacgcaccacttaaggacgggtttggcgatgcgcctggctga

SEQ ID NO: 497604 - DNA, 228 bp, Stenotrophomonas maltophilia
atgaccaacccgctcattaccttcgtgctgctagtggccatcgtggccgtgtcgattggcggcgctcgcatcgtttcgtggctgctcgacaggcgtgactacaccgcctcgcagcggtcccgcgaagcccaggtcatcgcgctcgcacaggctgagattgccgccacgaagcgcagtgatctgctcgctgccgctgagctggccgaagcacaggagcgagtcgcatga

SEQ ID NO: 497605 - DNA, 177 bp, Stenotrophomonas maltophilia
atgagcatccattccttcgccgccgaacttgcggagaccgatatgggcttcttcgcatgcgcggtgctgattgtcgtctgcctcggcgtcgcaatggcttcaatcgtgattgagcaagcatggtttgggatccgtcgcctgtggaagctctggaaggggcgcaccaatggtcggtga

SEQ ID NO: 497606 - DNA, 1251 bp, Stenotrophomonas maltophilia
atgcagggcgcgcgcgaggatgtgatcgtggtcggcgccggtgccattggactggctgccgcactcgcgctgcgtgcacagggccggcaggtacgcgtgatcgaccgtgggcgtgtcggcggcgcgacttcgcatggcaactgcggcaccatcacccccagccacgcgccaccgctggcagcgcccggcgtgccgttgcgcgcgctgcgctggatgctcgatccgcgtgcgccgctgtacgtgcgtacacgcctggacccagcattgtggcgctggctgctgcagttcggggcgcgctgcaacgcacgcgactggctgcacgccacgcgggcacgcggcgcattgttgaatgattcacggctgcgcctggcgcagtgggtgcagacgcatgcgctggactgcgagttcgaggcgcgcggtctggactatgtgttcggtgacgcccgcaatttcgatcaccacgctgccgagtgtgaggcgctgaacgcacagggcattgcctcggcgcgcatcgatggcaccgactacgcgcgcgacaatccggcgttccatgatcgccttgccggtgcgatccacttccccggcgatgcccagctgcgtccggaccgctacaccgccgaactggcgcgcgtgctgcgcgcacagggcgtggtgatcgaagaacagtcggacgtggaggttttcagcgccgacgcgcagggtgtgcgcgtgcgtgccggtgaacgcatgctgcaggcgcgcgagctggtgctggcgaccgggccgtggtcaccgcgctgggcgcggcaactggatctgcgcgtgccgatccaacccggcaagggctactcgctgacctggtcacgaccggcgcaggtgccgcagcgtccagtcgtgctgaaggaccattccgtgttcgtgatcgcctggcgcgaagcgctgcggctgggcggcaccatggaattcgccggtgccgatccgcagctgcgcacgacccgcctgcaggccttgcagcaggccgccgaccactacctgcgcgcgccacgtggtgcgcggctgcaggagcagtggtgcgggtggcgccccatgagcgtggacgacgtgccgttgatcggccgcgcgcccgcgcatcctcacgtctggcttgcagcggggcatggcatgctcggcatcagcatgagcgccggcaccggccagctgatcgccgatctcgtctgcggccgcacgccggcgatcgatcctgccccttaccgacccgagcgattccgatga

SEQ ID NO: 497607 - DNA, 3024 bp, Stenotrophomonas maltophilia
atgaccagcagcaagcacgtcgcaaggttgaagcgtaccgccttggcggtcgtcctgacttctttcatcggcgccgcagccgcgcagagcacgaccggttcgttgtacggcagtgcgcctgccggcacgaccatcgtcgtgcagagcgatacgggcctgaaacgctcggcgaccgtcgacagcaatggccgctacaacctcggctcgttgccggtgggcaagtacaccatcatccagcagcgtgacggccagaccgtcgatcagcgcgagaatgttctgctgaaggtcggcgttggcaccgaggtgtcgtttgccggtggcagcagtgccgccaccacgctggaggccgtgaacgtcgtcgcggcgaatgtgccgaagatcgatgtcaccaatacggtgtccaagtcggtcattacgtccgagcaactggatgtgttgccactggggcgcagcgccgaagccatcgcattgctcgcgccaggtgttgtcgcaggcagtggcgcgttcagcaatggctcgcgttcggtgctgtctttcggtggttccagtgttactgagaatgcctactatctgaatggcttcctggccaacaatccgctcagcaacctgggtggtatcagcctgccctatgggtcgatcgaccagcaggaaacgttcatgggcggctacggagcgggatacgggcgctccaccggtggtgtgatcaaccagctcggcaagcgcggcaccaatgaatggcatttcggcgtgcaggccacctgggccccggactcgctgtcggcttctgcggccactgtcatctatcccaatcgccagctgccagatggatacagctacaccgatgactcgttgcctggttcgctctatcgctaccgcaaggacgatgtcgccacgcgtaccacctacagtggctatgccagtggcccgctgatcgaggatcgtctgttcattcacttggctgcggaaaaggaccgcaccgaaggtgtgtccacgaacagctctgcagcaacgcagcaggtgcgcaaccactacaccattgatgcgccgaagttctatggaaagatcgactggaacatcaacgatagcaatacgctggaatacacccgcgtgcagaacaccgatcgcaacggtggctactaccgatcgttcgactacgaggacctggccgaaggtgatcgcaccggcacgttcccgaacaccacgaagctcaaggacgactttgacatcttcaagtacaccggctacctgaacgatgacctgaccctgagtgcggtatggggtcgcagcaaggagagcaatctggagtcgaatccgctggatacggccaacccctatctcagcagcccgggcaatcaggatccgtccattaccggtgggcgccccatccgcaacgaccagtcggcgctctataccaagtcgtcagatgcgggcagcaagacccgaggcctgcgtgtagacctgcagtaccgcatcggcaaccacgagctgaccggtggtatcgataacatgtacttccaggggcataacgaaggtcaggcgatgaccgggccggggtatgcctggatctatggtcgtgttgatccggcctcgtcgccgaatccgggctttgatatcaccccgccgggcggcaatggctacttcgtgcagaagtacatcttctccacgaccaccagcatgtcggtcaagcagaaggcctactatctggaggaccgctggcaggtcacgccgaactggttggtgaccctcggcatccgcaatgacaagttcaccaactacaacagtgcggccaagccttacgtcgacagcggtgaccagtgggcgccgcgtctgggcgcgagctgggatgtgtttggcgattcgtcgctgaaggtgttcgccaacctgggccgctactacctggcgttgcccaacagcgttgccattcgtggtgcttccgcctcgacgttcacccgcgagtacttcacctatagcggaattgatgccaacggcaacccgaccgggttgaccgctctgggcccgggcccggtgtcagccaacaatgaatatggccagacccctgatccgttgtcgattgcgccgaccgacctgaagtcgcagtaccaggacgagctgatccttggcttcgagaagacgctgggcgagcgctggagctccggtgccaagttcacctatcgtcgcctgcagacggccatcgacgatacctgtgactccgatcgcatccacgacaagcttgccgcgatgggcgtcgacgacagcaatctcgatgtcccgggctgtgtgatcttcaatccgggcaagaccaacaccttcatgatccgacacgcggatggctcgggttacacgccggtgcagatgagctccgccgactggggttacggcaacaagaaggccaagcgtgactacatcgccgtcgatctgttcatcgagcacccgctgagcgacaagtggtacggacgtctggattacacctggtcgcgcagcttcggcaataccgaaggccaggtgaagtcggatatcggccaggatgacgtctccaagacccaggactgggatgccgcggcactgatggaatacgccggtggctatctggcgaacgaccgccgtcaccagctgaagggctatggcgcctatatgttcaacgacgagtggtcggcgtcggccaccctgcggatcatgtcgggggcgccgaaaagctgcctgggctactacggcaccgatgagagtgatccgctgggctacgacgcggcctatcactattgcggtggcaagccgtcgcgtccgggtgacgccggccggcagccctggacgacccgcctggacctgggcgtgatgtatcgcccttcgtttgccgatcacaagctggctttcagcctggatgttttcaatgtgctgaaccagcgtcgcgccgtgcagtctgacgcggtctatgaagatggcccctacacggtgtccaacacctacggcatgggtacctacttcagcgcgcctcgttcggttcgtgtcagtgcgtcctacgacttctga

SEQ ID NO: 497608 - DNA, 3087 bp, Stenotrophomonas maltophilia
atgcaaacgaagttctggcgccgcgcggcgctggctaccgccctgtctggttgccttttctcgatcgctcacgctcagtccgtgaccggttacatctacggccaggcgccggccggcacgggttcgagcgtggttgtccgcaacctggggaccggcgccacgcgcaccctgccggttgatgccaatggtcgttaccgcgtgtccgacctgcccaacggccgctactcggtggaactgcgccgtgacggcgccacggtcacgacacagaatgacgtggcggtcaacatcgcctccggcaccgaggtttccttcgccggcggcaaggcgactgatctggacggcatcgtggtgcgcgccgcgtcgatggcatcgatcgacgtttcgcaggtcgatacccggaccgtcttcagctacgaagacctgcgcagccttccgctgccgcgcgacatcactgctgttgccctgctggcacccggtgcgatcgccagcaacagctacagcggcgtacccagcttcggcggttctgctgcgtcggagaatgcctattacatcaacggctttgcggtaaccaacccgctgaccagcatcggctcgaccacactgccctttgaggccatcgcccaggaacaggtcctcaccggcggctatggcgcggactttgggcgctccaccggtggcgtggtcaacatcgtgacccgtcgcggcaccaacgaatggaaggccggtgcgtacgagatctggagcccggaatcgctgcgcgcatctccgcgcaacatgtattacgccaacaccggccacttcaccgccaatgatccgcgcggcgcggcttaccagaccgatggtaagctgtatcagtaccgcaacaagaacaactcctggcagaacaccaccggtgcctatgtcggcggcccgatcgtccaggacaagctgttcttcttcgtcaacggcgagttcaccaagactgacggcaccagcgcccgctacgcgaccaacaccagcccggccaacctgacccgcggttggaacgagtacacctatgaatatccgcgctggacggcgaagatcgactggaacatcaccgacaaccacgtcatcgagctgacaggtgtgtctgacgttaccaagtacgacgccgagtactactcgttcgactacaacaagttcacacatggcgacgtgcagaccggcggcatcagcaccaaggaagactccaaactctacatcggcaagtacaccggctacctgaccgacaacctgaccctgtcggcgctgtacggtcgccagaagatcgaacactcgcagggcctgtacaactacgacgcaagctgcccgtacatcagtgccggaaccactgcacgcgtgccgggcctgaactacagcggctgccagagcacgacctcgctggtcaacgccgacggcgccttcgacgagaccaagggcgggcgtatcgacctgacctggcgtctgggcaaccatgaactccgcttcggcttcgaccgccaggatgcagagtcgctgaccggcaccgagtatcccggcggctacggctggatctatcgtcgctccaccaacccgaacaccccgatcgatgcatcgcacggcgtgagctcggcagcttccggtggcggcctgggcgcacagggctactacgtctatcgcctgtacagcaccaagctggcacagccgaagaccgagcaggcctcgcagtacatcgaagaccgctggcaggtttcggacaacgttttgctatcgctgggtctgcgcaacgaacagttcaccaactacaccggcacgggcgagaagtatgcgagccagaagacgcagctggcaccgcgtctgggcgtggcctgggacgttcatggcgactcgtcgctgaagttgttcgccaatgccggtcgctaccacctggccatgccgaacaacgtggcagtgcgtgcagcctccggctcgctcaacaccaacgagtacttcacctacaccggcgtcgatccgaccaccggtgcaccgacggggctcaattccattccggtcgatgcctcgaaggggtacctgtgcccgggcaccaacgctgtcgccagcaacctggaatgcggcagtgcgccgaatccgcgcaccttggccgcagtggacatgaagtcgcactaccaggacgagtacatcattggcatggagcagcagcttgcggctgataccgtctggggcgcgaagttcacctaccgcgaactgaagagcgcgatcgacgacacctgcacccccgcgctgggcggcgcatgcttcctgttcaaccccggcgtgggcaacaccttctgggaagaacaggccgatggcagctacgagaaggtgcactattcggcagctgaccttggcctgcccaagctcaagcgcaagtactacgcgctggacctgttcctggagaagcgtacggacaactggtacggcaaggtcatgtacaccttcagccgcaactacggcaataccgaaggccagctgaactccgacctggataccggtaccggtggccaggaagatgtgtcggtcacccaggactgggatctgccgcagctgatgcagggcgccaatgggctgctgccgaaccaccgtggccatgtgctcaaggcgttcggctacatgaagctgacccccgagtggcgcgtgggtggcagcctgaccgttgccgaaggtcgtccgaacaactgcaccagcatgtacccgaccccagacaagggcctctacgatggctcctactattggtactgcggcctgccgggcagcggcaccacaccgggcacggccggttacgtgccgccgtcggcggactacggttcgtcgccgcgcggttcgcacggcaaggcgccgtggcagttcaacctggggctgaatgtcgcatacacgccggattgggcgaagggcctgaccctgcaggccgatgtgatcaacctgctgaatcgccaggtggctggcagcacttactcgcgttacgccgcctcgccgtaccgcggcgcagcggactacaacccggagtacggtcgtgacctgaactactcgaccccgcgctacttccgcttcactgcccgatacgatttctga

SEQ ID NO: 497609 - DNA, 2823 bp, Stenotrophomonas maltophilia
atgtctcgtcgtcgcttcgcattctcgcaccacccgctcacccacgccgtcgcctgcggcttgttgctggccggcagcagcgccaccgtactcgcccaggacagcagcaaggccgcgaccaacctcgaccgggtcacggtcaccggctcgctgatcccgcagacgcagatcgaaaaccagacgccggtgctgaccatcagcgccgaggcgattcaggcgcgcggtttctccagcgttgccgaagtgttgcagcagtcctcgttgaccaccggcggcctgcaaggcggccagacctcggcatccttcacccagggtgctgaagcggctggcatgttcggcttgaacccgggctacaccaagtacctgatcaatggccgcccgatgctctcgtatccggcgctgtacaacggcagcgacgcgttcaacaacatcagcggcatccccatcgacatcgtcgaccgcatcgaggtgctgcccggtggccagtcatccctgtacggttcggacgcgatcgccggcgtggtcaacatcatcctcaaggaacgcatggacggcggcacgctgaacgtgcgcggcggcgcctattccgatggcggtggcgccagcttccgcgtgagcggcgccaatggcttcaacagcaaggacgatcgcttccgcgccctggtcaatgtgcagtatgaaaagaccaacccgatctggggttaccagcgcgacatcaccaagcagaacaatccgcatggctacacgcgccagctgccctcgaacgacttcctggtcttcgacgcggataccaatgatttcctgatgatggatccgaacaactgcgccggcgtttccggccagttcggcggcaccaccatcctcggtacgcgccgcgctggacaatcctgcggctccgcgttcggtgcgggttacaagacgatcaagaacagcaaggaaagcagccagttctattcgtcgctgacctacgatgtgaatgacaacctgcagctgttcggcgatgtcctctacagctacgaaaccgtcaagtacaacaccggtgccggctacaactactggggcacggacatcagcatgggtccgttcttcgatcagtccagtggtcgctatctggggctgcaacgcgtgttcgcacccgaagacatcggcggcattggctaccgcgacatcatgaataccgaccgcagcaagtcctatcaggtcacgctcggtgcacgcggcgcgatcggcagcaactgggactacgaggccagcgtcacccgcggcgagtacaagctcaacgagcgtggctatgcacgctggaacgacccgatcaacaactggttcgccgacaacgtgctgggaccggtgctgggccagaccgacgacggctacaacatctacaacccgaactggggtgctttctattcccagctgccgcaaggggccttccagagcttcaccggcttcaccaccagccgcagccgcacctggcagacccagacccgcgcgcagatcaccaacagctcgctgttcaagctgcccggtggcgacgccggctttgccgccgtggttgaaggcggcagcgaagggtggaactacacgccggacgtgcgcctgaccgacggcacagtgttcggtaccacctcggtggcgggcaacggccatcgcagcaactacgctgtcaccagcgaactgcgtctgccgttgcatgacatgctgacggtcaccgcttccggccgctacgacaacttcaagatcgccggccataccgtagacaagcccacctacagcatcggcctcgagttccgccccttcgaaagcctgctggtccgcggcaagtacggcaccgcgttccgcgccccgtccctgcccgatgccttccagggcaagagcggctactacgccaatgggtccaaggattactaccgctgtggccagctcgggttcgatccgtccaacacggtcgactgccgctacggcagcgtgtcggtgttcggcacccagtcgggcaatccggagctgaagccgattaccgccgatgtgtggaacgcgggcctggtgtgggcgccgatcaacaacctgtcggtgtccctggactactacaactggaagatcaagaacgaggtcaacaccctcagctccgaccagttgctgctcgccgagtactactgccgcaacggcctgaccaacaccgctggcgccacctgcgaggaagtggccaactgggtcacccgtgatgccaccggcgcgctggaggagatctacacgccgaagctgaacgtggcacggcagaacctcgaggcggtcactgccagcttcaagtacgtacaggacatcggtcgcttcggttcgctgcagttctccagcaactacaccaacatgctcaagcgtgaactgcagccgcagctcaacgacccgttcctggatctgctgagcaacccgtacgcaatgtgggtgtacgactcctacgccaaggtccgggctgacggctcgatcggctgggcgatcgacaagttcaccaccacgctgtacttcaattacatcggccgcacgccgaactacctgtcctacctgggccgtggctatgactatgtcgatccgacgtccggctacaaggctggcaagtggggctcttacacgacgtacaacctgagcgtgaactaccgcgcgatggacaacctgacgttctcgctgatggtcaacaacctgttcaacaaggtgccggacaaccagcagcactcctacgcgggcaacatcgacgtgccgtacaacaactccctgtacaacgcctacggacgggcgatctacgtccaggcccagtacgacttcggcaggaagtaa

SEQ ID NO: 497610 - DNA, 948 bp, Stenotrophomonas maltophilia
gtgcacgaatctgtagcaatcctgaatttcagtcaggctacgtccagcttgtatgatgttgggttattccccctgatacagctggtgcccgttgtgaacagttccccccgccgcccccatgccagccaggtccagaagggactgacgccacatgcccgcatccgcaatgtcatcgcggtcggctccggcaagggcggcgtgggcaagtcgaccaccgcggtcaatctggccgtggcgctgcagcagctgggcgcacgtgtcggtgtgctggacgcggacatctacggccccagcgtgcccgccatgctgggcttgtccgggcggccggaaagtcccgacaacaagagcatcgagcccctgcgcgcgttcggcgtggacacgatgtcgatcggttacctgatcgaagaggacacgccgatgatctggcgcggtccgatggccacctcggcaatgacccagctgttcaacgacacgctgtgggatgacctggatttcctgctgatcgacctgccgccgggcaccggcgacatccagctgaccctgacccagaagatcccgctggccggtgcggtgatcgtcaccacgccgcaggacatcgccacgctggatgcgaagaaggcgctgaagatgttcgagaaggtcgaggtgccggtgctgggcattgtcgagaacatggccgtgcacacctgcagcaactgcgggcatgtcgagcatctgttcggcgagggcggtggcgagcgcatggccgcgcagtacggcgtgccgctgctgggatcgctgccgctgcagatcggcatccgcgagcagggcgatagcggtaccccgatcaccgtggcgcagcccgattcggtgccggcgcaggcctaccgccatgccgcgcagcgcctgatcgaggaagtgggcaagcgcccgcgggcgtcgattccgatcctgtcttcgctgctgtaa

SEQ ID NO: 497611 - DNA, 243 bp, Stenotrophomonas maltophilia
atgaagtgcgacaacgaacagggcccaccagtcatttctgcggtggtgttcgagggcatcacggtggtgggctccgacggccgaccggcatcgttggcggtggtggacgcggatggtcgcgtgctggctgccggcccggaggtagcgaaggccgcgtgggatgcgtcggtactggcctaccgaaacttcctgatcggcaagggccatatgcgggtgctgcagaagccgggcgcgaacaagtga

SEQ ID NO: 497612 - DNA, 1920 bp, Stenotrophomonas maltophilia
atggctgacggctcccgctcgcccgagatccgcgtcacgcggaccaagacgcgcacccggccggccctcatcggcgacctgttctgcggtgctggtggcctgtcgaatggcgccaagcgcgccatgcggcagctcaatcggccggtgaagctgatcggtgtgaatcactggccggtcgccatcgagacgaaccgccgtaaccatcgggaagacgctgaccgcattcactgcgctgatctggaatccgccctgccgctatcgctggtgcccgagggacgcctcgacctgctcatcgccgcgccctcatgcgtgttccatagcagggcccgcggcggccgtcctgtgcacgatcagcagcgcatggatccgtggcacgtggtccgctggtgcaccgagctgcgtgtcgcgcgcatcctggtggagaacgttccggaattcatggactggggcccgtgcagcctggttaccggccggcccatcccgagccgcaagggcgaatacttccgcgcctgggtagcggcgctggaagcggtgggcttcaaggtcgactggaaggtggtctgctgcgcagactatggcgacccgaccacccgccgtcgcttcttcctgatcggtcggagcgacgggaagcgcctgacttggcccgagttcactcacgaccgcgtgggcggtaccgacctgttcggtacccgccagcggtggcgcggtgcacgtgaggttatcgactggaccatgaccggcaagagcatcttccaccggaagaaggcgctgaagccgaatacccttcgccgcatcctcgcgggctccgtgaagtacaactggccccaaccctacgtcgacgccgtgcaggcgctcctcgacggcaggcaaccacgtctggtgttcactcgacaagaggccgccgacctgggcttgatccacgccgactcgatgctgctgaacctgcgcggcaccagcgagcaacacctgcaggccgcatcccggtccacggacgagcccgtgccgaccctcacggccggcggtacgcatgtggggctggtgctggcgaccagcagcggcggggtagcccgcgacctggaccagcccttgccgaccatcacaaccggcggcgcgggcagccagcgccccggctgtgcccggccgcaactggtggaacccatcatcgtcccgacctcgaacaccagcagcgcgggcgtgccccgctcggtggccgagccgatccgcacggtgaccaccgccaagggcggcgaccaggcggtggccatgccgctggtggcgccgtactacggcggcggatcggggctcaccgcgtcctcgatcgccgagcccgtgccggcggtaacgaccaaggcacggttcggattggctgagccggtgctgatgcgcgcaggtcacggggacagcgatggccgcgatcccgccagcaggatccttgacgccagtgatccggtaccggcgctcactggctccaacgaggtcgcgctcgcggaacccatcgtgatgcgcggcaacgttggtgctggccggacacgagacatgcgcgccgtcagcgaaccgctggcgacgatcaccacgtcggaatcgttggcactggcggagccgttcgcgctgcctgtcacgcatcacggcgatgtccggacgcacggcatggacgaaccgttgcccaccatcaccggcgccaaccgtggtgagctggggttggcacggccggccgccgagctggccgacgaggtggtgatcgacatcaactaccggatgctgcactggcgcgaattggcccgcgccacgtcgttcgatgacgagggcgaggtctacgacttcgccggtaccgccaccgagatcaccaagcagatcggcaacgcagtaccgaaccgcacagcgaaagccctggtgatgagcttgatgagggacgcggcatga

SEQ ID NO: 497613 - DNA, 510 bp, Stenotrophomonas maltophilia
atggctgacaacgcgcctctggtgctggacccatgctgtggcagccgaatgatgtggttcgaccccagcgaccagcgcgtcctgttcggcgacctgcggcacgagaccatcacggtgatcgaccgcacccaccgcgccgatggcacacgcgtgctgtccatccacccggactgcctgctggacttccgtgctttgcccttcgccgacggctcgttcccgctggtggtgttcgatccgccgcacctggtgcgcgctggcagagccagttggctggccgccaagtacggccggcttagtaaggactggcgtgcggacctgcgtgcggggtttgcggagtgcttccgcgtgcttcgccccgagggcgttctgatcttcaaatggtctgaagtccaggtggccacgcgggacgtactggccctgaccgatgcagttcctcttttcgggcacccatccggcaagcgcgccggcacgcactggatctgtttcatgaaggaacctaccaatggctga

SEQ ID NO: 497614 - DNA, 249 bp, Stenotrophomonas maltophilia
atgggtaacttctacggacacatccatctggacgtgcgcggcgcgctgaagaacatgacacggcgcgagctggccgcgatgttcaccgaatccagcaccggcaggaagctcaacgccgatgaagcaaaggacgtgctgctggatcacctcgaggcgggccacaaggtcattccgctcggccccgcctgcgagggcttcgactacgccggcggcggttgccctggccacgaggagcagagcgatggctga

SEQ ID NO: 497615 - DNA, 312 bp, Stenotrophomonas maltophilia
gtgttctctgccgtcgaagtggcttccgatccgggcgacatttccaagggccccgagtatcacatcagcatcagccgcgacgggaagcgctgcagcgctgctgacgcgcgccaagtgatcgctgatttcgacatggatggggcggaagaagacaaccatgtgcccaacggcatcgtccgtaactggtggcgtcccgtcgctgagcatctggtcggcatcgaatgccactgcaaagagagcgagccgaagatggtcgaggacaaaggcgattacatttggcgcggtgtcccagggggcggcagccatgggtaa

SEQ ID NO: 497616 - DNA, 1038 bp, Stenotrophomonas maltophilia
atgaacgctgccaacctcatcgatacgttgcttgaccgtccgcaagcgcgttggttccgagacacggcgagcggcggatcggcccttgccaccggggtcgtcgtcacagcgcaagagctgcaggcggtgctggctgccctcactgcccgccagccggtggggcgcagcttccaagcgaacgtgtccgaatggatgggccagtgcttcctgccgtcgctttacagcaacatgaccgagcgcggcgaccgactgctggaggaggtgttggagctgctgcaggctcacggctatgacaaggcccgcgtgcccaccctggtcgattacgtgttcggtcgcccggtcggcgatcccgcgcaggaagtcggcggcgtcatggtcaccctggccggctactgctgggttgccggcctcgacatgcacgctgctggcgatgccgagctggctcgcatcggccagcccgacgtgatggccaagatccgggccaagcaggaggcgaagaacgccctgcacttcgacacgccgctgccgggcaatgccgcccgccagccggcgggggagccggtggcgtacatggtgcgctggaagaccgaaggcggattcgggctggaatggccgaagaacatgcagtatttccgcgaccgcgccgacgagtacgaaatcgttcccctgcagcacgccggcccacccgcgcaggccgtggacctggggcagatcccgcacggcattcgcctgatcgagattccgcgtcgcaatgggctcgatccgatcaacgttttcgtgcaggactacgagctggggcgtggccgaatcgtggtgacctgctacgggcaggcatggtgcgggttctggggcgctatgggcgaccgcacggtgatgcagttcgttgccgcgtgcgatgccgactacgtggccggcaacatgctgagcgggcgacatgagcacgtgaagaagcatgagcgcacctacgtggagcgcatcgccaccgaagtgatcacagagttccgcaccctgcttgcccccaaggcggtgacgctgtga

SEQ ID NO: 497617 - DNA, 168 bp, Stenotrophomonas maltophilia
atgctcatcctcacgcgccgccccggcgagtccatcgtcatcggcgagaacatccgcatcgttgttgccgaaatcaggaacggccaggtccggctggcgttcgacgcaccggcagaaatcgagatcgatcgcaccgagatccgagccaagaaggaggcagcacgatga

SEQ ID NO: 497618 - DNA, 903 bp, Stenotrophomonas maltophilia
atgttctttcgcaatttgaccatgttccgcgcgccgcagatcacgatgttcgagctgcaggatggcctcgaggcatccgccctcaagccggtcggaccgctggagtacaactccgcaggcttcgtgtcgcctttcggccgcggtgatggcgagccgctttcccacgaggtcgctggggcgctgtggctgaccatcggcgaagaggagaagatccttccggccgccgtcatccatcagatgctcgagcgcaagctggccgaaatcgaggaaagcgaggggcgccgaccaggtggccgcgagcggaagcgtatcaaggacgatctgctacacgagctgctgcccaaagcattcgtgacctatcggcggaacgacatgtacctcgaccacgcgcgcggcgtggtgtttgtcgacacgtccagccgcaagaccggcgaaaacatgatgtccgccatccggggcgcactcggctccttccctgccatgccggtcaacgcagaggtgtccccccgtgccgttctgacgggctggatcgccggcgagccgttgcccgaagggatgagcctcggcgaggaagcggagctgcgtgatcccgtacagggcggcgcagtggtgaagtgcaacaaccaggagctgcgctgcgacgagatcgacaagcacctggacgcaggaaagcaggtcacgaaactggggctcgtgttcagggatcggctgtcgttcctcctcggtgaggatctgaccgtccgcaagctgcgcttcctcgagggggctgtggatcagctcgatgtcactgacgtggacagccgacgggccgagatcgatgcccggttcgtgctgcaggtcggtgaggtcggcgcgctgttcgacgccctcgagcaggcattccgcctgacccgctacgtctga

SEQ ID NO: 497619 - DNA, 567 bp, Stenotrophomonas maltophilia
atgtccctgattttcttctacgacactgaaaccaccggcctgccagctttcagcgaaccgtccgacgctccccaccagccgcacctggtgcaggtcgccgcatcgctggtgaatgcgaccacccgcaaagtgatctcgtccatcgatgtgctcgtgaagccggacggctggaccatacccgaggaagtaactcgcattcacgggatcaccaacgagcaggccgagcaatgtggccttgacgaaagccttgtgaccgagctggtgctcgacatgtggcggttgtcggatgtccgcattggccatgtcgaatctttcgatgcccggatcctccgcatcgcgttgaagcgctatgcgacggcacaagtcgcggacgaatggaaggcaggcaccgcgcagtgcaccgccaaggcggccaaggcgctgatggggacgaccaagaatccgaagctgatcgacgcgcacaggcatttcctggggcgcgagttcgacggcgctcacacagctcacgccgacatggtggcgtgccgtgaaatccactgggccatggccgaccacgaaagcgcctga

SEQ ID NO: 497620 - DNA, 357 bp, Stenotrophomonas maltophilia
atgcgaaaccacgaaccagcgtgccgacagctcgcgattgatttcacgcctgcgcttgaacgcgcacagctcggaatggagcgcgcggtcaaccacgccaaccgggttgaaagcgagtggagcggacaggcactgggattgctggtcgcgttcgcccgccagcacgccgagcctttcctcatcgaggaggccaggcgctgggcagaagcaaatgggctgccgccgccgccagacgcacggagctggggtgccgtgactaaacgcgcatcgatcaagaagcgcatcgagaaggccggcgcagccccggcggcctcatccaactgttccctcaaacccctttggcgcttccgcgcctga

SEQ ID NO: 497621 - DNA, 1668 bp, Stenotrophomonas maltophilia
atgcgtatcaccggaattaccgtatccaacttccttggccttccccactttcagcacgcccttactgagcctgtcttgttcgtcgctggcgggaatggcgacggcaagtccagcttgctacaggccgtccgcttcgccttgaccggcgcaatgccccgaggcgtcaccagagttgcggaccgcaacctgctgctgaccgagggtgccagcaaaggctatgtccaggtggaggtcgacggaaacccgctgcgccgcaccgtgtccacggcaaagcttacgggtgatgctccggaaagcccgcacctcgacctctgcctcgaggcatcacagttcgcacggctggatgacaaggatcgccggaagttgctctttgccatcgccggtgtaaaggcgaatggcgaggctgtctccgagcagatgaaggcccagggcattcgcgctgacatcattcaagacctgttgccacgtctgcgcgccgggttcgaggcggcggcggcccacgctcgagacaaggccactgaagcgcgcggcgcttggcgcgcggtgagcggtgagaactacggttccaccaaggcggagggctgggccgcaacggttgaggtcgaggagcccgaccaggccgccattgacgagcacgccgctgccatcgctgatctccgggcgcgcgtggctccgctgcacgcggcgattgccaaggttgaagccatgctgccaccggacaagctggcagagttgcaggcgcagtccgacggtcagggtaaagcagagggcgacctcgccatggcccagcaggtgtacgacgacgcggcggcagcggtcgcaaagctgcaggtgcaactgcagcccggtgccagtggcggcgtcccatgcccatgctgcggaaagtcgatccggatcgatgggcagcgcctcgtcgccgccaccgaatccgacggcaccgacgtgcagaaggtgcgcaacgacctcgccgccgccaaggtgcgggcccatgacgccaacacgcaactgcaggttgctcgccgggcactcgcctgcgcacaggccgccgcgtccacgctggccaaccttcccgaagctcccaccgacgaggagctgcgcgcaccggatctgctggctgatgtgaatgagttactgcagcagcacgaacgcgcacaccgcgccctcctcgatgctcgggcacagcacgaacgtgcgaagcaccgcactgaacaggccgcgcgccatcaccgtgatgcggccgcatggaagctggccgaggagaacctggcacccgagggcattccctcgatcctgctggcccgagcgctagacccggtgaacgccactcttgccgcggccgcttccgtcgccggctggcgacccgcagccgtcacccgcgacatcaccctgacctacggcggccgtccttacgcgctggtttccgaatctgagcagtggcgagctgacgccatgttcgcggccgccatcgcagagcttgccggtgcccgcatcctgatgctcgaccgcttcgacgtgctttcaccactggcgcgcggggatgcactggattggatggatcacctggtggcggaaggccatgtcgacacggtgatcgtcgcaggcaccttgaaggaacgccccgacctgggcgaaggcgtggatgttgtctggctcggcgccgccgcatag

SEQ ID NO: 497622 - DNA, 885 bp, Stenotrophomonas maltophilia
atgaccgattccacacaatccactgcgctttccccggcccgagaagccgccagcatcgaacgtggtttggccatggacgccaccagcttcgaaggtgtgcacaccgttttcagccacggcaacgccttcaacttggccgtgaagatggcaagcatgttgtcggattccacggtgatcccggccccgtaccagggcaatccctccaactgcctgatcgccatcgactacgccgcacgtctgcgcgtgtcgccggtgatgctgatgcagaacatggacgtggtgaagggccggccaggactccgcggcgcattcctgatcggcctcatcaacgcgtgcccactgttcagtcgaatcaagttcgagtggcgcggctcccccgacgatggcaccgggcagcctactggcgactacggctgccgcgcctacgcgaccgagatggaaacgggcgatgtcctgcagggcacgtgggtggactgggcgatggtcatcggcgaaggctgggaccgcgataacggcagccagaagtcgaagtggaacacgctccgcgaccagatgttccagtatcgcgcggcttccttctggtcccgcacgaacgccagcgacgtaacgctcggtctgcacacggtcgaggagctggattatctcgagaatgctccgggttacgcacgcgagtcgccttctcctgtcatcgaacacgaccacgaccggggcatgcccggcctgctggatgaacttgcggatcgtgcacgcagcgctgccgcgcacattgatcttgcggagccaagatcgcccgccgaagacgagccttcggcgcctccgaccgacacggcgccaaccaaagacgcacagccgaaagcgcgcagcggacgccgaatcattgagtaa

SEQ ID NO: 497623 - DNA, 891 bp, Stenotrophomonas maltophilia
atgacgccaccaatcgacggcgctcgtctcattcctgacgaggcgccaagcacgtattacgcacgcagcctggacgtggccaaccacaccggcctgtgccatatcgggcgctcccccgcccacttccggtactgggtggaaaaccctcagtccgatggcgacaccaaggacttcgcgttcggtagagcgttccattgcgcgacgctcgaacctgacgtgttcagtcgcacctatgcggtgatccctgcaggtgcacccgcccgccccacttcgcggcaactcaacgcgaaatcgccaggtcgcgaaagccgcgctgcgctcgactggtgggcgatgtttctcgccggccacgaaggtcgcacgttggtcagcgttgatgactacgaccgctgccagcgcatggccgagagcatccgttcgcactcggatgaagtggcgggcctgctggttggtgggattcgcgaggcgacattgcgatggcaggacgatgaaaccggcctcgcgtgcaaggcacgtatcgacaactacgagccaggcctgttcatgctcgacctcaagaagacccgtgacgccagcgaggaggcctttgcacgctccatcgccaactaccagtacgaccaacaggccgctcactactgcgcgggaggtgccgcatgcggcaccccagtgaagcatttcatcttcctggcctgcgaagacactccgccgtatgtgtgccagccctactacctggatcccatggccgagcagcgcggcatggggttgcgtaggcggcgtatgcgcgtccaggccgagtgtctgcgtaccgaccgctggccgggctatgccaccagcttccgacagatttccctccccagctacgcctactacggcaccgacgaggcagcatga

SEQ ID NO: 497624 - DNA, 357 bp, Stenotrophomonas maltophilia
atgcaggtgaacaaggcgggcgggtccagcgttacgaagtcgctggtcagccagtgggaacgcgacggcgtgaagaaccccaccaacgacaacctgttcgccatcgaggcggttactggcttctccgcccagtggatttccagcggacgcggaccgcagaaggcaaaggttgcctccaccgttcgacttgatacgcatgcgctcgagcgcgcgctcgccgccgcgctgccggacaacggcaagcacgccgacctggcccaggtggtggccggcctgtatgacgtgttgatggacaccccggacgtatccgacaagaccctcgccagcttcgcctcggcactggcgcgccggatctga

SEQ ID NO: 497625 - DNA, 294 bp, Stenotrophomonas maltophilia
atgttgacacctagcgacaagcgtgctttcctttccggcatgtcaacgatccttcgcacctcaaatgtgctcgcttacttcggcggcaatcgcggcgaagtcgcgcgcgccttctctccacccttgacccgccaggccatccggcaatggggcgagttcgtgcccgagttgcgggcgcggcagctcctcgaaaagcacccggacctgcaggcagcagtgctggacccagatacggggcggacccgcatggaagcgatgcaggaccgcctcggaaccccggttgcggggaagtga

SEQ ID NO: 497626 - DNA, 870 bp, Stenotrophomonas maltophilia
atggctggcgactggatcaaggtacgcaccgggcttggaaggcatcccaaggttgtccgcatggcgtccgcattgaaaacggacagattgcgggtggttggcggactgcatgcggtgtggtgcctgtttgacgagcacaccaccgatggcgtgctcgagggctacacgttggagctggtggacgagctgatcggcctacccggcatggctggtgccatgttggatgtccgttggctggacgacagcaagccgggatgccttgtgctgcctgagttcgacacgcacaacggcgcatcggcccggcgtcgggcgcaggacgcggaccggaagcgcgcggagcggagggagtccgcaggcggtgcggacggaaagcggaccagaggagaaaagaggagaggagattcttctactccagatggtaatcagctaccccttggggggctggacgatccaccgccaccaccgccacgcgagggctacttcgaggggcatgcggaagaccaggcgcccgttctaagccctgcggcgccgatggccatcgcgctcaaccggcttggcttccgatgcaccagctacacgcccgacctgatcgcagcggctgccgaaggtgtcacggtcgagcacgttctggaaatcgcgggctgggctgagtgtcgcgggaagcccgcgacctacgtagtcgctatcgcacggcgtgagaacgccgaacgccagaatccacctccacagggagtgagccatgcaacgaatcggagaggtagtgccgtcgaacggatcgaggcagcagttcgcgcgggacgcgagggagatcagcaacgaggctggggcgcagacggctacatcgaaggccgcgccgaccgtatcgaatga

SEQ ID NO: 497627 - DNA, 384 bp, Stenotrophomonas maltophilia
atgtgcctgggcgtgcccagcctggggcgggtgaagttcgagctgtcgaagcatttcaaattccgctccgcgttcactcgcgcggtttggcggtacctggatgtctatgcctaccgcgctgcatcggcacgtgatgccgagcggatgctgcgtgacgcatacgacgtggcgaaggaagcggtaatgcggggcgaacccctgccgcacgtggtgggcgaattggaagcgccgaaaggccggccgcacaagccggcaaccagagagcagatgcgcaagcaccttgctgacatcagcgccacgcttggcctttcgccgagcgaagctgaaagcatgggcaaagatggattattgcgtgccggcgattcgcgtggtgattccgactga

SEQ ID NO: 497628 - DNA, 282 bp, Stenotrophomonas maltophilia
atgaacaacgcaattgagcacccaccatcgttcaagctcggcaatatctggctggtcgcggccagcctcgcccgctccgctgcggatctcgggggcggggcgcccatggtggtgacgattgatgcggacggcatgttggaggccgtgggcccggaccaccctgactacagccagctcctgacagcgcctggcttcgtgtgcacggtcagcgcggcatcgagcaatgagcgcatcgcggggcgcatccgcgcagccgctaccgcgttggagatcagcagttga

SEQ ID NO: 497629 - DNA, 348 bp, Stenotrophomonas maltophilia
atgagaaagtctgaggcagcgcgcgttgatgaggcgaaagtgacggtgtgcatcccgtgcttgatctggtcggaaatggggcgcatgccgtttgagcacgtggccacctgcagcgactacaaccacgtgaagtcggggaacatccgcatcagccatgcgcacggttacgccggatgcctctggcatcatcgcgggcgcatcgaagtggacggttggacgcatgcgcggatgcgcgagtatttcggccccagtctggccgaaggctcgcgcacgttccacgagacattcggaagcgacgatgacctcattgcgcgccagacggcgctgctgacgggagaggcggcgtga

SEQ ID NO: 497630 - DNA, 744 bp, Stenotrophomonas maltophilia
gtgagcaggaatgtcggaaagaccatggcgaggctcagcccgcgcagcctgccgctgcaggtggccgggtcacgcggtacgggccagccagagctgaccgccatcgacatcgcgaacgcgctggcagttgccggcggcgatcaccggaaagcgctggcagttgatgtgctgtgcttgcggtggtggcctgcgaggatcgaagggcccatgcgcgtggtcggccatcgagaggtgaagcgaccactgccaccagtcgacggcaagccccgcttctacatcgagcgaatgccggtagagaagcccagcgagacggaggcattccttggcatcgcatcgctactggcgcgggcactgtccggtcgggcgcgcaaggtgctggcacccaagaccctcgccaaggtgggggagcctgcgtttcttcaacggtgggcgagggcggtcatcgatgagtacagaaacccgcaccactgcccggtgtgtcgggattttggccgaccaggtgaggtagccaagccggtattgcaggagggcaaggtggtcggtttcgagtggcatttgtgcgaggactgcgagggcacgggcgtgcagccctggggaaagcatcgccgggccaaggctgtgcagatccgggaggcgacctttcgcgacgagttgaatccgctgcatgagggcgctttggcattgctgcgggaactcgagcacagaggggcgcgcatggtgaatgcaaagctccgcgatgactga

SEQ ID NO: 497631 - DNA, 489 bp, Stenotrophomonas maltophilia
atgtcgaaccatgaggtttcctcgactgccgctgcgaaactgctggcaagcatccgctcacaggccaccaccaatcacttccagcatgccgacgacgccgccttcatggcagagcacgatctgacggcagcggggaagtatcagatccgtgagcggatcctgatcgagcgcgcagtgatccggaaggctgtgtcggacctgatcgctgagggctacgccgtccaggttcacaacggtgaagaactctcggtgaccggcacccgcgacgcgggcacggtcatggcggcgatcatgcagaccgatgaggaccgcctttatctgctgaacgtcgaaggccctgcgtatgcgcccaagatgacccgcgccggctgggtgcaccttgtctatggcaacgatgggtgggacgtgatgagcgactacacgaccaacctgggtaacgcactgactggcgccagcgacctcgctgacgcgctcggggaggtgctgtga

SEQ ID NO: 497632 - DNA, 354 bp, Stenotrophomonas maltophilia
atgggcgccgccgtgttcttgcaggcggaggaaaccgccacgatcctcgccgcgctgcggttctaccagcagcacggccaaggtaacccggacaaccgtagcgacgagatccacgagatcgccaccggtggcaacgatgaccttacctcccttgacgaagagggcatcgacggcctgtgcgagcacctgaacatgggtgacgacaactggcagacagtcatggacgcccgcgaccgcctgaatctggcgctggtggacggcgaatgcggcgatgacagcgacagcgtggatgcggccagcaatctggtgaacgccatcgatgcgttggctgccagctacgaggaggtgctgtga

SEQ ID NO: 497633 - DNA, 312 bp, Stenotrophomonas maltophilia
atgggtgctgacaggaccaccctcgccgaggcgctgagggcgctgctgcagtgggctgacccgaactgcggcgacgccaacggcagcatcgagaagaagaccgccgactacgaggcagccgttgctgccctggcgcagcatgacaagcagtcgcgttctgtcagcgactggcagcgggtgatcttccatcgcgaccgcctgcatgaagtgctgcacgaccccgatggtggcgacgccggggacgagtgcgatgcggccggcaacctcgtggatgccatcgacgcgttccgcgcctcccacggggatccgtga

SEQ ID NO: 497634 - DNA, 126 bp, Stenotrophomonas maltophilia
atgactgacgacacgaagcctgcgacctggatcacacggtacgtgtgggaaatggccgcggtattcggcctgatcggccttggcctgggtttcgtgctcggctgggccataggagaggcccgatga

SEQ ID NO: 497635 - DNA, 453 bp, Stenotrophomonas maltophilia
atgcgacaccctcccgcgttgacgctcgctcaggcgaccaggctggcccaccttgaggccggcttggcacgagccatcgatcaatcccaccgtgaaggcgacgttgcgccgttccgcgccttcgaagtagcccattcgccggaattggaactgctgcgcgcaggcgctgccggcgtcgacattgacgtgcaggagatcagcgcgcagcgctgggcggaccagctcagcgtgatgcagccagcccggcacgtggtgctggacgtggagaacatcgagacgttcaccccgcgcgagccttacagcggtggcctgtatcaccgctatgtgcggatcggccggcactgctaccagctcgtggcccatcagctcgaatcgctcgagagcatggtcaagcgcatcagcgactacgaggtggcaaaggcgggcgtcgctgcccagggcggtgctgcatga

SEQ ID NO: 497636 - DNA, 180 bp, Stenotrophomonas maltophilia
atgagcgcccctgtcgatgtgctgtggcctgtgtgcgtgcacgcagcagggcgtggccagtgggcattcgtcgccggaccgcgcagtgggacgggatacgcctcgaagaaggccgcgcaggaagctggtgagcttgcccgctccaaggccctcgcccgcgtcaaaggcggtgccgcatga

SEQ ID NO: 497637 - DNA, 414 bp, Stenotrophomonas maltophilia
atgagccgcagcggatacagcgacgactgcgacacctggccgctgatctgctggcgcggcgccgttgcttcggcgttgcggggcaggcgcgggcagcagttcctgatcgagctgcgcgatgcgctggacgcgatgcccgagaagcgcctcatcgccgaggagctgcaggattccagcggctgccactgcacgctgggcgtcatcggcgccaagcgtggcctggatatgaccgggttggatcccaccgaccgcgctgcagtgagccaagccttcgggatcgcagaggcgatggcggcggagatcgtccacgagaacgatggtgagtggcgctgggacaaagagacgcccgaggcccggtggacccggatgcgtgaatgggtcgaagcacagatcacgaaggcaggtgagccatga

SEQ ID NO: 497638 - DNA, 375 bp, Stenotrophomonas maltophilia
atgagcggccccaacctcgagcgcttcgtcaacgccatcgcctcggacctcgaggagggtggattccgcgaggtgaccggcaccacgctacgccggaatctgaccaccgccgtacaggcggcactgccgctgctgactgagtacgctgggcttcgtgcgcagggacacggggagctctaccgcgcactggggttcgacggcgccgccccgcccgcgcaagccatcttccttgagcgctatgacgccggcctgctgagcgacgtgggcggcggtgacaccgcgtggtggctcaactacctgcgctcggagctggcccgcgcccacgatcactaccagcaccaggtgaacccagccaaggaggccgaccatggttga

SEQ ID NO: 497639 - DNA, 186 bp, Stenotrophomonas maltophilia
atggttgagtcggccctgctgctgatcgtggtggtgatcggcccggccgctgccggcgtgctgctgtaccacctgtggaccacccgcccacgccgaccaacgcacacgcaccaagccgtgggccagataccgatgacccgccgccgccggcaacaggcgctgcggcgccatgtggaggtgagctga

SEQ ID NO: 497640 - DNA, 198 bp, Stenotrophomonas maltophilia
atggaccgcgagatcaacctgccgctgtacgaggcggcccagcccgtgcccgagggtggctggtacgtgacgtggggctacgggcagaagcccattgtcaggtacgccagccaaggcctcacccagtggcgtgatggcatgcgcgctattccgattacccactacgccggcccgctgccggaaaggaagacccgatga

SEQ ID NO: 497641 - DNA, 435 bp, Stenotrophomonas maltophilia
atgagcggccactacaggctcaccaccaagccatacgcctcgctcggccgagccacgcacaggatcacctcccctggcggcatcgtgtgtgccgaggtgcacggcgacgaactgctgccacatgccgagcgcctgctggccgatctcaatggcgtcccgaatccgtccgcatcgccgtccgcatccgaagcggacgcctccccagtgtccatccgtggggtgctgcaggcgatgctcaacgggatggccaaggcccacggtgcagatgcacccgctacccagttggtccgcaatgccatcgccgatgccgaccgtctggccctggccgctgagcaggccaaggtctacctcgccagcaacggcagcggccccgcacgcgacaaggcatacagggggctgcatgcggccctgcccagctacaggggggcgctgtga

SEQ ID NO: 497642 - DNA, 276 bp, Stenotrophomonas maltophilia
atggccgagccgcagctcacgtacatgggcatgccggtgctggtgtcccccatggcgacgaagaccgagccagtccgtccgcacgtgaaggggaagcactcgcccacctaccaccgacgcatcagcaagaagtggctcaagcggttcggtaccaggcaggtgccgtgtctctacatggtggcttcccaccgggtgggtttgctgtcctctcctgacaccgtggtggttcatccggccctcttggaccgggtagcggaggcagctcgccatgagtaa

SEQ ID NO: 497643 - DNA, 195 bp, Stenotrophomonas maltophilia
atgagtaagaccacccttggcgcatcgctacaggatgccgacgaccttgatttcattggagctttgaccaacggcgcccgactctttgacgggattccgatggtgatgccgctcgccccggcgcgcgccgacacaggtaaaccgttggtgcccacctcacgtgtgcgcgaggaggccgccgatgaacaagcctga

SEQ ID NO: 497644 - DNA, 288 bp, Stenotrophomonas maltophilia
atgaacaagcctgacgccagccaaggctacgactcgagcagcgctcacactcgcgccctgatccaacggacgggcctcacctacgcagcggtggcccagcgcctggggtgcagcgtgcgttcgctcgagcgttgggctgggcagggtggggcgataccgtaccccgagcattacctcctcgagtgcctggccgaccggcgcgttgccaagccgaagaagtcggcacgtaaggccaaggctgccccgcccagcaaaccccacccgctggccgggctgcttgggcggtag

SEQ ID NO: 497645 - DNA, 357 bp, Stenotrophomonas maltophilia
atgaaatccatcgctacctggctgcggcgctggcaggagccggtcgtctggctgccggccttggccgtgatcgctatcgctgcatgggtggtgctgggagcactggacccggcctccaccgtcgatgtcgtggctcgcttgatcgagctgccgatccagaccgcgtacgcgatcgctgcgctcgggctggcctggctggctcgccgccgccagcgccgcaagctcagcaaggaagagggacaggaactgtgggccggcatcatcgccggccgtcgcggtccgctgatcgtctacatcaccgacaccatcgtgtggatcgcatgcgtcgttctgctgctgcacttcttctcgccctga

SEQ ID NO: 497646 - DNA, 663 bp, Stenotrophomonas maltophilia
atggtccgtgcgcgggaagcggtgcagtccatcgtcccgccggcgccgctggtgccggagcaggtgtccgacgcggccgtggcccacatcatccggtgggagatcaccagcgcacggcactacgagcagcgcctgcgctggccggtgtggccgggtggcgcgtctggcatcacctggtgcgtgggctacgacggtggacaccagacgccggcggtgatcggccgcgactgggccaagcactacgcggtgcagcgcctgagcaccaccgccggcatcaccggccaggacgcacgggctgttcttccgcgctaccgcgacatcaccacgccgtacagctactgcgaacaggtgttccgcgcggtgacgctgccggcgtaccaccggctggcgaagcggacgttctccaacggctgggaccggctgccaccggacgcgcaaggcagcctgacggccaccgtctacaaccgtggcgccagcatggccggcagccgccgcagcgaaatgcgcgcattgcgcgacgtgtgcgtgcctgcggccgacgtggcctgcatggcgcgccaataccgctccatgtgccgcctgtggcgtgggaccgtcaacgaaaccgggctgtgcaaccgctatgaagacgcggcccggcttgcagagggccgcgcccgatga

SEQ ID NO: 497647 - DNA, 237 bp, Stenotrophomonas maltophilia
atgagcgacatgcagatccaccgcgacatgggccgaatggaagcaacgatcaaggctcagggagagcagatcaccacgctggtgcagcagcagaaggaaatgcaggcccaggtgcaggagatccatgacgtgctcaccgaggcgcgcgggagctggaagacgctgctgatggtcggcggcctgtcgtcgttcatcaccgggctgctgttcaagatcgccacggtgttcagcaaatga

SEQ ID NO: 497648 - DNA, 375 bp, Stenotrophomonas maltophilia
atgatcgcgcgccttgaggcctggtgggctgcatggaagtgggtggcgatcctcgccgcgctgtgtctggtgctggcctccctcaacatctggcaggcctaccgcgccatgacggcaccgatgcggctcgagaacgaggcgctatcggccagcctgcgcgcagtcaccggcatggccgaacagcgcacacgcgacgacgcgaagctgatggccgacctcgagcgcatcgctgatcgcggccagcgcgtccgcatcgaataccgatccatcgcagccaagcagccgttgccggagcagtgcgctcccggccagcagcgcgtggatgcgatcaaccgcgccctcagcggcgcaaccaaccaggagtcgtcaccgtga

SEQ ID NO: 497649 - DNA, 180 bp, Stenotrophomonas maltophilia
gtgaccccgcagacccgtcacttccaaccccagtacctcgagcaggagatggaaatcgcccgcaccgaagccagcattgccaacctggccgcgcaggccaaggaagccaaggcgaaggcatggttctatcgctccctcgcactgctggccctcgtgctggcactcgaggtgctgctgtga

SEQ ID NO: 497650 - DNA, 684 bp, Stenotrophomonas maltophilia
gtgagccgcgtcaccttggccgagatcgaggccgagatcgttgacgagttctacgccagcggcgccggcgcgttcagcaacaactacctgacgaaggagcactacagtgcgctcaaccaggtaacgctgtgcgtgctgatccttcgcaacggttgcaaggtgatcggcgtgaactacggcgccatcgatccggcggacttcgatgcagagctcgggcgtgcagcggcgcgcgaggaggccatcgaccagtgctggccgctgctggggttccgtcgacgcgatcagctcacctctgtccccagtgctgcgctcgcggctggcacgatggctgctgctggcgccggctacagcttctccggcgacgttgatatgccgaaggtcatcaagccgaccgtgggccgcaaggtgtggttctacccaggtggcggcatgtggccggccggcatgcagacgttcccggccagcgattacgacgccggcctgcagcagcccctggatgcaaccatcgtctacgtccacggcgaccggctggtgaacctgcgcgtagtcgaccatgcaggcaatgccttccccgtccgtgacgtgcagatggtgcagccgggcgataagtgctgcgccgccggtcaccgcgccgagtggatgccgtaccaggttggccaggccaacaaggcaggtgacgcgtga

SEQ ID NO: 497651 - DNA, 303 bp, Stenotrophomonas maltophilia
gtgagcgctccctcgccgccgtgcgcgccgccgtccctcgcagccaccggcatcagcgccggccgtgaggacgtagtagcgctggtgacgctggacgcccagttcgccgagagcggggaaaccacgctcagcgcagagcaggtgcagcgtcttgctgaccttggctgggtggaggagggcgaccagccggacgaaatcagcatcagcatgctcggtcaggacgtgctggccgagatcgaccggcaggtggccaccatcaccccgatcatcaccgccggtgccgccggcgagagccaggactga

SEQ ID NO: 497652 - DNA, 294 bp, Stenotrophomonas maltophilia
atgcgcactgcgcttatcgccatcgccgtcgcggcgctgctggccggctgcggccggatcacgcgcccggtgccggcgcagtgcaacgaaatctgcctcctgccgtgcacggttaacggtgacgccggcgtgcggtgggaggcagaccccaacaacgccgaggcgtgggacgagctgggtggggaggttgtgcccaccctgatcggcaagctgcagacctgcgaggtccgccgcggcgcatgcgtccagtgcctgcagcggctggacaaggccggaatcatccacctgaaatga

SEQ ID NO: 497653 - DNA, 582 bp, Stenotrophomonas maltophilia
atggcgcttgacgactacacgatcctggtatcggacacccccgagggcctgaccgccaaggtgaaggccgctgcggccgccggcctgctgcccttcggcagcattgccgttgacgtgagccagaagcacttcgcccaggccatggtgaagggcgacgttgctggtggcggcggtggcggtggcactctgccgatcactgccgacaacatcaccgacgccagcacggtcggcaagcaggtgttgacggccgccgaccaggccgcagcgcgcactgccattggtgcgggtaccggcacgtccaacctggccattggcacgactgcgaccactgcagcggctggcaaccacacccatggcgccgccaccactgctgctgccggcttcatgtccggcgccgacaaggccaagctggatggcatcgcagcgaatgccaacgcctattcactgccggctgcaggcgtagccatcggcggtgtaaagattggcgtggccgttgctgatcccacgagcgagacggatgtcgtggcgcaggtcaaggccttgatggcgtctctgcgtggttcgggcgcgctggcgacctga

SEQ ID NO: 497654 - DNA, 696 bp, Stenotrophomonas maltophilia
gtgagcacggacgtactggccggtgcacctgcccaggtgatcgaggcgtacaagcggctgggcgggaagctcaaggcgttcgcgctcgccttgccgatggcagggagccagacggaggcagcattgaaggccgggtatgccgagaagacggccaaggccaatgcttcgcagttcgctgcgaacccggatgtccggatcgtgcacgactacctggtcggctccgtggtgcggacggcggagatcaccttcgagcgctgcatggcggagctggccaagctggcattcggcgaccctgcagcgctgttcggtgaggatggcgcgctgctgccgccccacgagtggcccaaggatgcgggcgcgatgatcgcggaggtgcagcagatcgacctgtacgccggcgtgggcgacgcgcgcgagaagatcggcgtcaccaacaagatcaagttcgccgacaagcatgcggcgctgcgcacagcgctgcagctcatcgatgcgttcccggacaagaagaagaaggtggagcacacccaccgcgtcggcgtggtggtggtgccggcgaagacggggcagggccagtcggcaggcctgcaggatgcgatcgagggctccgcgcagcgcctcgagcagccgcagcgcaagggcaacgcgccggcgttcatggttcgccgggtgcagtcgctggcacagcagggctga

SEQ ID NO: 497655 - DNA, 1437 bp, Stenotrophomonas maltophilia
gtgagcctcgactaccccgccgaggacatcgtgtggcagcccacgccaaagcagtccgattttctggcctgcgacgactacgaggtgctgtacggcggcgctgccggtggcggcaagtcggattcgctgctgatcgacgcatggtgcctgccctggaacggcccccagcacccgcagcaccgtggcatcctgttccgccgcagcttcccggagctgaaagacctcatcgaccggtcacatgagctgtacccgcagttcatcgagggcgctcactacgacaagatcgagcaccgctggaagacgccgtggggcgccatggtcgagttcggctatctcaacgccgacaatgaccggttcaagtaccgaggccgcgcgtggaactacatcgggttcgatgagctgaccctgtggcccaccgcgacctgctacctctacctgatgagccgcaaccgcaccacggcgcgggatctgcccaggtacatgcgcggcaccaccaaccccgatggcgtgggccagcgctgggtgatggaacggtggggcatagaggaggacggcgggccgacgtgcctgccggtctccatgatgttcgaagaggaggacggcgagggcggctatcgtgaggtgccgagaaccttcacccgccgattcatcccggcgaagctgaccgacaacaagcacctgcgcggtaccggctaccgcgagacgctgatgatgctgcccccggaggagcgcgatgcgctgttggccggtcggtggagcggcaaccgcgtcgagggggcgttctacttccgcgagctgcaggcggcccgtgcgcagcagcgcatcggcaaggtgccgttcgtaccaggcgtaccggtcaacacgttctgggatctcggctacaacgacttcaattcgatctggttccaccagcagatcgggctcacgaaccgcttcatccacgcgtaccagaacagcggctacgacatctcgcactacacccggtacctgcaggagctgggcaccgagcgcgggtacgtctacgggaagcactacgttccgcacgacgcggccaatacctccctgcagacgggcaagaccatgatccagctcctgcgcgagcagatggccgggcagagcttcgagatcgtgccgcgcgttgaccacgttctggtcggcatcaaccagacccgagccgcattcgcaggctgctggttcgatgaggaggaatgcgccgatggcctggcctcgctggccgcctaccggaagcgattcaacaaagccatcggcgcgttcaccgacgagccgatccacgacagccactccaactacgccgacgccttccgtcagtacgcgcagggctacaaccccgccgcgatcatcacgaaggattcgggcgactggaagcggcgcctactcgcggccaagaccaagggccgcagctacatgagccgctga

SEQ ID NO: 497656 - DNA, 2091 bp, Stenotrophomonas maltophilia
atgagcgacgtaacgaagaaccgcgacaccgcccgcgacgtgttctggcggctggacgagtgctacaagcgcgggcatgaggacttcatggccaccgcgacgcggctggacgactactacctcggcgcggggcggcaatgggatccgtccatccggcaggaggtcgaggcggatggacggcctgcggtcgaggtcaacatgtgcatgcaggcagtgaacgctgccgtcggctaccagatccagaaccgtgtggacatggcctacctgcccaagggcggccaggccgatgagcagcgcgccaaggtgatttcgaaggtcatcaagcacgccctgggcaatacccagtaccggttccacgagacagacgcgttcctcgacggtctgatccagcagcgcggttacctggacctgcgcatgaactacgacgacaacgacgagggcgaggtcagtctgaccaccttcgatccgcgcgacgtgctgccggatcccgatgcaacgtcctacaacccggatagttgggccgattgcagcatcactcgttggctcacgcactcgcagatcgagcagaactacggcaaggacgcggcggacgagatccgcgactcatccatggcctacgtccacaacaactggggcgacgagcaggggatgatgcgcgacgcgttcggcaacatgccgccgagctacgcgatgaacatgggctggtacggggaggagggaacctggcgccgctacagggtggtggaccgccagagtcacgagtaccagcagacgctggtggcgaagtggccagcgaccggtgaccttcgcatcatcgagggcttcgagcccgagctgatcggctggctgatcgagcagggcgttcacgtgatgcgccggcgcatccgccgcgtgcggtggcaggtgtgcgcaccagaggtgtgcgtctacgacaagctgtcgccctacgaccacttcacggtgatcccgtacttcccctatttccgtcggggcaagacggtcggcatgctcgacaatgccgcgcaggtacaggatctcatcaacaagttcgtgagccagtacgcgcacatcgtcaacgccagcgccaacggcggctggcagggcgaggccaactcgctcgagaacatgaccgacgaggagttcacctcgcgcggtggcgaaacgggcctggtcctgctgcggaagccgggcacccagccgttccagaagatcgagcccaaccagccgccgcgcggcatcgagaacatgatcgacttcctgcagcggaacatgcagacggtcacggcggtgaatgagtctgcgatggggcagggcagtgcagacatgagcggcattgccatccagtcgcgccagttcgccgcgcagcaggcgctcggcattgccctggacaacctgagccgcacccggcagatgctcgccgagcgcacgctcaagctggtccagcgcttctacaccgcgccgcgcgtcatccggattgccgagcctgacgagtacggcgtggagcggcgcatcccgctgctgctgaacatgccgcaggacgacggcacgatcctcaacgacctgaccatcggcgagtacgacgtagaggtcagcgagcagccctatgcggtcaccttcgacaacggccagctcgagcagatggagcggatcgtctcgaagatgggtgtccagatcccgccgcagttcatcctcaaggcttcgacgctggcggacaagaccgagatcgccaatgcgctgcgcgaggcgcagggcaaggcggatccggtcgccgaagccgaggccgagctgaaacgggcgcaggcgcgcctggccgacaacacggccgttggaaaggccgtcgaggcgcagttcagcgcgctgcgcacggccgagatcatcaccgcgatcccgcagaccgccgagattgccgacgcgctgctgcggtccagcggattcaaagaccaagacgcggcgccgatcgtgccgcagccggcgccgggcgccctgcccgagcccgaggcgctgccgccggcatctacccatccgctcaccccggacaacccggaggcgggcatcaccgccggcatgcagtcccagcagccgatccaataa

SEQ ID NO: 497657 - DNA, 1119 bp, Stenotrophomonas maltophilia
atgagcacgcagatccccgacgacagcacccacccgaacaacatggatgaggccacccgccagagcctgctggcctccatcgatgacgatgcaggcgacaccgacgacgccggccaggccgctgctggcactgagggcgccgctggcgctgccggagctggcactgatgatcccgatgcggccgctgccgccgctgccgccgccgctggtgctgctggcggcgaaggtgatgcagccgccggcgctgcgggtgccgaaggtggtggcggggaagccggcagcggtgcggccgcaggagcggcaggtgctggcgccgagggtggtgccggtgccgctggcagcgaaggcggcgacgccggtgcggccggccaggaggatgactcgaagcccgtcgaccgggctgccttcaacggcgtgttgaaggagcttcgcgagactcgcgaagaactcaagcagttcaaggcacagaagccatctgtcagccagcggccggcagatcgtgacttcgctgtggaaaagcagagcctgcgggagaagtgggacgccggcgacatcgatacggacgagtacaacgagcagcgcgacgcgctggttgtggccgaggccgagcaccgcgcgaccctgcgtttccatgagctgcaggaagcgcagcgacaggacacgatccgccagcagcaggaggccgatctgcagtcctggaacggcaaggtgcagaagtgggaggccgagaatgcggacttcctggccaacccgatccgccggcaggcggtggcctccctgatggcgcagctcgacgccgagcaggatccgacgaagcgcctcagcgatgatgcgctgctggataccgtgcgcaagcaggcgcacgaggcgttcaactggaatccggctggtgctggtggtgctggcggttccgccggtgctggcgccgccaacgtcgacccgcgcgcagtcgctgctgcccgcgccgcggcggcagcatcgggaactccgccgctgccgaccggtggcatgggtagcggcgcactggccggcaaggttaatctggaagagttgaagccgggtgacttcaagaagctgtcccaggctcagcgtgctgagctgctggacggcgagctgtag

SEQ ID NO: 497658 - DNA, 1119 bp, Stenotrophomonas maltophilia
atgggtgcaactgactttggctcgatggagccgcaaaagaagctcgcgtaccgcctgaaggcgtacgaggagatgaccgacaagttcttcttcaccaagctgctgggcaaggaaggctcgggcgcgatcgagcacatcaccgagctgtccaagaacagcaagggcgaagccggcgcgttcttccacctgatttcgcgcatgaccggcggcggtaccgtcggcgacaaccgcctgaagggtcgcgagcgcaccctcgaggcgcactggcagcgtgtgaacttcgaccagatccgcaatggtgtggtcaacaagggcaagctggccgaacagaagtcggtgatccagttccgccgcccggcgcgtcgctcgctgtccgagtggctggccgattcgtgggaagaccaggccatcctgaccgcttccggtatcagctacggcctgaacaccgatggcagcccgcgtgtcaccccggaaggccaggatccgtggaccgacctggactatgcggccgacatccgcccgccgagcaagaatcgccacttccgctactcgaagacgctgggcctggtggctggcgataccagcgcgatcgtggccgacgacaagccggcctacgccatgctgccgtccatcaaggccaaagccaagatgaagcgcatcaccccgctgaacatcggtggcaaggattactacatcctgctggtgcacgaagagacgatggcgcacctgtaccgtgattccgacttccgccagtgcctggtcggtggcgacgtgcgcggcgaggccaacaagattttctcgggcgccgtcgtgaccatgaacgggctggtgatccacccgtacacccgcaccttcagcaccaccggtgcggccaacagcaacaagtggggcaacgcgggcacggtcgacggtacccgctcgctgctgctgggcgcgcagggcctggccctggccgacctgggtgcaccggactgggacgaagagaccatggactatggcaatcgccagggtatctccatcgccaagatgggtggctggctgaagccgcagttccccagctcctacgacggcggcagcgtcgaggacttcggcatcatggcgatcgaccacgcgctgtga

SEQ ID NO: 497659 - DNA, 384 bp, Stenotrophomonas maltophilia
atgagcaagacgcagagcgacacccagttcgggcgcaaggtcgtgatcgacctgggcgtcaagaacatcggcgccggcaacgagatcaccgtcaagctgccgcagggcgcgatcatcactgcggtggcgctgctgaccgtggtcgcgttcaacagcggcaccaccgcgacggccaccatcagcgacggcacgaccaagttcgctgatgccgtggacttgaagtccatcggcagcgaaacgaccgccaacgctccgaagcactacgcggaaggcggcacgctgaccttctcgctggcgcagaccggtaccgctgccaccgctggccgcgcactggccatcgccgagtacgtcgtcgtcggcggcggcgacgaaatctacggctga

SEQ ID NO: 497660 - DNA, 513 bp, Stenotrophomonas maltophilia
atgaaattccgtcaccccgatggcgtgcgcctggccctgtccagcggacacgtcacccttgtcggtcccgactggcagcccctgcaggagatgttccaccaggaggcgctgacgaagggctgcgaatgcgaccagaccacgatccggacgcgaaccctcgagccggccgtcgccggtccgaatgccgtcaccccgctggatgagcgcgccaagatccggaaggcgttgatcctgatggtggagcgcaacggcgagggcgacttcaccggcagcggcgcaccgaacatcaacatcgtcagcaaggaatgcggcttccgcgcggacaagggcctcgtgctggaggaatggaattccatggtggaagaggcccagcaggaagatgctgcgcgcaaggctgcggaggcggccggtgttgcaggcccggacggcagtggtgcgcaggttggccagcagggtgaagccggcgccggcgccggtgctggtgccgacggtgcgccgggcgctggccagtaa

SEQ ID NO: 497661 - DNA, 675 bp, Stenotrophomonas maltophilia
atgaacctggctgccttgatcgccgaataccggcggcgggccgatgacgaggtggcgcccttcttcgcggagggcaccaccctgatcggatacgccaacgaggccgtgcgggaggcatgcgtccgcgcgcgcctcctgttcgatgacgcgccgcggcccggcgtgaccacctacgacgttcaacccggacaggagcgggtggagctgggcgagctggtgcactggattgaggcggccagtttcatccgcgcggacggccgcgagttcgagcttgacctgaccgggttggattggatccgtgaacaccccgattggcgacggaaatcagcgagccgcccgaaggtgctggcggatgacgggcgcgatcacctgcgcatgtggcctacccccagcggcgaaggaacgctgcagctcgcggtctaccgcttcccgctgaaggaaatggcagccgacgatgacactcctgagatccgcactgtccatcacgcgggactggtggactggatgctctatcggcagtggtcgcggccagaggccgacgccgaagaccagcagaaggccggcctggcgctcgcacagttcgagcgcacattcggcacccgagacacggcggacgtgatgcgcaagcaccgcgaacgcaagcgcgtcaccactacctacggcggcatccgctaa

SEQ ID NO: 497662 - DNA, 414 bp, Stenotrophomonas maltophilia
atggcaaataccctctacgataagggccggcagcgcttcctcgagggccagttcaactggctgagcgataccatcaagtgcatcttggtggacaccggcgcatacactgcgaacttcaccacgcatgagttcctgtcggatatcccgacctcggcgcgtgtaggcaccgccagcggcgtaacgctgacgagcaagacaacgaccggtggcgcggcggacgcggcggatatcacgttctcgagcgtgaccggcccgagcattgaggcgctggtgctctacgccgacaccggtaccgaaggcaccagcccgctgatcgcctacatcgacaccgccaccggcttgcccatcacccccaacgggggcgacatcatcgttacctgggacaacggtacgaaccgcatcttcaagctgtga

SEQ ID NO: 497663 - DNA, 300 bp, Stenotrophomonas maltophilia
atgagccagaagccgccaacccagtcactcgcgcccggcggtatcgccgcctttggcgcaatgggagcagagcttgcctctgcgctcgatttggctgctctctgccggttgccgccgtaccagatgtacgtcgccgagcgggagccgaaccatgtcggcttggatgcagagcgctatgcaatagagcggaccgcgcatgcgcaagctcgcggggagctgcagcggtggctggatcgctacatcgcttggcatgcagagaaaggctgctggcgcagcgaaagcccgttcggcgtggcgtaa

SEQ ID NO: 497664 - DNA, 852 bp, Stenotrophomonas maltophilia
atgcctgtactggtgcccatcagcgatcagcatttcaccatgattgacttcacgttggaggagcgaacgctcgatgcgatcttcagccagtgggcggccgacgtggtaaatccgactccgtacacggcaattggtggagacgacggcatttcgttgatcgatgctccagctctctggcctggcggtcgcgactcgctatcggtggcgtacgaaggcggcatcgaggttactccgctgtacttcggcgccggcacgtcctttaccgcgaatcttgcctcgaacggcatcaaccggtaccaaagcatggacacgggacgccgggtggcgctcatctaccacccgacaggccttgactcgggtctctccgagttctcgggaattcgaaattccgttgttggcctgttccgcggcagctacaaccgcacgggtgagggggtcaagttcgtagctcgagccgtggctggaaagcgtgtcgaagttgctgtggacaacactgcggccgccgcaggtgtaaccgtaaaagctgtggtgttcgccggcaccagcgtggtttcggttgcggacgttgggaccattccgcgtggccagcgttacctgatccagatgaccactcgagggggagccgtatcaggcacggtggttgaccaggcaggtgcgccggcggcacgccgtgtagtgattcatgaacgagagacggggagtgtcgttggtcgaggaatgagcggcacggatggccgctactcgatcgacgtttcgctgctgcctggaaaagtgatgtacgtgattgcgctggacgatgaggtcgcaccactgaccaacgcagtgatcgctgatcgcgtcgtactgcagtaa

SEQ ID NO: 497665 - DNA, 3303 bp, Stenotrophomonas maltophilia
atggccaccgaggtcgaactccgatttgacacacttccgaccggatacatcccggcggacagccgtgttctcgatctcggttacggcgggccgctgccgaatccaccgcctggcacggtttctccgtggggcatcggtcgactaccgatgccgagcggggcgacggtggtgcgtaccgtcctgcccgacccgaaggttcgagttgatctcgacttcagcactacgctgccaggctatatcggtccgcccagcaacgatgttccgctctcgttccagcccatcggtggggtggatctgggcatcttccctggcggtgaggtcttcaccgtgttggggcagccgctggtgcgcaaccagcagatgcatgttggccctgccgggttcctcgcaggcgctgtcggcgctggcgtggttcggaaccatctggcctacgtgcgacctgcaggcgccgatcagtcccgctacggccggccgttggtcgtcaacggcttcccacaggcctttccggtaggcatccccccgagcggcatcggccggccgacggtattcaacttcaaccaagaggtgcgaccggctggcctgaatgccttccgcgggttcggtgagcactgggtgagcctgggtattcgacggatcacgccggccgggctggtggccacgctgtggggcacgcataccctcgcaggaggagttcgttggatcgacctttccaatcgcggtatcacctccgccgcgtttggcagtgccgttgcctggttcttcgagcgtcaggtgtttccgctgtggtttgtcgcgacgcgctatggcaacgcccgattggacttcaaccacgatgtgatgcccgaagggatcctgccaggccgcgtgggaactcacgaggtgcacgtcccgcgtgtgatcgtagacgtggctggacgcggtatggcgccgccacctatcccgctgcaccgggtggaaaatttcgtccagcatgcgcagccgattggttggatggatggcggccccagtgaaccggagcgcttcggccgcggtgaggtcatcaacaggctgcaggtgattctgcagctattcgcaccttcccccagcgatggcggggtgttcggatccttcacccgcgtggacaaccggaacaagctggtgcgcacggaagggcgcattcatgcggtgatgggtggaccttcagtggccaacaaggcgcgggtcgtccggaccctgccggatcaggacatggcgcggtggggcatgacgctggtagcggaccggatccgcagtgtaaggccgcgaggtggggattcactggcgtggggcagcccgctggggaacatcgtctacaacgcggcgcgcgtggtagctcctgcaggctggcgaactgaggtcttcggtcagcacgggccggtgtggagcaaccgccagtggttccgccacgtgggcgtagaccaatccgcgttcggcaggggaatggtgtcgttccgggttcgtgcagtagccgcgttctcgctgcccaacccgccgcctttcggagcggcggttgtgcagcacctacagcgaacggtgaaggctgaaggctgggcttcgttccgtcacgggttggccacgctgcaccagcgcttcaacatcatcgctgcctgggcggttctgccgccggcaaaccagatgggcagcaataccgtgcgcaacgtcaccccagagctgaaacagatgggggcagtggccactctttggggcgacgcacggatctatcaccggtggcgatccttcgacatgcagggattcaacgcccaggccttcggtacacatgtcgtaaaggaccggcggcagccagtgttacccggtggcattgcaccgcggccgatttcgcaaacgcatgctgtccgcaatgtgcttccggatccacctgcaacgagaacgctcggtgtggttgggtgggacagcggtgagcgcagggtaggtacgccgatcgtgcgcgagaatgcgatccggccggaaggcttcatcgctacccagtacggcatgcaactgctcgagtacatgggcatagcgcccattggcatcccaccgcctcgcgaaatcggtggtaaccagttcggaactccctccctcaatgcctggcggaccatcgcgccggtgggtgtggtcgcgccggttcctcctgttgcagacgttgggccgcgctacgtgtgggctccgcgaggctatccctatagcaccggccattggaacgagctgggccacatcatggatttctacagtctgtttaatgccaacggccagctcaccacggagcgtccggtgtggggccaggctggcgtgagccatttccatcgggcggtcactgctgtaggtgtcaatgcaggggcgctgggaatcccagcgcttcgggtcaatccccagtacattcggatggagggcagccgattccagcgtttcggattcccgaaggtgaacgcgggtggtgtcgtggaagccgttggcaaggaccaggcagagttcggcagggccatcatcatcgaggccgactatgggccccgaacggccaagccatctgggatcgtcgggctcagcttcgggctttccgaggtccagctcttccatcgccaactgctggggcgcggctgggacagcttcacgatcagctcgccggcggcgccatcatggccgcggcgatcgcactgggtaagccacgcatacccgccgttcaacgcgcagggcgcggacatggcggtttacggattgccatgggtcagcaacgcgattcgctccgtgtcgccagccggatttggagacggggcggtagctgagtacacgccaggccacttcgcggcgcgcatgcgtgtgcgccgcaccgggcgggttgtcagcgcttcggtcgggcctgccggcagcgtgggttggccgtcgatcagcatgggtacacgctacgtctggccccgagcgctggcggcaggtggaagcggcgttccgctgctggcgagcacctccattttgcgcccaagcgggttgcaggccggcgaattcggagacatcgatcggtgggaggccgggcacgccaaggtccacggttccgatatgggagcgagcgggaacgcgatcattctgcgcggggtgcgtgccgccgggtttgccggcacggtcggcgcgccgagagttggccgtcccgtcgcgccccacacattccgggcagacgcagtaggagtgccgaccgccatcgcacgctggtgcggcaataaggcaatggccgcgcagggaagcgcacacggccgagtagggattccgaaaattgacacaggacaggtgagcccatga

SEQ ID NO: 497666 - DNA, 1170 bp, Stenotrophomonas maltophilia
atgactactccgctcggcccgtggccgctgggaatggacaacgtgagcgcgtccagcacgctcaagcgagacgaggaggggcggcaggttgcgctggtcgatgccgcgaacgtcgacattgaccgagacggcaggcctgggcggcgccgtggcgcacgcttggtacatgcgcgcgcggacctccacagcatctggtccggaaacgccggggcgttcgtggccgctggggcagagctgctttctgcccccgacctgcaaccgatcgcgctgctgaacagtgccgacccatgtacctatgcagaggtcaatggggaggtgattgtgggaaatcggacgacattgctgcgcgtcaaaaacggccgcgcagcgcccctcggagtccctgatgcgcctccgccggcagcttctgcaggtgagtctggaggcatgcgcatggggcgctacggcgtcgctgtggcctttgtctccgatcagggtgagggagggctttcatcgctgcggttcgtagacgtgcccgacggaggcggaatcatcctgtccgcgctgccgactgcgggcgatgctacggccctacgtatctaccggacccatccgaacggcgaggagctgtaccgagcggctgagatccctctcggcttcccaagctaccacctgggcaacggcgggctcgacgccgccgcagacacccgaaacctgcgtcgcatgcccccagggcagcatgtcgcctcgttccaaggctatctgctagtagcgcacggaaacgtgctccggttcagcgaacccctccgctacggcctgcattcgccgcggcacggtttcgtgcagttcccgcaccgaatcacgatgcttgctgccgtcgggagggccgtgtttgtagggacgagcgcaggtgtcatagtcctgcgagggccccgtcctcgcgagtggtcccaggacatgacgggcgcgctggcgccgatcgagggcgctgttgctgtggtcgcgtccggggcactgcgcactgaacagcccggccaacggatggccgtatggctggcgcccaacggctacgtgctcggaactgaggatggggctgtgatcgagctgcaggcagatcggattaccggtctgatccacgctgcaggcgccctgtgcgttcacggacgacgcgtcgtcgccgcagtcgcgtag

SEQ ID NO: 497667 - DNA, 639 bp, Stenotrophomonas maltophilia
atgacttcgaagctcgaaccgttgatccataccgccaccaagaagatgcgcaactggttgcggcgctgggatcgccaccttgcagacgcactgcgccagggcaacttccgggtcacgccggaaggcatcgtggtctttgatgacaaggtgctgcgcaacgcctacttccatcgggtcgtcgggcgtgatgacgactacacggttgaccacaacctgctggtcgatcagggaatcatgaaggcgttgggtgtcatgttcttcaccgatgccaagatcccggcctggtacctgacgatgggcaacggtgcggccaatccgggcgcgggcctgactgccgccaacttcgcctcgacactgggcgagatcacctccacgacggagggctggagcaataccactcggccgaagtggaaccctgctgcgcctgccgcgaacgtcatcagcaacgtggccaacaaagcgcagttcaacatcgtgtgtgcgaccagcatcaaggtcacgtgcggcatgctcgtttccagcgatgttcgtggcggcaccgatggcacgttgtggtcggcggcgcgtttcagcaatgagcgcgagctgtacaacggcgaggtgttcgaactgggctaccagaccagcctgaccggttga

SEQ ID NO: 497668 - DNA, 2712 bp, Stenotrophomonas maltophilia
atgcgctacgggcccgcccgcgtcgtctacagcggcgacaaggaacgtgcgcaggcctttctgccgaagggcctgcagctcctgcgcaatgcccaggagcgccagcggctgggtggcttgaacgtcctgcgcgattaccaggttctggacgacgacagctactgctacgtgatactgggcggcggcatggccgcggtgcatatcgtcgccgggtacgcgccctcggtgggcgaagtcgaggtggagcgcaatgtcattccggactttgtttccggggtcattcgcaacgggtacatcgagtccgcttcgcgctgggagggtgacagtcgacgggtgctctctcaatttcatcccaccttgcgttgcgcggaaacctatagcctgtgggggaagaaggtgcaggttccttcctatggttatcaggagttcgagcgcctggctgtggagccgctgcagggcttccccgagttgcgcaaccctgcaacaagcggacaggcggccgagcgcgtctattcgcagtacacgctgctgcgcccgaccatgtactcgggtgcgatgcgggggcttgtacaggcactgatgggcttcggccgccagcgccgtctgccccccgcgaaagatgggcagtcgcgcgggcgggaaatcagcctgtacgagaagatccgtagtggaccagcgcagaccgacgtggacggtggtacaccgccatcatcccgatccacgtccacatacctcacggaggtggccaacgaggggctgcaggttcgctacgactggaagttctaccgcacgcacggcctgacgcgggcagcggatggccgctggtggttggtggagatcagtggcagtgcgggagtgatcgcgatgccactgccgctgcatgacgccacgttgagcagcacgttccgtgagctgctcgagcagcgtggagacgttgacgcgctccacctcattgagcagttcggaggcttcccgacaggcgagccgttccccaaagcaggatcactggaatcatggatccgtgcgggacgggttgtgcgcctcgcagcacgagcggatctcgctgaattttaccgtcacagtccctactcatcggatatgggctgggcgttcaatctgcgtggcgacgaagcgcacaatacagcctggcgctttggggacgatgacctgcaacgcggggttcactacgccatcagcttgcagatcggcgcggtccggccggtcaaggaaacggctgatagcccgctgttgaagcgcctcgagcggatgcgcgatgctggtttgttcccggatcgaattgacgcggcaatctggaaggctgcgcgcatgtcagcaaagcagcgcgccctggcaatcggtaccgatgaggcggtgtttcgatacgtcgatgcgctggctttggagcctattgcggtgggtagcgctcgagtgagcagggtgagcgagggcttcctgtggttctcgccggcggccaagcaggacaacggaaacatcatcaggtttcctgaaacggtgctgggccacctggtttcgcactccatgcagcctgcgtcgcgattggcggagcagccggccctctgccacacgaccatgcatgttttcttcgcagggaacgacctgaaatgggtcaagttctactgggttcgggaatcaagcgcaccagcgcagaacaccagcgactttgaagactgcatgtacgtcggccaatggcgcgcacatgacgaggcgggaacgcgacgcatcccaatgatgttctacacgaacgatttcgaccaccgtgaggagcttcctgcggggaccgtcgacacccatattgagagcaaagacctcggatactcgagcgtcgatgtcattgactttggaccgccctatgcgaatgagggctccgtgacgcgcaccaaacgattccttcgccgtaccgaggtgcggcgcgtttcgttcccggacttgggtagcggcgtggcggtacccttcggcgatcgcgagagctactactatgcctggcgccgcggccacgccggcaccgagcgtgaggtgcagcacgagtatcgctatctgcttgacccgcaccactacgagcattggcggaaccgcgctccgtggtcgggcggcgagtggtcaagcggcgtaggctggccgccgagcgagggtgaggaacccggtaccagctactggatacgcctcgaacagcatccgactggctacggtccggtgactcagcgcactgtgtgcacgcccggcgtccgccacgcgcactacaactggctcgccggcacggcctggcacgacggcaacagctacagcccctacgactgcggcgatgccgccgatgagggaccgtggctttcgggcggcgagcatgcgacttcactggcgtactccgtccctgagccccctctccccgtgccggtgagggagttgtcaccgccgggaggcgagtacgaggtctggtggatcagcagctcgactttggggcagatacgcacgcaccgcgaggaggggctggggttcggcctttgggctaccccgtcaccgacggtggataccaacctgacccagtacatcgaagcgacctacaactgcctgggcgaggccacgtctgcgcggtatggcctgaatctcaacggcggaagccgagcggtgggtgtaccgcagtatccaggcatggagagccgccccctcacctacatcggagtaatcgacggtggctga

SEQ ID NO: 497669 - DNA, 1200 bp, Stenotrophomonas maltophilia
gtggctgaacatcagtgcctgatgctggaagacgggatctaccattccgagcagtggctgatcgcgaggaatgacttgctgaccgacgctggaagcgcggtagaggcatactccttcggcctgtccgtgtcgctacgcgactctgccatggtgctcgagagctacattggaattcgaactctggggcttgctgaggccggggtttggcaggaggtctaccgaccggtcgccttgcccgaagcgctgctgctagaccgtggaaggatcggcgagcggtggatgacgcggcggtcggtcacgatgtcggacgccggcgcttggggagaatcgtacggcggcaacagccgcctggcggtgcaggagcgcggtgcgttttctgagcagtacgtgccgaccggatcgccgtccgcaatgctttcggacatcgccaagggggcggagcggtattcaagcgcccgcaccggagccttggccgagcttggtcattggggcgagctcttcactgcagcgcgtagcgcgctcctggccgatgctgggcgactcggtgagatcctctcggcggaggccaatgcgatcgtgttcatccgcgagcgcggcgtgttggccgaccagttcaccggcattgggcggcctcgcggactgctggtagacgctggatggggtgatgagcgatatctgccatcgccgccgatgccggccggggatgggcataccgcgcggcgcgtcgggatgaccacgggctggactgctaacaccgacacctgggccatgagccgctacaccgatctgccgatgaattcgctggcggtgattgacggcgtgttgtacggcgccggcgatgccggactgtttcgccttgaaggcgagaacgacttcgggctgccgatcaatgcgcacgtgcggactggcaagcaggccctgaccggcgagcaaacggcgacgatgcggacggtgtatgccggcgcaaccaccgatggacggttgcagttgacggtggatgccgcccccaagggcgtgcctgtgttctacacctacgatttcgagccgcgcctggctgaagacctggcgccccagcgggcgaagttggggcgaggcctgaagtctcgctactggcaggcgaccatcggcaacaaggccggtgctgatttcacgattgacagcgtgtcggtgctcgatagcgccggccagaggagggtttga

SEQ ID NO: 497670 - DNA, 1914 bp, Stenotrophomonas maltophilia
atggacaactctatcgcaccgtcgaatgacacgaagaatgcctatcaggaggccattcggaacgtcaacaacgccatggaatacatgatgggtgcggccggcgaatggctgggccggaccgaaaccagcatccacaaccttggacgctggacgccggcgcaggagctgacgccaccggatatacggcccagtgaggtcgttgttggcgatatgccgacctttaccccgcccgatccgaacttgctgggggaggtgggggaggttgtgccgccgccctacgaggatctgctgcaccttatcgatgatcttgatctcgatgatcctggcccgttccagccgagcgttggcttgccggtgatgccggctactccggcgccgctgaaccctggcgccgcccccgagcggccggcggtgaacccggtcgagttgccggttgagcctgatctgacgttgcctgcggcgccctcgctggaagcgctcacgttgccgcccgtgccacaggtggacattccaccgttcgatgtggaggaggtgcccacgttcaataccgatgttccgagcctgcggttcgactggcaggagcaggagtattcaccgatggccctcaacgaactgtcggccagcatcaagcagatgctcgccggcggtttcgcgatgccacaggcggtgcaggacgcgctatgggcggccgcagtggagcgggaggatgcgaccgcgcgtagggcgatcagcgcggcggctgatgactgggcggcacgtgggtacaccatgccgccgggcatgcttgtggagcaggtgaacgctgtccgggaacaggcggcgctgaatgccaatggtcacagccgggatgtgttctcgaaggctgcagaatgggcgattgagaatcttcgaactgcggttgcgcagggaattgccctggaatcgatgtggtcgcagcattggcaacagaccgcgcagagggcgttccaaggcgccgaggtgatgctcggtgcaatgaaggatgagttcaacctccatgccgcggcgttcggcctgcggctgcagagcatccaagccaagcgggaggtgttcgaagcgcggctgcgtgcggagttggccaagctggacattctgcgtgcgcagatcgaagcggagcagttgaagggcacgatcaatgagcagagggttcggatttataccagccagctcgagggggtgaaggtgctggccgacatgttcagtacccggctgcagggggcaaagatccggtcggagatcgagcgcgacaagatcgacgcctacaaggtggatgtggaggcctgggatgcgcgcctgagcgccgaaaagacccggtttgaggtgtacgactctcaggtgcggggtgaggtggccaaggtgcaggccttcgaagccgaagcgcgggcctatgccgccactgtgtctgccgccagcgaccgcaacaactcaagactgcgcgtgatcgaggcgaagctgagcgccacggatgccagcgtgcggaagttcctgggcctactgcagtctcagacagcggtagtcgcagcgcgaaaggacgcgatcactgcgcgggctcagacctatgcggctgatactcagcggtggggcgagcagatgcgatatgccggccaggctgaggagatccgggtgcgcgcccaagaggcatcggtgcgaaacaacatcgcgtactttgaggtggtcagccgtcagttcgaagcacgcatgcaacgtttgcagcaggtcgcgctggccctgaaggacgcgatgagctcggcgggccagatgtccgctcagatggccgccggcgcgatgagcgctatccatgcctccgcatcgatcagcggcagcggcagtgccagcgattcgacttcggtcagccgcagctacaactattccggcgagatcgccgacgcctcgtaa

SEQ ID NO: 497671 - DNA, 1509 bp, Stenotrophomonas maltophilia
atggcaaacgaccaacagaagccctatccgcaggtcagcagcaccttcgcgcctgcagcgacggcaaatctcactggcgccgactaccgtgtaggccggggcctgagcagcggcgcggtaccgtccctccaggcggcggccggacagccggcggccgctgcggcacccgcgccggcggcgggaacgcggttcggccgtgggctgcgtacgtgggccgacgaaaccgagaaggtgcaccgtcgaacggtgaatgcggggctgggggcagccgaaggcctggccaacgccgctctggcacccggccgcacgcttggcggcttcgctcgggacgcagtgagcggcttcaatggcactgagcacccggatgccggcaaaccgctcaacctgcgggtcacgctgccccgattgagcgcagcggcggccgcgccagcggcgggcgccgtttcagcggacagcccggcagcaccagccgctacgagcgcagcgcctggcccggtgggagcttccgcggcatcgccgcaggggccgacggtgatcgtgaacgatggcacggttggggcgccggagaacccctacctcaaggacgatccgaaagctctcgtgccgggtatgcgaacgctggacggccagccgggcggagttgcctcgcgcatcggcgaacacggcgagaacgtgtacgacaacgcgagcctagcccgccttggccagaacgagaatcgcaacacgctgggcgcattcgacgcgcgcaccgttggcggactgcccgccagcctgcccgtggtcggcgccgggaccgccggtaccggcgcggtgggtgctgtgatcggcatgcccggcgaagcggagcggcgcgcagcgatgcggcagagcgagctggccacggacctgcggaccaaggggcgcggcagcccgagcatgcgccgtgcgttggtggatcagtaccaggcggagcagggcaacgcggtcagcatggcgaacaacgccgccaagattgccagcgatgaagggctggccggtgcgagcctcgccgcgcgctccgccgaggctggcgctgatcggcagcttcgcgggctgggtctggcggccgacattgcgcagcgcaaacagcagggccagcaggtggctcgcatgctgacgggtgccgatggaaatgcctatgggctgaccaacgatggcgccgtgcggcagatcaccggcgccgacggcaagccattccgtggggcggccgacgctgccggggcgatcaccccgaaggtgcgactcgacttcctcggcgagcagcgcaagagcatcaacgattccctgggcctcagcgccgaagagaaggcctcggcgctggctgacgtggatgcccaaattgctacactcctcggcggcaatcaggttccacaaggcggacctacgccgccggaggcggccattgcccaattgcgagccaatcccggcacgcgcgcccagttcgacgccacgttcggcgctggcgcagcggcccgttacttggggaaataa

SEQ ID NO: 497672 - DNA, 13683 bp, Stenotrophomonas maltophilia
atgtcgcaggacaagaacccttacgagcagtacgttcaacatgcggcaccagaggccggctcgagcaatccgtatgcggagtttgcccagcctcgtcggctgagcggagcgccggcggccgagcccaaggccgctgggtttggcgaggcagcatggcgtggcttcaagcggagcctgccggagacgaaaagcctcctgtacggcgcggccgcagccaccggcgggttggttggtgccgatgggctgcgagactggggattggagaactaccagcgcgtgcagcgtgaggaagttgagccgctgcagaacaactcgtcgttcaaggggtcggtatcgggcgatgcctccttcggcgaatgggccggcgacaccctgggcaacttcggtggccaggcgctccaaagcctggccgtatccgctgctggtgccgctgccggcggtgccgccggcgctccggcaggcggcgtcggcgcggcgcctggcgcggtggtgggtgcggtcggtggtctggttgccaagaccggcgccaagaagctcatcaacgcagaagtgcgcaaccttgtggaacagcagttggccaagggcgtcggccttgaggcggcggagctggcgggatcacaactggcgaagaagcgccttgcacagctcggcgggggtgcctttgccaacaccgggttgaacgtcgggcaggaagtgggcatcgcgtacaccggccgagcggatgatgccgctgaggccggcgaggctttgaccagcggagacgccgcgcgcgcgatcgcatggggtgtaccggccggcctggtggactctgcggccgagggcctgatcgcgggccggttgttccgaggcgcctccgcgagcccgcagatggggcgccgcatgctgacgggggcagtggagggggcgatcaccgaaggtgccaccgagggcgtgcaggcggtgatggagcgcgctggcgcgcggcaggcgctgactggtgcggaggcctacgacgactatctcgagaacgtcgccgccggtgcgctgggcggcagcgtgccgggcgccgcgtctggcttccgccgcaggctgccgcagaacgcgccggaggagcagtccagcgttccgcagcaagctccgctggcgctaccgccgccggaggcggtcaccgtcgaccccgaggggcaggcggtcactgcggcccaggcgtatgcgcgcgacgcggctgatgcggcgtttgcccaggagcggcagaacatcggcctgacgccggatgtaaatcaggcgcgcgctcagcaccctgcggccgcgccggtggccactccgacgctgccggatggaagcccggtaccggacgcctcgaatggcccgctgtcgcgggcagtgaatgttgccgtgaacaatggcgcagcgcaggctgccgccgacgtgcaggcgatgacggccgcattgcagggcgagcccgttgctccccgccagggcgaattgatcgagagcaccgcgcgccgcttgccgtccgcgccgcgcggcgtggatccggccaccggggaagtgctgcagcggccgggtgctgatgaaatgcgctccttcctgcatcggcagatggagacgaatggacgcatgccggccgtgagcacgctggcgcgcgccatgggggttgatgcgtccgaggcccagcaggtggtgagcgatgtgttcgctgatcgccgtgccctgaacgaagaggcgaagaccaatgcacgagctgccggacgatccgaagccggacgaggcgacctggcgcgcggcgctgtggacgctggcggggttccagtcgaaggtgtcgctgttccgcagcctgtttctggcgcagaaagcccccgcagagcccccgccaccgcggcagttgagcgggcggcgactgagcccctgaccgctccgtcggtcgtccaggccgccgcagcagaggctgcgacgagcccggcgaacgcgcgtcccgagccgaccgaggcgcagaaggaggccggcaactacaagaagggccatgcgcgtgtggctggcctggatgtgtcgatcgagaatccggccggcaccagccgccgccccgagtggccgccgctgcaggaccactacgggtatttcaagggttccaagggcgccgacaaggaccacgtggacgtgttcatgacggaccgggcagaggacgagagcctgcccgttttcgtggtggaccaagtgaacaaggatggctccttcgatgaacacaaggtggtcatgggggcgccgtcggaagcggacgcccgacagacctatctgcgcaactacgagccgggctgggatggcctgggcggtatcacgcagatgtcgcaggaggagttccgccgctgggtgaaggatccgagcaagacgaccgtgcccgctgctgcccagcaggttcaacaagcggcacctggacgcgccgcgatcgacacccgcgaagtggatcgagtcatgggcgcaaaggcgtccgagctgaccaccgtgcgcaacgtccacggcgaagccttcaaggtgcgcaagaaggatctggaaggttcccgcgtactgctgccgacgtacgacgccagcggaaagccccgtatgaccaagcagggcgtaacgcgcctgcaccgggacaacatcgccagcgatgagcaggtggccacctacaacgcgggagcgaagacgatcacgcgtcgcggtgcccgcaacacgaaggaagagggcttttccaagccggaagtagtgcagcgcgagatcaagcggcgtgggctcgatccggccaactatgaggtgcgcaagcacttcggcggctatgtaggggtgctgaaggaggccccggacaccgcgatcaagagccaaccgccgacggccggcaacgagggccggggtgcccagccgaccagcaagggcgacggcgccgctcgcacggaaatccatcgcaggatcgaccaggagttcgcggagaacctcgaggccatcgcagaggagggcatcggcgccggtgacaccgtgaagttccgctccggcgatgagaccctggctgcggaggtgatggagatcgacaacgagcagggcacgctgcaggttcgcctcgagaacggtgcaattcgcatcgttcccggtcgggttgcggtgaagcccggtggcgacgccgcgccgacgggcaagccggagaagaaggccaagaagcccgcgcgcgctcccgaggcaagcgcgaacaccattttcacggaagatgcggccgagagggcgcgtgcgactcttcgttccaagctgagccagctcaactccgggatcgatcctgagatcctgcaggcgggcatcacgctggccgggtaccatatcgagaagggcgccagaacctttgcggcgtacgcccaggcgatgctggctgaccttggcgagggcgtgcggccatacctgaaaagctggtacatgggagtcaggtttgacccgcgcgcaaccgatttcgaagggatggacagtgcggccgccgttgaatcggccgacgtggacgcaatcgccgctgctgcggcacagaccgagtacaccgagcaggggaatgctgatgagcaaccgactggacccgaactgggtgcggcagatcaagcaggagcacaagcgcctgcaggccgacgaggacgtgatgcacaaccaggagctgcatcggcggatcctggcaacgtggaaggaaaccaacccggaactgctggcgagcctgcagcgcgaggggatggccgacgcactggcgtacgtgctgcagcagagaatgtggacggagcaggacgagctgatggcagccggactaccggtgaccgacgcgcgcgagcaggccgagcggaacaacctgatgctggatcccagcgccgcggcgtagcgaagtcgccggcagaggtcagcccggccaatcctgggccggggaacttccacatcgcggatccgaccgcaatcgctggtggcggtccggtggctcgcttcaaaaagagccaggccgcgatcgagctgttcaatgagctgtctgccgtggggcgagagcccacgattgaggagcaggctgtccttgctggctacaccggctggggctccttcggccaggaactgttccaaggcacgtgggagcggccccgtccgaaggccggatgggagcagcgcgacgcgtggctgagggagaaccttggccgtgaagcatgggagagcgcgcagcgctcgatcacgaatgctcactacacggacccgccgacggtcgccgccatgtgggacatggtgaagaccatgggcttccaaggcggccgcgtgctcgagccggcaatgggcatcggcaacttcttcgggctgatgccgcaggcactgcagcggcgcagccagctcgccggcattgagctggaccagaccaccggcggcatggccaaactgctgtacccaggcgccaacgtgcgggtgatgccgtaccaggagtcgaagacccccgacaacttctacgacctggtgatcgggaactggccattcgagaacaccgtgattgcggaccggcggtaccagcgcctgaacccgcatctgcacgactacttcttcttgaaggcccttgaccaaacccgtccgggtggtctggtggtgggcatcacgtccgccggcaccatggacaagaaggggttcggcgtccgcgcagagctggcgaaaaagggcgagctgttggccgcattccgccttccgtccggagcgttcgaggaatatgccggcacgcaggtggtcacggacatcctgattctgcgcaagcgcgacgtgccgttggcgcaggcgatggatgccggatggatcgagtcgaaggagctgatgaccccggccggcgagccggtgctggtcaacgaatacttccatgccaatcctgaccatgtagtggggcagatcgaccacgggcagggcgccaacagtgctcggccagggatgctggtacgccggccggccgacatgggcgccgagttgcagcgtattgcccgcctcgtgccgaagggggcgtaccagaaggatgcccgcccggcgcaggtcagctacatcaccaatcacacggccgatcgcgagaacgccctgaccaagacggaaaagggattcttcatcgtgcgcggcgagcacctggcgccggccagcgaggtgattgcctacgccgtcaaggatccggccaagacggccgcgcgcgagcgccagctctcgagcctgatcgatatgcggcagcagtatgcggccctgatcgaggcggaacgggccggtaccgacgcagagcaggcgcgcacggcccttcgagccctctacgatggcttcgtgcaggagcatggccggcttggagcgagctacgggctgcagtacctgcggaaggtggacgatccgttctacccggcgctggcggcactcgaggttccggatagtcggacgcagggcttccggcccgcccggatcctgacggaaagcaccacgcgtggcgctcgccgcattgagaaccccagcgtggcggatgcctttgtgctggcccgcaatcggtcgatcaaccccagcgccgccgaaatcgccgagatcgccagccgccccgaggccgaggtcaaggccgagctgatccagcagggcgccgtgttcgagctccctggcggcgacatcgtgccttcggacatctacctgtcgggtaatgtccgcgagaagctgcggcaggcgcaggcagccgtagcggagggcatggggcacattcagcgcaacgtggacgcgctgaaggaagtagtgcctgccgacattccctattacaagatcgagacgcagctcggcgccacctgggtgccggtagatgcctaccgcgactacatcgcgcacatgctcggtaccgagagtgcacagggtgttgaagtgtccttctcggccggccgctggcgggtccgaattcccgattcaatgaaggggagggcggaagcccggaccaacttcggaaccgacaaggtgccgttccagcgcctgatgaacgcggcgatctcgaatcagaccatcacgctgcatcgccctgccagggacggcggaggtgtggatgtcgacgcaacgaaggaggtgacggagaagatcgccaacatccggggtcgcttcgccgaatggttgtggagtgacgccgaacgcaaggtggcggtggaacgcgagtacaacgaggtccgcaacgcctacgcaacgcccaagttcgacggttccttcctgagcttcgaaggtatggcgctgtcgttgggcagcggcccgttcgacctccgcgaccaccagcggaacgccatctggcgaggcctggtgatgcgcaagtccatcaacgcccatgaggtgggtaccggcaagacgttcaccatgggcggtattgccgttgaatcgcggcgctacggcattgccaagaagcccttgctgctggcgcacaacgccaacagcgccagcgtggctgctgagatccagatgatgtacccggctgcgaaggttctctatgtggacaacctgtcgccggcgaccgtcgatgtgaagctgcgccagatcgccaacgacgattgggatgccgtggtgctgcctcattccctgatggatcgcctgacgttccggaaggacacgctgatgggattggcagcggaagagatcgcccagctcgaggaggccgcgcacgaggccgccagcgatgatggaacgaagctcacgcccgaaatgctggcggacgaggatgagctgaaaaagctgcgctcgccgacggcaaaggagctggtgaagatccgcaatcgcatcctgaactcgatccagatccaagccgaccgtgcgtcgcggcctggcgccatcccgttcgaggaactggggatcgacatggtgctggtggatgaggcccacgagttcaagaagccgccgttcactaccaagatgcgcatgaagggcttgcagacccaatcctcagcgcagtcgattggactgaacttcctcacgcgctacgtccgcaccaacaacaacggcaacaacgtgcacctgttcacgggcaccccggtcacgaacaccatgaccgaggtgttccaccagatgcggtacgtgatggcggaggagatggaggcggccggcgtcgaccaatgggacggctggttcggatcgtttgcgcgcgaagtgcaggatgtcgagctgaacgcggctgccgaatacgaggcggtcacccgcctggccgccttcatcaacgtgcccgaactgcgccggatggtcgggcagtacatggacgtggtgttcgccgatgacatgccggaaatgcggccgcgccgcacggcctctggcaagcggctgggcgacaagacgttgaccgaggccgagagcgctgagctgctgaacggccgcacagaaggggccaaggatcggccgtacaagaaggtggttgttgagacggcagacctgacggcgccgcaaaaggctgccttcgagcgcatccaagggtatgcccgctcctggcggggcatgaccagcaaggcccgaaaggaggccatgctcgccggcttgcccgagtcgcccatcatcaccgaagggctggcgaacaaggcaagcctggatgttcgcctgctggacggcgagaagttggccggccaagagggccgcgcggaggatgacccgaacagcaaggccagccgcctcgtgcgtaacgtcgcggacctctaccgcagccatccggaggcgaatcaggtcatcttcaccgagctggggatctcgaccaccgccacccgcaaggtgggcccggtgggagcgcgcatggaccagcgctacaaggtgttctccacgatccaggacgtggtggctcgtctggtcgagcagggcatcccgcgcgaccagattgccctggtggatggatcgaccagcaaggaaaagcgcaaggaagttgccgaccgcatgaaccggtcggaaatccgtgtggtcattggcagcaccgcatcgctgggtgtcggcgtcaacatgcagcgcaatctgcgggccatgcaccatctggacgcaccgtggatgcccggcgacctcgagcagcgcaacgggcgcggtcatcgacagggcaaccagtggaacacggtgctcgagtaccgctacctgacggaccgactcgatggccgccgctggcaggtgctcgcggtgaaggatcgcttcatcaaggcgttcctgcgctccaagggcgatgagcgagtaatcgagggagaggcggcagcggaggagcagagcgacatcctgcagacctttgcggaggcggctggcgatccgcgcatcctgatccgggaaaagctccgcaagaagatcgaaggcctgcagtcgagggagcgcctgcacagccgcggcatcgctgattcgcaatccaagattcgctcgatcagtaaccgtgcggaccgcaatgaggtggtgctttcgaagatcgaaaaggccggcgcggttgacgccgtggacaccttggtggcgatgaatgccggcaagggcttctccatggacgttgacggcagggcccatgccgaccggaaggaagcgagcgaggcgatcgggaagtggatctcggccaacatgcgtgttggtgatggcccggagcgagtggccaccttcggcgagttcccggtgaaggccatgtgggaccgctacgcggaggtgccgcacctggtgctggatgtgcacggcgtcgagatcacgtcgaaccagcccaccgtggcgagcctggaggcagcgctgcgccgctacccggtcgaagtgcgggagctggccgaaggcatcgccgaggatcgcgcgacggcggagcggttgcgcaaagccacgacggagcccttccacatgggcgaccagctcaaggcggccgagaaggcgcttgtggagcttgagcgcgacattcaggccaatccggttccaccgccggcatggctccgcagcggcgctcccgtcgagaccgaggtggtttggaacggcaagacgttcgaggtgaccggccaccggtggaccgctgacggctggttcgtggttggccgcgacgcacgcggcgaggtggccattccgtacgcggaggcgaccgacggccagggcatgccgctgtacgagccgcgcaccttcgaatccccggtgctggtggacaagaaggcggcaccggctgaggccgtgaagctgtcacggccggctgaggtcgccccccgcggcatttcggcagcccaggccaagaaggcgatcggcacggtgactgcgaagtggggcagcgaggcgccggcggtggtggtgctggaaagccatgccgatctgccagcacgggcaaagagcgatcccgagcacgtgagcgcggaggggttctacgacgactcgaccgggaccgtctatctggtggccaacaatctgagcagcccgcagcgcgctctgcaggtgctgtcgcatgaggcggtggggcattttggtatcgaagccatcaccggcgaccgcacgtgggcggacattgcgcggacgattgaccgcatgcgggccggaggaaagcacgccgccctgtttgctgagatcgaccgccgctaccgtggcgcgaatcgggaaatcggtatccgcgaggccgtggccgttatggccgaaaagggcgttcgcaacagcgtgatcgatcgagccgtcacggcggtgcgcaacttcctgcggcagctcgggttcacgctgcagttgagcgaagcggagctgaggcagcacctggtcgcggcgtcgcgatatgtccgaggcggagcgcgtccgcgcgcgagcagtgcaggtgctggcctggccttctcccgcactgccggcgacctcaaccagtccattccggtagtcgatgtcacggtgggcgacatatcgccggacctgccgccgaaggaggcccgtcgcgtggctcgcgactacctggtgcgcatgcgcgatgccggcacggtgatgcacaacgacgacaagggctgggacatcggcctcacccgtcgttcgatcaatgagctggtgagtttccgacccgagaagctgctgctggtgccggcgctgccgcagatcacgaaggcggcggtactgggacggtcacgcccgaacgcggacacgtctgcggtgaacccgtctggcgattcggtggtggcctatcacgacttctacgcaccggtccggatcggcgacgacctgcgtgtggcccgcgtggtggtgcaggagcagcgcaacgggaagttcgcctacgacctgcagcaatcggatgttctggaaaacgtaagccccgcagaagccgtgcgcgaacccggtcacatccaaggcgcgtcacggcccacaacggggctcacggcgctgaccctatcgcagttgcgggatgcggtcaattccgtggatcgccccggttgggttatgtcaagacccgatcaggtccgcagccccgaattcagggagtggttcggtcggtcgcaggtggccgatgccagcggcgatccgaaggtcgtgtaccacggtaccggcgaggagttctggtcgttcgatccggcaaggctgggccgttctaccgggcacatgacggcgccactgggcttcttcttcgatgagagcaaggcgaaggcgaagcggtacgccgagaaggccgcagacggtgttcccgccgatgagcgcgtgatcgacgcctacctgtcgctgcagaatcccaagcccatgaccctcgatcagttcctcgctgtcgattccttcgaagaggcgaaggcgcttcgctcggccctcaaggctgaggggcatgacggtatccaccttgctgaaatcgggcagtggatcgcgttcgagcctggtcaggtgaagtcggccacggccaacaccggcgcgttcaattcgcgtaacgccgacatgcgctattcgaagcccgatccggaggccactgttgcggccgtggacgccgcgttgggtggaccgtcgagccgtgtggcggacaagctgaaagcgatgttcagggggctgaagcccgagaatctccgcgagaacactcggccggcctggctcggtgcgctgaccttgcggcatctggccgagctgggcagcgacttgcatctgcagcaggtcgcggcctacgcggaccgagtgcagcagatggctaccgaccgcaacatcatgcaggaggaggccgcagggatcgcggattcctgggagaagttccagcgcaaggaccgcgccggggctgatgcgaccgcgaacctgatgcacgacaccacgatcgagggtgtcgacccgtcccaggactatgtgccgttgcgtaccggcgccacccgccgcggtcccgacgagatcgtcacccctgccagcatcgagcgccgtaaggcctcggtggcagaggacatgcgccaggcgcgatcgtcggaggctgtgggccgcctggaggccgagctgcaggcactggatgacttgctcgcacaggagcaggctcgaaaggcggtctaccccgagttggtccggcgcttcctggcgctgccggccgccggccagcagctctaccgcaccgccaagcaggcctacgtccgccaatcggaacagatggagcaggccctgatcgaccgcatcgaagcactgcaggccgaccggaagtccaaggcgacgatggtgagccagatccgacagcagttcgagtcggcgcgtttgaatggtccctacttcccgctgcagcgcttcggtcagttctggatctccgccacggacgctgctggcgagcctgccttcctgatgtatgagaaggtcgagcagtggcgggaggcacagcgggagctgcccgcgcgcggcttcaccgtgaagaaggcgggccgcaagctcgatgaggcccgcagcctggccggtgccagcggcggcttcatggccgacctgcaggagctgctggccaacgccggcattgacgagagcacacgcgacgacgtgtaccagctctacctgcgcacgttgccggagctgtcggtgcgaaagcaccagatccaccgcaagggcacggccggctacagcgcagacgccctgcggtcgttctcgtcaaacctcttccacggtagcttccaggtcgcgcggcttcgccatgcccacgagctggacgccgatttgatggacatgaaggcagccgttgaccggttgaccgagagcgatccggagcgcgcggccaagggggcggcgctctatagcgaaatgaacaagcggcacgagtgggtgatgaaccccaaggactccaagacggtcagcgggctgacttcgctgggcttcgcctggtacctgggcaccacgccggcggccgcgctggtcaacctgtcgcagacggccatcgttaccttcccggtgctggccgcccgcttcggggtcggcaaggcgttctcggccctgtcgtccgggatgggccttgcgctgcgcaccgcgacgggcgacatcaccggcaacctcaatgcggaagaacgtgcggcgtaccacgtctggcgcacgtcgggcgcgatcgacaagtcccaggcgcacaacctggctggcctgtcggaaacggacacccgcgcctttaaccctgcggtgcgcaagggcatgcaggtgatctcctggttgttccacaaggcggaggtagtgaaccgagaggcaaccgcgttggcggccttccgccttgcgcgccaaggtggccagacgttcaacgaggcggtgaagtacgccggtgatgtggtgacggagagtcacttcgactacagcaacgccaaccgcgcgcgcttcatgcagagcaacgcagctaaggtgctgctgctgttccggcagtacagcctgaacatgacgtggttcctgtggagaaacctgtaccagtcgatcaagggccaggcaccggaggtccgccgcgaggcgcgcacgaagctgggtggggtgctcggcatgactggcctgttcgctggcctgatgggcatgccgctgacctcggtgatgttcggactggctgatgccgcggcgtcggcgttcggcgatgacgacgacgagccgttcgattcggaggtggcgttccgcaacttccttgccgatctgctgggcgcggatgcggccagaatcttggcaaaggggccggtcgactacttcacctcggccagcatcggcagccgcgtgagcctcaacgatctgtggttccgcgagcccaaccgcgagctggaaggcaaggaaatggccgactatctgctcgagcaggccggtggcccgttgttcggcgggatgctggtcaacacgctgcgcggcctggcacaggtccaagaggggcacacctggcgcggcgtcgagacgatgatgcccaaggcggtcaaggacggcatgaagtcggtccgctacaccactcagggcgtcaacaccctgcgcggcgaccctgtgatcgaggatcttggggtaggcggttcgctgttgcagctcgcgggattctcgcctgcgagcctcaacgagcggtacgaaggcatcaacgcggccaagaactacgaaaagcgcctgcttgaccgccgctcatcgctgctgaatgcctacgcgatggcgtggcgggcgggtgacgccgatacggtcacgaaggtgttgggcaagatccgctcgttcaacgaggctcagccggagctggcgatcaacacgtccaccattcgcgactcgctgcaggcccgcatgcgttacagctcccgagctgagggtggcgttgtgctgaacccgaagatcgctgacaaggcgcgggaggaggcgcgcttcgccgagtag

SEQ ID NO: 497673 - DNA, 321 bp, Stenotrophomonas maltophilia
atgttccgcatcatcgccgcgctcgccctggctctggctgccaccgctgccgctgccgaagaaccaaacccatatgcgcgctacgcgcagccgcagtgcgctgccggcttcaagccggtcggcaagtcgtgcttcaaggtgtgccccgacggccagcacgcgccggcggcgaatttggatcgctgtgaaaaagacgtgccgcagttcgtgaagcgcggcttcttcggcgggtgcccgacgggctacgtcgggcatcctgccgaccccaggcaatgcaccctcccgatcattgccgagaggatgctccgccccaggcgctga

SEQ ID NO: 497674 - DNA, 1653 bp, Stenotrophomonas maltophilia
atggctacaaaggcgagagtttacagctacttgcgcttcagtgatcccaagcaggcggccggcagcagtgccgaccgccagctcgagtacgctcgccgctgggcttccgagcacgggatgaccttggattcggccctctccatgcaggacgagggcctttccgcctaccaccaacgccacgtgaagaagggtgcgctcggggtgttcctcgcggccatcgatgagggtcggatcccgtctgggtcggtgctgatcgtggagggcctggaccgcctcagccgcgccgagcccattcaggcgcaggcccagttggcgcagatcatcaacgcaggcatcaccgtggtgaccgcaagcgacggccgcgagtacaacagggccgggctcaaggcccagcccatggatctcgtctacagcctgctggtgatgatccgggcccacgaagagtccgacaccaagagcaaacgcgtgcgcgccgcgattcaccggcaatgccagggctggatcgccggcacttggcgcggggttatccggaacgggcgtgacccccactggctggaactgaccaagcccggcgagttcaagctggtgccggagcgagccgaggctgtccggctggccgtccgcatgttccgcgagggcaatggcgcggtcaccatcatgcgcgccctcgaggagcagggactgcagatcaccaacggaggcaaccccgccggccagctctacaagatcgtccgcaaccgggcgctggtgggtgagaaggtgctcgaggtggaaggccaggagtaccggctgccgggctactacccgcccctgctgacggcagaagagtttgccgacctgcagcacgtcgccggccagcgcatccgccgcaagggtaccagcgagatccccagcctgatcgccggcatgcgtgtcacctactgcggatactgcggctcggccatggttgcgcagaacctgatgaatcgcggtcgccgggcggatggccagccgcagcacgggcaccgccgcatgatctgcgtcggcaactcccagggctcgggctgcgcggtttccgggagctgcagcgtggtaccgatcgagcacgcgcttatgactttctgcgccgaccagatgaacctgacccggctccacgaggggggcaatcgggaggccagcatcagtggccagctcgctgtggcccgcgcggccgtcgccgacaccaccgccaagatcgaaaaagtaaccgatgccctgctttcggcggccgccggccaggccccggctgctttcatgcgccgtgcccgcgagctggaagagacgctggccggacagcaggccgaggtggacgcgctcgagcacgagctggccagcgctgccgccacgccgccgccggcgctggcgcaggcctgggccgatctggtggagggtgtgcgtgcgctcgactatgacgcccgtatcaaggctcgccagatggtcgcagatacattcgagcgaatcgccatctaccatcgcgggatagagcccgtccaaacccggtcatggaagggaaccatcgatctggtgctggtggccaagcgcggcagcacgcgggtgctacacgttgaccggcagaccggcgaatggcgggctggcgaggagctgaccactgaggcgctgccagcgccgctgtag

SEQ ID NO: 497675 - DNA, 837 bp, Stenotrophomonas maltophilia
gtgaccgcagcgacgaccgccgccggtgacggcagcggtgtgcgccgcttcgtgccgccgccgcgtgcggcggtcgatccgcaggtgttcgcgcacccggtgtttgccgggttgcgcgacgtccatgacctgctggccagccctgagtggccgtccattgcagcgctcgagacacgcctcacgctgcccggcaagcacctggtcgagcaggatgccgcgctgctggccgacggcctgcactacgaagcccgcatcgcacaggggcgcatcgccacccgcgccgacaactggcatgacctgttcaatgcactggtgtgggcccgttacccgcagctcaagcaggtgctcaatgtgcagcagtgcaggcatatcgcatccatgccgccggggcagcgcaatcgcgcgcaggccgcgctgacccagttcgacgaaaccggtgtgatcgtgcgtgtgcgcgatgaggacgtgttggccgcatgggacgtgcatgattggccggcgttgttcgagcctgcgcgctggcagagtggtgacatcgctatcgctgcgatattcgggcacgcgctgatggagcaggcgctgctaccggggcgcctgctggtcggcaagtgcgtggtggtgcacggtgaagtcgatgatgcctgcgttgacgcagtgaccgcggccatcgccgagggcagggcagtggccgatcccctgcagttgcgtccgctgccgctggcgggaatcccgggctggcaccagggacaggatgccgccttctatgcagatgccgcgtacttccgcccgctgcgggccggccgccagtacccgccgccgttgcacagggctatgtag

SEQ ID NO: 497676 - DNA, 2061 bp, Stenotrophomonas maltophilia
atgaataaacgggccaggggcgcaaagcgcccgctcctctatctttccaccgcgctgctggccctggccagcagttcggcactcgcattgggcctgggagacatccgtgtcctgtccaagccggggcagccattgctggccgaaatcccggtggtgtcggcggacccgtccgaactggaaaacctgcgcgtggcgctggcctcgccggtcaccttcgaacgcgtcggcctgcaacggccgaccgggctggtcagcgagctgcagttcgagctgacccgcaatgcgcagggcagggcggtggtgcgcgtcacctcgcaggccccggtggagacgccatcgctgagcttcctgatcgaagctgactggggtcagggccgcctggtgcgcgagtactccgcgctggtcgacgcgccgtccagcgcgctggccgtggccgagccggagatcgtcgcgccggcaggcacgctctccaataccatcgtgcgcgaacctgcaccggcttcggcaacggtgccagcggcagaggcgtccactacgccgccacctgcggtggcgcctgcaccggcacgcccgcgtgcggcctccgcgccggtcgctgcaccggcggccgatggcagcgtcaccgtacagcgcggtcagaccctgtcgcagatcgccagcgcggtggcgcgtggcaaccaggtcagccgcgaccgcgcgatgatcgccctgctgcgcgccaatcccgaagccttcatccgtggcaacgtcaatctgctcaagcagggcgcggtgctgcgcgtgccgggcagcgatgcgcttgccgctgtcgatgccgccgaggccaccgcgctggtgcgcgagcacgctgcgcaatggcggcaggcgcgtaccgtgccgcaaccggcgggtgcggtcgcgccggccgccagggcggcaaccgcgaacgcttcttccccggctgccgccaacggggcacgacttgagatcgctccggcgctggcgtccgacgccgcgcatgcgggcacaaccaccggcaccgctgccggcagcgagggtgacatgctgggcaatgaacaactgcgccaggcgcgtgaggacatcgccacccgcgatgccgagatcggtgaactgaagcagcgcgtggctgatctggagaagctgaaggagcagcagcagtcgttgatcgcgatgaaggacaacgacctggctgccgcgcagcagcgcctggcacaggcgccgggttcccgtgatgcggcaacgccgtggtactggctggggctgccggtgctgctgttggcggcgggcgcggcctggctgctgcgtcgtcgcaagccgtcgccgctgccgccgctgcgtgaggaagacgatgccgccggcctggccgcagcggtgccggcaggtgcggcgctggatacgctggccgagcagtcctcgtggtcgtcggctgttgccgacaatggccgccaggaaccggcgatgcctgcctgggcgaccgaaaccgaagtgcacgacgtggtggtcgccgaacccgttgccgagcacgcggtgcgggccgaatggcaggccgagacactgcgcgacgaggacgcggtggcattgcccgaagcggtgaccgatctgccgcgctgggacgattccgcaaccaccggcgacgaggttgtcgtcgccgagccgctgcaggacgaacgcgttgtaccgcaggcgccggccgaagtggcggtgccggactacgcactgcatgccgaacagcagccgcagttccgcggagtgttcgatctgccggctgacgcgcatgagaacgaggctccggcggataccgtacgtccggaagccatcgacagcatcgaccatggcagcgtcgaggcccctcattccgacgatatcgcgccgagcgcggccgcgcccgccggcgacgcgggctggtcgccgcgtgccggccaggagcgcctggaactggccattgcctacctcgatctgggcgacgcgcagactgcgcgcaccctgttgctggaagtcgccgaaggcggtgacctgcacagccaggcccaggcccgcgaactgctggcccgcctgccgtga

SEQ ID NO: 497677 - DNA, 363 bp, Stenotrophomonas maltophilia
atgagccgcgagcgtcgcatcgactacgttgaattcgcttccagcgacctggccgcaagccgcgccttcttcgagaaggtgttcggctggtcgttcgtcgattacggcagcgactacacggcgttcgacgatggccgcctgcagggcggcttcttccgcggccagccgcagcgggccagcgacagcggcgcaccgctgctggtgctgtatgccgacgcactggcaccggtcgaggccgccgtgcgcgacgccggcggcgagatcgtgcgcccggtattttccttccccggtggcagccgcttccagttcgtcgagcccggtggcaacgaactggcggtctggtccgaacgcgatccggcctga

SEQ ID NO: 497678 - DNA, 690 bp, Stenotrophomonas maltophilia
atggatatgcgccatctctcttcccaccgtatccgcctggcccgcctgacgatcatgcccggcctgctgcttgcattgggcgcgtgtgcgggcggtgactcgtccgccccgactgcatcggcaccggccgctgccacaccggcaggcgcagccgccacagcaccggccacggttccggtggcagcgccggctgccgacggcctggcggcgctgatccaggccagtggcgtgaaatgcagcaacgccaatacgggcagcggctgcacggccggcgatgtggacagcggtgatttctacgatgtcgaactgtcgccggaccgtggcgaccagggcttcttcgcgggcgtagccgacgccaagggcgtggagacgttgaatgcggtgccatccaccggcagcaaggccagcgtgaccgcaaagctgtcgaaggggcagctggtctgcgtgcagggcatcgggcgtaccggacagaatccgctgttctattacgtcgtggcggttcccgcagcaacggtcggcaagtgcaagggcaacacgttgtgtgacacctatggcgacaggccgatcactgacctggcgaacacggggggcgaggcctgccatgtggcggcgccgggacgttacgccgggaactgcgcgcagggctgggtcagtgcggacgtgctcgacgtgttttccaacggaatgtaa

SEQ ID NO: 497679 - DNA, 252 bp, Stenotrophomonas maltophilia
gtgcggacgtgctcgacgtgttttccaacggaatgtaattacggtatcgatgcggccgacaagctgcagagcatcacgttgcaggatggcaaggcgttcgtgatgggcacgacgccgggcttccgcaccgccatcgatctggctcaggcgccaccgccgctggagcagaccagtgccaagctgctggcagatccgccgcaccagcagcgggtgcatgaggagcagcagcgggtcgcgatgggcggtcgctga

SEQ ID NO: 497680 - DNA, 681 bp, Stenotrophomonas maltophilia
gtgagcgcgctgctgcgcaacagcggcgtgcttctgctggcgttgggcctggccgcgtgccagccgccggaaccgccggtgctggcaccggccgccaaggccaccacgcagccggcccagcagccggccgccaatgatgacctcgacccgatggcgcgtacgccgatcgtcgatccaccgtctgcgcaaggcgcggacagcgacgacgtgcctgcagtggcctcggtggcgctggatcatgccggcgaggtgctggtcggccagcacatgagtgacctgaaggccctgggtccctggaaagcgcagggcgcgaaggagttcttcgaaggcgactgcgagtactacgatggcaaggcgctgccggccggcgtgtcgatgatgaccgatgacgagcgcgtggtgcgtttcgatctgaagccgggtgacgacccggagctgccggttgagcagcccggtccgtttggcctgcgcgtcggcatgacccgcgcacaggccatggcgcagtttccgaatccgccggtgtccagtccgcatgcctatgacggcgaccagggcgagtacctcacctggcaggacccgggctcggacctgggcatccgcctggaactctatgaagggaaggtcacccggatgtactgggggaccagcgatgcgattgaactgattgaaggatgtgcctga

SEQ ID NO: 497681 - DNA, 1041 bp, Stenotrophomonas maltophilia
atgaacgtactggtgaccggcggtgctggctacatcggctcgcatgcatgcgtggagctgcagcagcaggggcacggcgtggtcatcgtggactcgctgtgcaacagcgacgccagcgtggtcgagcgcatcggacggatcaccggcacggcaccggtgtttgtgcaggctgacatccgggaccggccgcgcatggccgccttgatgcaggagcacgcgatcgatgccgtactgcacttcgcagcgctcaagtccgtgggcgaatcccagaagattccactgcagtatttcgacagcaacatcagcggttcgattgccctgctcggtgccatgcaggatgcaggcgtgcagttgctggtcttcagctcttcggcaacggtgtacggcaaccaggaccactgcccggtggccgagaccgcttcaacctgtgcgatgacgccctatgggcgcaccaagctggtggtcgagcagctgcttgccgacctggcggcaacgggccaggacctgcatatcgcgacgctgcgctacttcaacccggtcggcgcccacgccagcgcgctgatcggcgagctgccgcatggcacgccgagcaacctgatgccctacatcgcgcaggtcgcagccgggctgctgccggaggtccaggtcttcggggacgactatccgacccatgatggtaccggcgtgcgcgactacatccatgtgcaggacgtcgccagcgcccacgtactggccctgcagttccttcgcgaccagcggcgcagcatcaccctcaaccttggcaccggccagggccacagcgtgctggaactgatccaggccttcgagctcaccaccggcgtaagggttccgttccgcatcgtaccgcggcgcgatggcgacatcgcggtcagcttcgccgatgcctcgctggcgctgcgcgagctgggctggaaggcgcgtcacgatctcaccgacatgtgccgggacacctggaagtggcagcgggcgatgtcacgcaccgcacacggtgcaatgccagagcacctgcccgcgcgctga

SEQ ID NO: 497682 - DNA, 858 bp, Stenotrophomonas maltophilia
atggctaacgccagaaccgtaccggtgctgatgcaccaccatgtcagcaactcgccgggaatgatcaccgtatccccggagaacttcgagagccagatcgcctggctcgcacggaccggctggacctcgctgacgctggaccagtacgccggctttctcgccgggaagccggtgccgcgcaaatcgatcgtgatcacgttcgacgacggctacctggacaactgggtctacgcccatccgatcctgcagaaatacggcatgcatgcggtggtcttcgtggtcaccggctggatgcacgaaggtccgatccgcccgcatgcaggcatcgaaggcgccgagctgccggccacgccggaacatcgcgcctgcgaggacctgatctacaagcagggccgcagcgacgaagtgatgatgcgctggagcgaagcgcgtgcggcaatcgaagccggcacgttcgaggtccactgccatacccacagccacacccgttggctcaagcgcgatgacctggaccgtgcgcagcgccgcgaaggcatcagcggcgacctggccatggcgaagcagacgctgctggagaagctcggcgaagtctccgatacgctgtgctggccctatggtgacttcgacgatgactacatcgaagtggcacgcgaacagggcttccgctacctgcacaccacccatcccttcggccgcaacgtgattggcggcgatccggagcggatctatcgcttcgcgatccgcaaccggccggccagctggctgcgcaagcgcatcgcatggagctacaacccgttgatcgcgccgatcttcaacggcttcaaggcgcggcagaagaagatggtgcctggcccgtag

SEQ ID NO: 497683 - DNA, 201 bp, Stenotrophomonas maltophilia
atgaaatcaacaatcaggcgcagtcagggggattactcgctggccttcaagttgtcggtggtagatcaggtcgaacgcggggagctgacctacaaaaggcccaggagcgctatgggattcaagatcgcagcacggtgcttaccttgcttcgccgacatggtcggcaagactgggcggctggagcatcatttcctcccatga

SEQ ID NO: 497684 - DNA, 849 bp, Stenotrophomonas maltophilia
atgccaatcactgactcccccctacgctatccgggcgggaaaacccagcttgcgccttttgtaatagaaattcttcgcgagaatgagctgttctatgggtcctatatcgagccattcgctggcggatgtggaattgcctggaagctgctacttgacggctatgtgtcgcaaatccacatcaacgacatcgatccgtcgatctacgcgttttgggcatcagtactgcgcaaaacagacgaactatgcgagttgatcgaaaccacacctgtcacgatggaagtctggcatcagcaaaaggccatccagcagaatcggcgctcgcgacagctggaacttgggttctctacgctctttctgaatcgcaccaaccgttccggcatcctcaagggtggtgtaatcggcggcaaaaagcaggaaagcgcttacccgatggactgccgcttcaataaagccgagattctgcggaaaattcagcgcatcgctaagtaccgtgaccaggtgtccctgacgaaaatggatgctgaagacttcatccttagcgcgttgccccgcctaccgaagcatgccctagtcaatatcgatcctccgtattacagcaaggggcgtgatttgtactgcagcttctacaaccatgaagaccacgtccatctcgccagagctattcccagcattaagcagcgctggatggttacgtatgacaatgctcccgaaattcaagaactatatcgacgttttcccagcatcaacctgaacctcaactattccgctcagattaagcgtgtaggcgtggagttgatggtcatcgatcccaagctaaaattacctccggtgatccaacaagcggcatag

SEQ ID NO: 497685 - DNA, 1329 bp, Stenotrophomonas maltophilia
atggggcatagaaccatcaccgtcggtgtgagcaagttgctactggaccgcacaaacgcccgacacgatgcgatggacaacgaaccagagatcatcgcgcaactattgcgtcgtgagaaagctggggaggtagccaagagtatcgcccaagcaggtgcattgaatcccctagaacggatcggcgtcatcgctcatccagcgattaaagacgcgtacatcgtcctcgagggcaatcgccgcgtctgcgccctaaagatgctacatgacccggacaaagcacccgatgccttcaagaagaaggtttcggactacaagctgaagggacagccgattccgagtcgcatcgaagtggtgctctttgacagcgaagaggatgccgagccttggattagcatgcgtcaccgcggcgaggatggcggaaagggcctgcgcccatggggtgtagcagccaaagcacggcacgccgaaaaggcaggtggcgccacagtcaaccagttagcggccgggcttatagatcacgcattgaatgctggtcttattactcaagagcagtacgaagaattgccgatcacgaccgtgacgcgttacttagggaaccccatatttcgccataccttgggactagcctccaacaaggcgctagatttggatgtgccccaggatgagttcgacactggtttgagggtgtttctagtcgactcacttcccaagagcatgaccggcaaagagcctaaagtgcattctcgctcccgttcagcagattggaaatcctacgctcaagatctgagcagccgtgggcatgccccaaagacgcgccttccgcaaaccgtacctcttaagaccaccaaaccatcggctaccaagagggcgccacggctctcgaatccggacaagcgtacatccatcgtaaattccggattccggcatagcttcagcgctgacaacattctcagtcgattgttccgtgaacttcgcagcattgacgccgacgagcattcttttgcggccgcctatctattgcgtgcgttcattgaacgactgactaagctctatgctaaacgccatcgccttgggatggagggagatttgcacaacgtgattgatcgctgtgtcaagcacttggaagtgcactcaagcgcggagcaaaaggctctcaagtcagccctgcaaccactgaaaggaatggtctcggatcgctattcgcgcacctcgcctgattcgctgggaagctgggtgcacggcagcaccatccctactcgtgccgagatcaatcgacgctgggataccttggagcctggacttgaactgctcgcgaaaggcttagcctga

SEQ ID NO: 497686 - DNA, 888 bp, Stenotrophomonas maltophilia
atggaactcccattcgaggtgggcgcgctctacaaccgtcaaaagcagatccacggtgtatttggcgggcaacagcaaggcggcatttcgacacccaaggagcatccgctagtcatcgcgttcactggcgaggccggcgtatctcacggctaccatgacttttgggacgacgacgaagtctttcattacttcggcgagggtcaagtcggagacatgaagtatgtggcgggcaaccgagcgatcggcgagcacgtcaaagatggcaagacgctcgtggtatttcagatgatgggcaaggggcggccctaccggtaccttggcaggttcatgtgccagtcctcctacgtgcaacctggcacgccagatcgagaagggcagcttagatctgcgatcgtgttccggttgagatcattggaagcctcgctgggccttgcggcaagtgagaaggaccaggctgagatcgatgccgcgatcgatgacgtcggcgcgaccagcgcaaggcgcgaaaccgaagtgcggacgaagcagcgtctgttccgtgagcggctgattggcgttgagaagggctgccggctcaccggcattgaggatctgagatttctccgtgcgagccatatcaagccctgggcggactgcagtcacagcgaacgcgtggatggggagaacggtcttctactggctccccatgcagacctgctgtttgatcgcgggtggataagcttttcgtcgaccggtcgcctgctagtttctagcagcctaccgctcgaagtccaagatcggctcggtctgaagttggatacatcgcttcggcatggaattttctcaacgaagcaacttggcttcttggaattccaccgagacgttgtttttgtgaaccacccccgatag

SEQ ID NO: 497687 - DNA, 957 bp, Stenotrophomonas maltophilia
atggacagtagagaaagcgggacgccgtggatcttgcttattgcggatcggcagacccttgaaaagaaaatgctgaaggccgagatgcatccattctgggcaggcttgaccgggaacagcgagagagagggctggatggccgcagccggaaacgcgacccgatccggacttggtttgaacgcgactggatggatgagctacttgggaaatcccctggccagttatttggctggccctgcgattgaggctggtgagaattcctacatcgagcgttgctcgaaggagctggcaagtgtttctgacgtcgtactgcttgagcgcatgaattcggcgctcggtatgtcagtgccagcggtgcgcgttgaagcagcagacgcgttaaggctattcaagttcgagaaatcgcatatccctacgaatggcgagttctacattcggcaccctgttcgaaaagaccagtacattcttgccgtcgagttctccacaaagttcatagcagagaagcacgctgccttccagaagctggcggccgcgcttggggcaaagagcgtcaccttgaggcatgtcaggaccaaacaagcgaagtcgatcttcgctgggagagtcccgattgaggagatcggtgctactgtgggtattaactttaaggttgataagagcgggaacgtttcagaatctcgcagcaccacctacggacggccttccaagtccccatttgtcccagaggagctgagagattgggttcaatctgatactgagttggaaaatatggcattcagtcggttggaggcgaatgcactctcatctagaattaatatttcgacctcgagcaagcaaggtctcgtcgcagaccttgtcgcgaaaatgagcgaaagggaggtgtcggcctcttacagaaactcggatttgtcgacgacagtatgggaatttgaagtcgagtaccatgatctgagttga

SEQ ID NO: 497688 - DNA, 480 bp, Stenotrophomonas maltophilia
atgctgctgctcaccctgcccctgctggccgccggcctcgccgccgcacccgcgccctccgatgacctgcgcgagcagatccgccaggccgacgcgcagctgttcgccgccgcgttcgacgactgcgatgccgacaaggccgcagccatgaccactgaagacatggagttcttccatgacaaggcgggcaagtccgccagcaagcgcgacgacttccgccgcagcgtggccgccctatgcgagagcacgcgcgtcaaccacacccacctgcgccgcgagctggtggaaagctcgctgcaggtgtttccgctgcacgacgatcgcgccctggagatcggcgaccaccgcttccacgagcgcgatgcaaaaggtgtcgagcgctggaccggccaggcccgtttcatccaggtctggcgccgcgtggacgggcgctggctggccgagcgggtgatcagctacgaccatcggccggcggactga

SEQ ID NO: 497689 - DNA, 681 bp, Stenotrophomonas maltophilia
atggtcacgctgtatctgtgggtgcgaacgctgcttccgctgctggcgttcgtgatcgcgtggatgctgctgtcgcgcctgatcacggcccgcgtggcgcgccttccacgggtgcccttgaacctgcccgagcacagcagcagcccgcgcaggaaggaccggcgcatctacgcgcgcaagctgcggcgcagaccgggcctgcgcaccgcaacgcgcccggccaccgcgccgcgcagctggaacctcgcggcggtgttcgtttcgttctctgcgttgattgccgccgtgctggtcatgccggatggcgcgcgcttccaggtgctggtcgagagccttacgggctacccggccacgattgctgaagtacatgttcccgctgccggtcagcccctcgtgctgcaggcgtggcagcccgcacttgcgcagctgtcacggccggtaacaatgcgctacccgatcgggcgcaccggcggccagcatgacgcgcacgccacgctaccggtacaggtgaggcatcagagtgatcggctgcaggtggctacggccgcgccggtggattccgagctgctgcgtgcagagcttgcgcgcttggcggggctgccgacgggtgcaatcaccgtccgccagagcgagatctcaccatggctggaacccggctggacgccgctggacggcatgtag

SEQ ID NO: 497690 - DNA, 663 bp, Stenotrophomonas maltophilia
atggtctctgctgctgcccgcttctgtcgtatctgtggtcctggcccgattctgctggcactgcaggtggtggcgctgctggcggtagcccttgcagccggcttcttccactaccgcgtgggattgctgctggagccggtggatgacgcatgtggtgggcccgatcctgtcgcgcgcatgcaggtcgcagaacagctgctggcgcggtccgctgcgcttgcaccatggcaaccgttgcagtggattccgatggcgggcgtggtactggcgttgctgggcgcgatgtcgatcagcgtctaccgcctggggcgtctgtccgaacgcctgcgacgcgccaatttgggggtgatggccctgcacgccgcgatcctggcgctggccctcagggcattgcatctgtacgacatggcatggaccagcgtggccaagctgtctccggccgcatgcttggttgaactgggcgagcagggccggctgccgctggcacaggcgcagcaggtggtgttcgagatcctcacccatgagcatgcgccgctgctgcgcaatcccgatgaccttgccctggtgctggtcgcgttgatgctggtggcaatggctgcaggattcatgctgtggcgggcgatcgtgagggccaggtctcgggctacgtcaggagaatgctaa

SEQ ID NO: 497691 - DNA, 1143 bp, Stenotrophomonas maltophilia
atggacaaaacaagcagaacaaacgaatcttcctggcagactgacctaaaggaaatcgcggctacaatccgcgagaatacgtcgttctttgtcggaggcattgtatttctctgcggcgcatccatcgcgaacttctgcatgcaggaacgaattgccatcaatgtcctttcctctgacttcgtagcattcataccgctcttctttgcaatcatcattgtgctgattgccgtgatcggcgcattccttggctacatctgcacattggtaatggaaggcgctgccaagagcaagagaggccggctcatggccgtcgccatcattccggaccgcggctctttctttcgaaggccagttcagaatttcgtgaaaagtaactcgccccaatggcttcttctcctctggtcgccagggctgctcttcaccgccgcggccacagggatgctccttttcaatacagatgatacggcgtccgtaatcatcatgatcctatgggcgctcaccagtctttcggtactaacgctgtgtgtccgactgatacgccgacctcaccggcatcgcttcaagcattcctcaatcctctcaaatcttccttcgggcatcctgcaagttctcgccatgtttctggttgcttttgtagccgccaatgccgctgatggagctgggtacggcacagtcatggttctcctgactattgccctgagtacgttgcttgttgcgcttctgcaattcgctaccgttctggcaatcgtgcgcagcagccactttggtgtagtcaggcaagcattctggggaggactactgacggtctcactggcgtgcatctttcccactacgtccgcccccatcacacgcgcaatcctgagcatgggcagcactggaacagcgggatgtgttcgccttgcgatcgatgctcaggccaagccaatggcatcgctaattgaccgaacgctacagcgcgacgcgcccgtcgtctggacgaaacccttgggtcgggtcattccattcggtgaatcactgcagttgaagcttgcgggaaagtcctctcctgtctatatgctcgatcggaaggatctgcgccagagcctgtcgtgcagagaggccgatgaaatgatcaaagcggatgccaggcattccaggccttag

SEQ ID NO: 497692 - DNA, 324 bp, Stenotrophomonas maltophilia
atgctgctgtttctgctgcttgcggtaagcgcgccgaagacccagggggcctatgacgaagtccggcagctgcccgatggccagaccctgatcatgcgcaccctggactgggatctcggtgatggtcgccgcgagcgcgttaccgtgcattggctgctgcaggaagacggcagcctgcgctacgactttgatcggcagccaccggaaacccaggacgtccatcgtcggtcgtgcgcgctgcagggcatgcagccctcgcgtggcgtcaacgtgatttcaggagaaggagccacgcacggcttcagctgcaccagccagcggtag

SEQ ID NO: 497693 - DNA, 411 bp, Stenotrophomonas maltophilia
atgagcgcatcacaaccgcagatgatcttcgtcaacctgcccgtgcaggacctggagaagtcgaaggcgttcttcaccgcgttgggctacagcttcaatcccacctacaccaatgacgatgcggctggcatggtcatcagcgagagcatctacgtgatgctgctgacccaaccttttttccagcagttcaccaacaagccgattgccgatgcacacactcacacggaagtgatcaatgcgctctcggcccccagtcgcaaggcagttgacgagttggtggacaaggcactggctgcaggtgccagcgaaccgcagccggcgcgcgactacggcttcatgtaccagcgcggcttccaggacctggatggccatctctgggaaatcgcacacatggacggcgagccgggctga

SEQ ID NO: 497694 - DNA, 678 bp, Stenotrophomonas maltophilia
atgatccgcaataccgctcttgtcgtggccatcgctgccgccaccctgtcgatgccggcccacgcgggcctgggcaagctgaaggacctggccggtgccgccaccggcacctccagcagcagcgcctccagcgccgccgctccggatgaagccgcgcaggaagcgctggtgcgtcgtttcgtcagctcgcagtcgcactcgctgcaggcccagacgtcgttcgcccgcgccttcggcctggccgagcaggtgcagctgctggaagccgagcgccaggcgctgtcgtcgggttcggtcagcgtcgatgcgatgaagaagtcggtgtcggtcagcgaagctgcgcaggccgcgatcaacgagcgccaggccgctcagccggaactgaacgctgaatccaagcagcactacgccgaaggcctggtctcgctgctggcgtcggcagccgaagcacagaagctgggcggcgaagccagcagcttcaccgccggcatgaagaacctgggcgcgacccagctggccaccgttggccgcaagctggcagcgggcgcatgggtggccaaggaatcgccgggcttcatccagggcctgtacggttcgaccaagtcggccgtgaccttcgccaggaagagcaaggtgaaggtgccgtccaacgccgactcgatgctcgactcgatctga

SEQ ID NO: 497695 - DNA, 2640 bp, Stenotrophomonas maltophilia
atgcccaagcacaccctgctcgtggcggccctggccgtcgctctggccgcgcctttgtccgccgccgccgaaacctccgccgatgccagtggcgaagccagtaccctggccgccgtgcgcgtcaccggttccaacatcaagcgcaccgataccgaggcttccaacccggtgcaggtgatcggccgccagcagctggaacagaccggcaaggccaccgtggccgatgtgctgcgttcgatctcggccaacaccggcaacgccagcaacgaaaccaccaacaatggttgggcgtccggctcggccggcatcggcctgcgtggcctgtcgcagaaaaacacgctggtgctgctcaacggccgtcgcctggccaactacggcttcccggccggtggcctgtccgacaccttcgtcgatctcaatgcgctgccgctggtcgcggtcgagcgcattgaggtgctcaaggacggcgcctcggcggtgtacggctccgacgccgtggccggcgtggtcaacatcatcacccggcagaacttcgaaggcgccgagatcggcggcagcttcggcggtgccgaccagggcggcctgcacgagcagaacctgaagttcgtcggcggcctgggtgatctcgacaccgatggctacaacatcctcttcagcctgcaggggtacaaccgcgagcgcctggaccaggacgaacgcaacctgaccaggagtggcatctacaccgacaagccgggtggccgctggaacggctggtcggccaagggcgcgcgctacctggtcaacggcgtctcggtgccgatgctcgatgccaacggtaactgcccgaccggcaccacccgcgtggccagcgcaccgatcgacggcctggccggcgacacctgcggcttcaaccaggcaccgttcaccacgctgatcccctcgaccaagcgctaccaggcctacgccaacggtacgttccgcctgaacgacaacgtcgaagcgttcggcgaagtgctgtacagccagatcaagagtgccgcgtggttcggcagcagcccgttcttcaccctggagagcggccgcttcgcactgaacgcgaacagcggcctggcagagccggtgtcgtcgctgctgccggccaacaatccgtacaacccgtacggccgcgcgatcccgatcgagtacaccttcttcgacctgggcggcacgatcaagaccaaccgttccactgcctaccgcggcgtgttcggcctgcgtggcaccaccgcgtcgtgggactgggaagtggccgcgttcggtgcacgcagcagcgagcgcgagagcgtgtccggtggcttcgccaaccgctgggcgctggccgacgcgctggccacgggcagctacaacctgctcaacccggcggccacgccgcagtcggtgcgtgattcgatcaacatcgccacgctgcgcccggccgaatccaagctgcagggcatcgatgcgaagatttccggccgcctgggccacacctgggccggcgagatcggcttcgccgccggcgccgagtggcgccgcgaaaagctcgactccaacaatccgtggcagatcgatgccggcctgcaggtgcgcccggccattgccgaagtacacggcaagcgccaggtcagtgccgcctacgccgaagtgaacgtgccgctggcctcgacgctggagctgtccgccgccgcgcgcgctgatcactacgatgatttcggcgatgcgttctcgccgaagatcggcctgcgctggcagccgctggatgtcctgctggtgcgtgcgtcggcgtcgaagggcttccgtgcaccgtcgctgtcggaaaactccaacagcaccagcatcgcctacggcagcgtggtcgacccgcgtgatccggacgtgccgggctcgcgccagaaccccaccttcttcaccgtcggcaacaacgaactgaagccggagcgcaccaggagcgtcaacttcggtgtggtgctgtcgccgtgggccaacaccaacctgagcgtggactactaccgcatccagctggacaacctggtcggcaccaacaacacccagaccctggtcaacgacaacgtggccggcgccgtgcagcgcgatgagcgtggcaagctgcaggcggtctacaaccgctaccagaacctgagcgagctgaagacctcgggcatcgatgtcgagctgcgccagcgcatcccgaccgcggcactgggtgacttcaccgtgtcctcggcctacacccacgtgcgcgactaccgtcgcccgaccgtggtcggtgggccgctggtcgactacgccggcagcaacctgggcgcgaccctgcccaaggacaaggccaccaccacgctggactggaagtacggtgatttcaacgcagccgtgacctggtactacaccagcagctaccgccaggaggccagcaccgccgccaaagccgtgcagcagcgcgtcggcagctacagccagtacgacctgtacctggcctacaccggcatcgacaagctgaccgtgtatgccaaggtgcagaacctggccgacaagacgccgccgtacgacgcctcgttcccgggcatccgcgcgccgtacgacttcagccagtacgacctgcgtggccgctacttcacgctgggcttcgattaccgcttctga

SEQ ID NO: 497696 - DNA, 2595 bp, Stenotrophomonas maltophilia
gtgtccttgcatcgccgtgccgttcttccgttgctgcttgccgccgccaccgccctgtcctcgccgcagccggcgcgggcacagagcgcgtacttctttccgcaggtcaccgacgcagcggcgttcgatgcagcggtgccgacgccggagcagttcctcggctacccgatcggcagccgttacacccggcacgaccagctggtggcgtacttccaggaactggcgaaacgctcggacaagatcagcgtgcgcgagatcggccgcagctatgaaggccgcccgctgttgatcgccaccgtcaccgctgcaggcaatcatgcgcggctggaacagatccgccagcagcacgccaccctggccgatccggcgcagccgcgcagcgccgccggtgacagcccggtggtggtgtggctgggctacagcgtccacggcaacgagacctccagtgccgaggcagcgatgctgacggcgtactacctggtggccaaccgcagcgcagaaacccagcaatggctgcagcaggcagtggtgctgttcgatccggcgcagaatccggatggtcgtgaccgtgctgccaactggcacaacgcctgggcgtccgacccagcttctgccgaccccgccgacaaggaacacgtcgagccgttcccgcagggtcgtaccaaccactacttcaccgatctcaaccgcgactggctggccctgacccagcaggactcacggccgaaggtggaggtgttccaccagtggtacccgaacgtgcagatcgacttccacgaaatgggcaaggacagcacctactacttcgagccctcgccgaagagcatgcacagcccgctgattccggcggcgtcgtatgaattcaacaagaccctcgccaagtaccacgcgcaggcgctggatgcgctggggtcgctgtactacaccggcgagaatttcgacaacttctcgccggtgtacggttccacctatccggacttccatggcgctgtcggcgttaccgtcgagcaggccagctcgcgcggccgcgtgcaggaatcggtgaatggcctgctgaccttccccttcaccatccgcaaccaggtcgccaccgggctgggcacggtgcgtggcgcggtgaccgagcgcagcggcctgttcgacctgcagaagcagttcttccagagcgcgctgaagcaggctgcgcagcagcctgtgaaaagcttcgtgttcggcgatgcgcatgacccggccctgacccgtcgcctgctggaactgctgctgctgcaccggatcgaggtgcgcgcactggaccgtgccgtcactgtcgatgggcagcgcttcgatgccggcagcgcctacgtggtgccggtgcagcaggcgcagttccgcctggtgcattcgatctttgccgagacgccgccgatcaagggtgatgtgttctacggcagcaccagctatgcgatcgcaccggcctacggtgtggccttcgcgggcagccgcagccgcatcgaaggcggtgcgcgcgtaaccgcgctgccggcggagcagggcgcggtgctgggcggcgaggccggattcgcctacgccatcgactggcgcgactacaacgccgggcgcgcgctggccgcgctgcagggcaagggcgtgaatgcacgcgcggcattccagccgttcaccaccgcgaccgcgcagggcgacatcagcttcgccgccggcagcctggtcattccggttgccgggcaatcgctgcagggcgcggcgctgctcgagacagtgacatctgccgcgcgcgaggcgggcgtacaggtccacgcgctgtccagcggccggagccgcgaaggcatcgacctcggcagtgacggcgtcaagtcgctgcgcaagcctgcggtggcactggtgatgggcgagggcgtggccgccaccgaaatcggatcggcgtggttcctgctcgaccagcagctgcagttgccagccagcaagctggatccgcagcagctgggcaaggtaccgctggaccgctacaccacgatcgtgctgtccggtggtacctacacgggcgtcgatgccacggcggtggctgcactgaagcgctgggtgcaggccggaggttcactggtgacctacggcagtgcctcgaagtgggcgatcgagcagaagctggccgacggcgaaaagctcggcaaggaagaagaggctgctgatgcaagtcgccgcgcgtttggcgaccagcgcgacattgccgcgatcgagcgggtcagcggcaacatcctcagtgccgatgtggataccagccatccgttggcgttcggcgtgccgcgccggcagctggcgatcaacaaggagaacacggtgacgctgcagccgagcgcgaacccgttttccacggtggtgcgcatcgacacgccgccgcgggtgaatggctatctgtccgagcgcaaccgcacgcgggtggcgggtagtgcgtggctgctggtgtcggcgcaggggcagggcaacgtggtgctgtttgccgatgacccggcgcaccgcaagtactggcacggcacggatcgcctgctgatcaacgcgatcttcttcgggaatctggtgaatccggcgaaagcgcggggttga

SEQ ID NO: 497697 - DNA, 1614 bp, Stenotrophomonas maltophilia
atgaggcgggggctggacgtcctcgaactggacgaggatgctgacgagcgggcgatcaagcgagcctacgccaggctgttgcgggtaacccggcctgacgatgatccggttgcgttccagcacctgcatgaggcttaccagtctgcgttgtcatgggtgaaacaacgcgatcagcccctcgacatcgatcaggacaagcacgccttgccgacgatgcaggatccatcgctggaaccggcttcgcgtgcacatatcgatgcgatacacgcagcgatcgcgctggatcgccagctggagcaggaacgcgggccatacggccatgaccctgtccggatcgtgcagaccacaccgatgccgccagccgacaccgggttggacaaggtggtagagccgtcgcagagcgatccgcacgggcctgacgcgttaccaacggcgcacgccctggcaccgcagcccacgctcgcccctgctggcgacggcgagcgatcgccactgcgttcagtggatcagatggtcgcggccatcctgatccgactggctgcagctgcccggggcagcgacgatgacacgaccgtgcccgcgctggaaacctggctgcaggctcaacccgagctatggtccctgcatgacaagccgctcatcgcggcgtccctgctggagcaactgcgcgaggcgtccccgcctctgccgcgggaggtggtcgagcacgtggccagcagcttcggctgggatgatatcggcaacggactcgatgccgaggatctgcagcggatcgtgcgtcgctgcgatcaggcctggatgctcacggatgcgggccggcagcgcctggcgtggcatgtttcgcggctggacacctccatcgtgcgcccggatatgcgcccggtactggaccggttgcgccgcccgcgcagccgctggcgcaatctgctggagtcgctgccgtggtcgcggcccgacatcacggtgctgacgttggcggcactgcgttactggcccgatcgtgagctgccgccaggcctgtccgccacgcaggtggcgttctggagtcgcttcggcagccgtcaggatcctctgcgttcgcaggtggccgcccttcgggcctggttggccggcctgctgtgcggcacgatctgcctggtcggcgtgatcaacagctggccactggcctccaccgagggcggcatgaccggcggtgcgaaggccgcgctcagcctcgcgatcggcacgctgctgattccattgggctggtacctgatctgcggattacggatgctgatcagctggcaggtgaacccggttgcggctggaagctggcggcaggtcgcctcgcttccagttactgtcgttgtcggtgccggccttctgctgctgttccagcatgagtcgttcccggatatgtctgggatcctgttggctcgtggactggtgttcgcgctctggttggtggcattcatcggtaccaccacgcagcgccagcggctcggtatggccgaccatggcgccctggaccgcgtcagcatgattcccggcctgatttttccctggttggggctggtgatcgtgctgggctattgggcccgcacccaggtgctgcggcgcagatcgccgcaatga

SEQ ID NO: 497698 - DNA, 1689 bp, Stenotrophomonas maltophilia
atgattgttggaatcgacctgggcacgacgcactcgctcatcggtgtgcattcgtcggatggaccgcgcctgttccccaatgcccatggcgagctgttgaccccgtcggtagtcagtctcgacggcgacgtcgtgctggtgggtgctcccgctcgcgatcgcctgatcagccaccctgaccagagcgcggcccatttcaaacgctggatgggcagcaaccgtgaaacccggctgggcgatcgcgtattccgtcccgaggagctttcggcgctggtgctgcgttcattgctggccgatgcggaagccgtgctcgggcagaaagtggaagaagcggtcatcagcgtgcctgcgtatttttccgacgcccagcgcaaggccacccgcgccgccggcgagctggctggcatccgggtcgagcgcctgatcaacgaacccaccgccgccgcgctgtcctatggcctgcagcagcgcgaggaggatgctcgggtgctggtactggaccttggcggtggcaccttcgatgtctccatcctggagctgttcgaaggtgtggtggaagtccatgccagcgccggcgacaacttccttggcggggaagacttcctgcgggtgctcgagcaggcgttgctggccgaacagggcctgcgggcggccatgatcgccccgggcgaacgtgcacagctgctgcgccggctggaactgttcaagcgcgaactgagccaacagggcagcggccacctgcagttcaacctggaaggccgcgaattggactggcagctggatgaggcacgctacgcgcagttgtgcgcccccctgctgcagcgcatgcgtgcgcccatcgaacgggccatccgtgatgcccgcctgaagccggaggcgctggacgacatcgtgctggtgggcggtgccgtccgcatgccgatgatcagccggctggtgacccgcatgttcggtcggctgccattgcggcatgtcaacccggaccaggccatcgccatgggcgcggccgtggcggccggccttaaagcgcgcgaccagtcactgcgcgaaaccgtgctgaccgatgtctgcccctatacgttgggcatacaggtgtgccgtcgcgatgcatccggccaggagcgcggcggctacttccatccgatcatccagcgcaacagcgtggtgccggtcagccgcgaggacgatttctgcccaatcaacgatgcacagacacagctggtactggacatctaccagggcgaaagccccaccgtggaccgcaacatcaaactgggtgaaatccgcattccgttgaagggaaagggcccggcccaggaaaaaagcgtgactgcccgcttcacctacgacgtcaacggattgctgcaggtggaggtgaccgaacatgccagcgggacccggcatgagctgatcctggaacagaaccccggcctgctgtcaccggacgagatccagcagcggctcgcggcactgcagtcattgaaagtgcatccgcgcgacgatcaaccgaacctggccgtagtggcccgactgggtcggctttacgaagagtgcctcgaccagcgcgataccctgcagagatggctgtcgcagttccatgctgcgctggagagccaggacctggcccgtatcgaacgccaccgcgaggaattgacccacgccatggattcgctggagatcgatgcatga

SEQ ID NO: 497699 - DNA, 894 bp, Stenotrophomonas maltophilia
atggaccgtttcgaggcgatgcgggcgtttgcccgcgtggtggaaaccggcagcttcacccgggccgcgcagacccttcagatcagccgcactacggtcacccagctggtgcagcagctggaggcgcacctgcggctgcgcctgctcaaccgcaccacgcgccgggtcagcgtcaccgccgacggcgcggcctactacccgcgcatcgcccgcctgctggccgagctggaagaagtggagggcgggctgggcgacgcggccacccagccacgcgggcggctgcgcgtggatgtgcccgggccgtacgcgcggttgcggctggtgccggcgttgccggatttccaggcgcgctacccggagatccagctggacatcggcgtcagcgaccgcgaggtcgacgtcatcgccgacaacgtcgattgcgtgatccggggtggcaccccggccgacccggcactggtggcgcgaccgctcggcgcgctgccgatcggtttccacgccagtccgggctatgtgcagcgcttcggcctgccgaccgacccgcgcgcgctggaaggacccgaccaccacatgatcggcttcctcagcccgcgcagtggccgggcgcgggtgttcagcgcacagcgcggcgatgagcgcgttgaggtgcagggccgctatacggtcggcttcgatgatggaaatgcctatctggccgctgcgttggcggggttgggcgtggtggcgctgcccagctacatggccgaaccgcacgtggcgcgcggcgagctgctgccggtgttgcaggactggcagctgccgccgatgccgatgcatgtgatgttcccgccgaaccggcacatgagccagcggctgcgggtgttcatcgattgggtggtggaagcgttggggtga

SEQ ID NO: 497700 - DNA, 627 bp, Stenotrophomonas maltophilia
atgaagtcgatcattggtctttcgctgctgctgctcctcaccggctgcggcatccgcaccgaagtggtgcgcgtgaacgtgcccgatatccgggtgaatcccgaagagggtccggtagtggtggtggggccggtgcgcgacgtccgtccggtctattacccggaagttgcggcagccgaccgtgcgaagaacattgccggggtggttcgtcaaggcaacggcgtccttgtctccatcgagtccaccacagcggcggacaagacacgcgcaatcatgatccaggcattgcgaaacatgggctatcgcaccgccgatcagtgcgaaacctcatgtacgcaactggaggcctcgctcaccgatttctcggtcaagatgccggcgaacttcttccggatggtgtcatccacacaacagatgctggccgacatttcggtgcaggtcgttgcgcggaaggaaggccagacccgtaccttcaccgccatcgggcatggcgcgaacatcttccaggtgccatcacgcgagaactgggaaatcgcactggagcgcgcggtaaagagtttcaccagcagcctgcagcagtcgatgtccgaacaggatgcgacggccggttcaaaggcgcaggactga

SEQ ID NO: 497701 - DNA, 147 bp, Stenotrophomonas maltophilia
atgcaggacaacaagccgcccgtctggagttcccagaagtccatcatggtcgccgcgatcatcgccttggcggtgctgttcggcggctaccagatcggcaaggacatggcgctgcgcgacaacgcccggcagtcagccggccgataa

SEQ ID NO: 497702 - DNA, 1164 bp, Stenotrophomonas maltophilia
atgcccgctgctgtttccccccgccctcgcgctgcgggctggcgctccctgctgttgcttgcattggcctcggccagcctgccggccgccgctcagtcgatggcctgcggcacctacaaggacagcaacggcaacaccacgctgaccctggagagcgaaggccacggcttcctgtccggcccctaccaggccaccgaggagctgcgcatcgcccgccaggaagacgtgctcggtaccggcaacctgtccacgggccagctggaaaactggtacttctcggacaacgaccgcacgatcagcacgccctatcgcgagttcacccgtgagcacgccgccgcctgcaagacgatgccgcagcccgtcgagggcggttgcgtgatgaacacctccgagtgcctggaggcgctgccagaggccgcacccgtgaaactgcacgcctggtgcgccgagggcgtgggcgcagcctgcatgcgcctgctggagacctaccagcagcaggccaaggacgcagcgcccggaaaggaagaaccgccgattcccgagatctgcagggaggagctgccctcgttcgacgccgagggttgcatgacggcagccaaggagattgcctcggaaatgatgggcaaggccctgctcggcctgcagcattccgtggatgcgcctctgccacctgcacagcttgatgaactgatcgacctttgccgcgtgcaacagggcgaaacgttctgcgccgacaccgccgaaaccttgtggagcagtggccgcctgcaggaggcccgcgatgcgctgcagcgatcctgtgcacagcgcgcggatgccccggcctgcggtccggccaaagaccttgccgttctcgccagcgcccccgcggcagcgctcacgccggtgccggccgccgcactgccctgtggcagctttgaagccgagcgcagcgtgctgtcgcagctgcgtttcctcgagggtggtgtggttgaggccggtggccgcgaacagccactgcgggcaagcctgcgcgatggccgcatcctcatccaccgcgatatcggcagcgacttcgtgctgcagctgctgcagaacggcaacctggtcggtatcgacagcggcaatcgtttcgcctattacgagcgcaaaccggcggccggcactacccgctgcacaccgtga

SEQ ID NO: 497703 - DNA, 1614 bp, Stenotrophomonas maltophilia
atgcattcacccgcaccgcgccagcgctggctggcctgggcgttgctgctggccgcaccgatggccgccgcacagtcaccacaatgcggcctgttcaaggccgacgaaggcagcagcacgctgcgcatcagctcacccaaccgtggcgagcagaagcacttcggcagtgcgccgtctccggtcgcgttccagcagatcgacggaaagctgcaactggtgaacctggaacatggcctgcccagcgcgctgcaggtgcgcgaccgtggccgcacggtcgaggtggatggcacgacctacatcctgctggcccccgaacagtgcgccgcagcaaccacgccggctgaaggcagctgcctggccaatgccgtggcctgcctggacaaccgtcacgaagccactccggccacgctggaagcagggtgtcgggaaggcgtgcccggcatgtgcctgcaactggctgatcgttggcatgaggaggctaaacctgtcgtcgaagccgatcctgtccagcagaaggcggccctcgacgccgccctgtccggtatcaagctccccgctgcctgtgacaacggtggcttcgaacaggaaaccccggcatgtgccgccgcgctcgaggccgaccccgcagtgcaggcgcagctggtcaaggccgcgatgacggcagccatgaccgaagccatggtgacgatgacggcgccgaccgtgccggtgatcattccggctgagcggcggcaacagttgttgcggctgtgccgcgaggtagcgcatggcggcttctgcgagcgggtggccgaactgtcctgggacgcgggagatcccctgctggcggtgcaggcgctggctgcggcctgcacaccgggcaacgacaccgccacctgcgagcgtctgccggcgttgcaggcgctgggcgcatcattgcgaccgcaaccggcaacggccctgccctgcggcaactaccgggccgatggcggtctgatggacacgctggacttcggtgacaacggcctggtcggcgttggctggaacagccatctccgcgcccgcgtcgaagagggcgacatccgcatccgccacgacaggggcggcgacttcgtgctgcgtccgctgcctggcggccaactgctgggcctggatacctggacccgcttccaggtgttcacccccactggcgatggcccgggccgctgcagtgcaccgaagcagtacaccgtgctgccgctaccccaggattgcccgcaggcgctcgctaccggcggggcggaagcctgctgcgcgcaggtcaagctgcagggctgcaacgtactcggcaaccgccttgcgctgtccgggcactggctgcaggccgccgagcactacaccacggtctgccgcgccggcgtccgcgagggctgcgagaacctggtcacggcccagggcaacgatgccgaggtggatgcacatgcactgctggaccggctgtgcaaggccgaccgcagtggcctgcacgtggcctgcgacgtgctcggcacccagaactgggaactgatcgatctgggccgcgcgctgcagaaggcggccgatgacgcggcatcagacgacaccccgccgccacgccattccaaccgcaagcgctga

SEQ ID NO: 497704 - DNA, 1122 bp, Stenotrophomonas maltophilia
ttgcgcttgccgacccttctccccgcgttgctggtgctgactgcgctgcctgccggcgccgatgcgctgcaatgtggcgaataccgcagcgccgatggcggcatgacgctggtgttcaccactcccggcagcggctaccaccacgatgatggcagcgagcctcagccgctgtgggttgatcgcggtgcggcacagacgcggttggtcatgctcgacgatggcgtggcgcagccgatccgtatcagcgccgatgggcagcgcatcgagcacgacggggtggtgctctacaccctgcgccagccccgcgcctgcgccagcgagcccagcgcgatggatggcagctgccgcgccgctggcagccactgcgttgcacggctgcccacggcctcacccggccaggcccagcgtgcgtgcagcgaaggcgttggcgcgggctgctcggcgctgctgcgccagcttcgcgatggaacaactgtagccggcagcgatgacaccagccccgcgcgcttcgaacgcccgcccatctgccgcgaacacacgcccggccatgacccgcaggcctgcgagacgctgaccggcgatgcgctggccgccgccatgcagaaggtcggtgaacgcctgcaacaggaagacgaagacatgccggattcaccgcttccggccgctgcacgcgatcgcctgcagcagttgtgcctgcagcaccgcagtggccgcttctgcgtcgaagtagccgcacagcaactgatcgcgctggagcccgcattggcggtgcaggcgctgcaggtggtctgcgatgccggccgcaccagcgcctgcgaacgcatcgcaccgctgcgcggtcccggcgctgacctgcgcctcgtcccggcccagcaggtgccctgcggccgctaccaggccgatggaggcgtgatcgacaggctcgacttcggcgatggcacccgggcccgcctgcagaacggcgccatccacctgcagcagaacggcgaaacccttgtgctgcgccagctcggcaacggcgatctgctcggcatggatgcgcagaccgcctaccagcgttaccagcccgtgcccggcacggcagaatgtacgcccccgcgcgagggccctggttcgccgtag

SEQ ID NO: 497705 - DNA, 561 bp, Stenotrophomonas maltophilia
atgtcaatgtcgatcccgccgattccctcgctggtccagccgacctatcacgcctgggtgcgcccgatcgcacacgcttcgttctggctgtcgctgctgctcacggtgtacttcgtgatgcaggggctgctgctgtggccgctgcgcaaccttccgatctggcatctggttgagagggaagtacaagaccagcacctgcacagcctgacctggcttttggcgcatccggtggccgcgtcgatgattgccgcgctgctgtgcctggcctcgacgctggccagctggggcctgctgcgcgagcgcagctggggcctgtggagctttgtggtgatcctgctgctgagcgcattggccaactttgcggtcgccggctggttggacgtgttcatgcgtgatgtcatcccgtttctctccgacgacgccgtcctgcagcaggaactccatctgaaacgctggttgatcacgctgaccgtggtggccatgtcattggtgctcctcggcctgcagggctggctggcctggcgcctgttgcggccggacctccgctcgcgcttccactga

SEQ ID NO: 497706 - DNA, 1299 bp, Stenotrophomonas maltophilia
atgatgctctactacatccagctttcgcttgcccgattcaagcaacggatcggcactcatctggcaatcgctctcatgctgggtgcgggggtggggatcacgactgtgatgctctccattgttctccaggcatcgtcggatcccgcgccaggcaggagctcggcattgttccgcccgtaccttgacgcgcgtccagacgcactgcgcaggggttcgccggatcctggccaggcactgacctggccagatgcgaaggtgcttctgaaccagggccgggcgtggaagcaggcagcaatggcagggggggcggtgacgctctcccggccgggagcgtccagcgcaaggctgcgtgcgaggttcgccacctctgaagtcttcagtgtccttggcatcgccgttgttcaagggcgggcatggaccgccgaggaggggcatgctgcgagtcggatagtggtcctgtcgcgtgcgctcgccgagcgcgagtgtgcgcaggactgtgttggtcatcggttggaactgggcaggcgcacctacactgttgtgggtgtcgcggaggattggcatccggtaccgatgtttcagggagatctcacacgccggccgtttgtggaacctgacgagatctacctgccagttgagaccgcaatcgcggacaggctgactgttgtggatgggacggcgatctgggggggtgaccaggacacggaccctgcaggagccaacgtgtcatggctccaattgtgggcgtggctgcccaccgcggacgatgtcgccgcctaccgggcgaatctggatgcctatgcacaggcaaagggccttcggatcgaaccaggcacccagcaggtggcactttggccgttgatggagtggctggataggctgggattggttccggagcgggccaggatgcagcttcggctgtcactgatccttctcggtgtgtgcatcgtcaacgcggcggcgctgctgagcttcagtctggggcgccgtcggcgggagctcgcgatacgacgtgcactgggagcgcgacgtcgggacgtgttcatccagctcatgtgggaatccatcgcggcgggagccgcaagcagtgtgctcgctgtcgtcacctacacgctgggaatccgggtggttgctgcgggagacgttctgcccagcgcgataacggcgatgcatgctggggcaatgctgatggccgctggcctgggagtcgtcacgacgttgctctgttcattggtcccgtcgtttgaaatctgcagggtcagctccctgtcgagtgccttcgcgaagggggctgcctga

SEQ ID NO: 497707 - DNA, 1200 bp, Stenotrophomonas maltophilia
atgttcgaatcgatgagggagacccgacgacatttgggaagcgccgcactgcttgcagtgcaggcagcgcttgcaagcctggcatgtgcgttcgcactgcaatctgcgctggacagcttcgccagattgaacgccgggagcatccgggaggcagcatcgattggtgtggtcagagtctctgatgtcgaagaaggcgcggatgcggcagtgctgcgggcagacctgtccgcgatccggctgcccggtgttcaggacacggttgtgagcgacgctgttccgttcgggggaagagcccatcgatacggcgtatgcaccagtgagtcggccatggtgcattcgatgaacgcgggcacggcagacgttgctggatgtgatcgcgttcccgttgtaactgcaagctctggcttgctggcgatgctgggcgcgggaatcgtcctggggcgcgatgccatggaggaggacatggttgaaggcgctccggtggtgctgatcagtgaatcgctggctgcccatctgttcggaacggggaatgctgttggccgccacctgtatttcggccccggcagcagccgggtcatcgtgggcgtatttgcgtctgttgctggaccggcgccaggcggcaatgagcgggactcgcagtgggtgctgctcccgggccttcccatgggcgccagtcgctattatctggcgaagtggaggtcggaggttgatcgttcatcgcttgatcgcaccgccgatgcgctgcagcggccttatcggatcatgcatccagccggtgtcgagacgctggcgggttatcgcgacgcctacgtcaaagctgatcgcttcgctacgaccgtgctcgcggtcatgaccgccgttgttctcggtgtgctgatggccggcgtttccggagttgtgggcgcgtggcttgatcggcgccggcactccattggggtccgacggacattgggtgctcgcaggtccgtgatctttgccgaaatcatgttcgaggtttcactgttcaccacgctgggcaccctgctcggcgcgttgtcgttgcagtgggtagggtcgccgcaggacggcagcacaggttcaccgtggttctcgatatcgagcgctgtcgtgctggtgatggcggcctgcttgactgcactggtaccccgggccctgcgaatcgccaaggagccgcccttgaccttgctgaagcccctgtag

SEQ ID NO: 497708 - DNA, 2751 bp, Stenotrophomonas maltophilia
atggaatttggttaccgtaggcgcatgagtacctaccacctgcagtccgtgttccgtccgcagtcggtcgcggtgatcggcggcagcccgcgtcagcgctcggccggacgtgcggtgatgcgcaacctgcgcggcaccggcttccccggcagggtggcgtggatcaacccgcggcatgccgaaatcgatggcatccgcaccgtgaagcggctgaaggacctggactgggtgccggatctggtggtgatcaccgcgccggcgtcgatcgtgccgcaggtggtgcgcaccgctgccgaacgcggcgtgcaggccgcaatcatcctcaccgcccacctgggtgaaggcccgggctcgctgtcggcgcaggtggaggcggtggcgcgcaagcatggcctgcgcatcctcggcccacactgcctgggtgtgattgcaccgcacgcacggctcaatgccagcatcgccgcgcacttcccgcaggccggtgatcttgcgttgatctccgaatcctcggccattgccgccgcgctggtggagtggggcgtggcccgctcggtcgggttttccgcggtggtctcgctgggcgacacgatggacgtcgacttcggtgacctgctcgactacttcgccaccgactaccgcacccgcgccatcctgctctacgtcgagcagatcaaggatgcgcgcaagttcatgtcggccgcgcgtgccgccgcccgcgccaagccggtagtggtggtgaagtccggccgcgccgagcgcgtgcagccgggcagccgcgatacccatgtgcaggccctggcccgcgccgacgacgtgtatggcgccgcgttcaaccgcgccggcctgctgcgcgtgggcgcgctggacgaactgttcacggccgccgaatcgctgggccggttggggaccttccccggtcgtcgcctggccattctcagcaatggtggcggtgtcggccgcctggccgtggaccagctcattgcactacgtggcacgctggccaacctgtccgacagcacggtcgagaaactcgacgccgtgctgccgcagggctggtcgcgcagcaacccggtcgacatcgtggtcgacgccgatggtgatcgctatgccgccgccatcgaggcgctgctggccgacaacgagaatgatgcggtgatggtggtcaacgtgccgaccgcattcacttcatccgcagacgctgcacaggcgcttacccgcacgctcggactgcgcccgcgccatcaccgcgacaagccggtattcgcggtgtggctgggcaatgatgaccaggccaccgccacgctcaacgcggcacgggtgccgacctatccgaccgaggccgaagcggtgcgcggcttccagcatctggtgcgttaccgcgaagcgcagaacgccctgatggaaacaccgcccagcctgccgcaggacttcagtgtcgatgctgcggccgcacgcgcgctggtcgatgcggcattggccaacggccagcaatggctggacccgttggccacccacgaactgctcaaggcctacggcattccctccgcgccggtgatgcacgcgcgcgatgcgcacgaggcaatggacttggcgcagccgttgctggagcgtggcgccagcgtggcgctgaagatcctgtccccggacattccgcacaagtcggaagtggacggcgtgcgcctgaacctgtccacgctgccggcggtgcagagcgcggccaacgcgatcctgtcgcgcgcacgccagctgcggccggatgcgcgcatcgatggcctgctggtgcagccgaccatcgttcgcccgaaggcgcgcgagttgatcgtcggcattgccgatgacgcgacgttcggcccggtgatcgtggtcggccgtggcggtaccgcggttgaagtgatcaatgacaaggcgttggcgctgccgccgctggatctgcgcctggcccatgagctgatcggccagacccgtgcctcgcgcatcctcaaggcctatggcgatgtgcctgccgccgacgagcgcgcactggccctggcgctggtcaagctggcgcagctggccgccgacattcccgaagtgcgtacgctggacatcaatccgctgctggtcgacggcaagggcatcctcgccctcgacgcacgcgtggcggtggcgccgtcgcgcatcctgcacaagggccgtggccatccgcgtttttcggtgttcccgtacccgaaggagtgggagcgcaccatcgaactgtccgatggcggccgcgccttcgtgcgtccggtgcggccggaggatgacgcgttgttccgtgcgttcttcgcccgcgtcagcgacgaggatctgcgcctgcgcttcttccagtcggtgaagcacttcagccacgagttcatcgcgcgcctgacccagctcgattacgcacgctcgatcgcactggtggcgatcgaaccgcgcagtggcgaaatgctcggcgcggtgcgcctgcacgccgatgccgattaccaccgtggcgagtacggcatcttgatccgctcggacctgaagggccacggcatcggctggcggctgatggcgatcatgatcgagtacgccaagtggctgggcctggacgtggtcgaaggccaggtactgcgcgagaacagcaccatgctggcgatgtgccagagcctgggcttcaagacgaagctggacccggatgacccgacggtgatgatggtgaccctgccggtgcagcaggtagaggtgcccgagatcccgccagcggcgtga

SEQ ID NO: 497709 - DNA, 1017 bp, Stenotrophomonas maltophilia
atgaacgtcgtgcgcactctccccctgatcgtcctggccaccgccctcaccgcctgtgccggcaagcccgcgcgcatcgatgcaccggcagccagcaccgtggtcccggccagttcttccacctcgcccgccgccgcggccaccgatgccggcatggctgacgctgcttcggtcgcgccggtggccaatccgccggcggctgccgcatcgtcgccggctgcgcccaccgacagcggcgacggcagcgcggcgaagacctcagccgccaccgcgcccggtggggatgacgacttcgatgccctctatggcggtgccggcaacaccaccaacgcagcggcctacgatccgtgggaaccgttcaaccgcaaggtgcacaagttcaacaacgcggtcgaccgcggcgtcgcgcgtccgctggccaccgcctatacccacgtggtgccgcgcttcgcccgcaccggcgtcagcaacttcttcagcaacctgcgcgcgccggtgaccatcaccaaccagctgctgcagggccgcggtgccgatgcatgggacagcctcggccgcttcctgatgaacagcacgctgggcatcggtggcctgttcgatccggccagcaaggcgatggtgccgcgccgcaatgaggacttcggccagaccctgggtgcctggggctggcgtcgttcgcgctacgtggaactgccgttcttcggcccgcgtaccgtgcgcgacgtgttcggcctggccggcgacattccgctgtcgccgatccgccgtatcgaagaggacaaggtccgcatcggcctgcagggcctgcagctggtcgatacccgcgcgcagctgctggcgatcgacgacctgcgtgacactgccgtggacgagtactcgctggtgcgcgatgcatggatgcagcgtcgcaactaccagatcgagaacgatctgcgcagcaagcgcgagcgcggccacgacgacgccaattcgccgatcccggtcgatgcgatgccgatgccgcagtggacgcactga

SEQ ID NO: 497710 - DNA, 399 bp, Stenotrophomonas maltophilia
atgcgcctgcgcctctgcaccagtctcatcctgaccgcgctgcttgtcgcctgcagcagcgcaccgccggctgccaatccggcggcggcacccgccgcagccaccagtcccgaagcggccgaggcctaccgcgaagcgcgcgatgtggactgccaggccgctggcggcaccctgcagcggctgggccggctgcagcgcgaacagtgcgtgattccctacgccgatgccggcaaggcctgcagccgcaagagcgactgcacgggccagtgccttgccggcggcgaagtggcggttggcagccccgccaccggcacctgccagcgcgatgcccgccagaacttcggctgccgccagcgcattgatgagggcaaggcgcagggcatgatctgcgtggactga

SEQ ID NO: 497711 - DNA, 1560 bp, Stenotrophomonas maltophilia
atgcaaaccgaatatctgctcattggcggccttctattggccgtgctcatcctgcagcttgtcgccctgctgcgccgcccgccgcacgaccgcctcgaacaggcggtgcgtgaggaggcgcgcgccggtcgcagcgagctgcgcgaacagctcgatggctttgcccgcgcgctgaccgatctgtccacccgcaccgaccagcgcctggacctgctgcgcgaggcgctgggcgaggacgcccgcaaggcgcgtgccgaggcggcggagagccagcagcgtggcgccgcactcatggggcagcgcctgcaggaactgcgcggccagctggaaaccttcggccagcagcaggaagcgcgcatccacgccttcggccagcagctgcaggaactcaccgggcgtaccgacacccagctgggtgcgttgcgccagaccttggtcgatgacgcgcgcaagggccgagaggaaggcgcgcagtcgcagcagcgcctgaccgaaagccttggcctgcgcctgcaggaactgacccagcgcaacgaacagcgcatcgccgagatgcgcgccacgctggaagagcagctgcgcgcgctgcagaacgacaatgcgcagaagctggagcagatgcgccacaccgtggacgaaaagctgcagtcgacgctggaaacacgcctgggcaactccttcaagctggtttccgagcgcctggaacaggtgcagcgcggtcttggcgagatgcagcagctggccaccggcgttggcgatctcaagcgtgtgctgaccaacgtcaagaaccgtggcagctggggcgaagtacagctggagaacatcctcgaacagacgctcacccaggaacagtacgcgcgggcagtgaaggtacgcccggacagtggcgagatggtcgatatcgcggtgcgcctgccgggccgcagcagtgacgacacgccggtgtggctgccgatcgactccaagttcccgcgcgaggactacgagcgcctgctcgacgcgcaggaacagggtgacgccgacggcgtgcgcctgcagggcatccagcttgaacgcgcggtgcgcgtgcaggccaagtcgatctgcgacaagtacatcgcgccgccgcacaccaccgacttcgcggtgatgttcctgcccaccgaaggcctgtatgccgaagtgatccggcgcccgggcctggtcgacctgttgcagcgcgagcaccgcgtggtggtggctggaccgaccacggtcaccgcgctgctcaacagcctgcagatgggcttccgcacgctggccatcgagcagcgttccagcgaggtgtggagcctgctgggtgcggtgaagagcgagttcggcaagttcgccggcattctcgagaaggccgagaagcagatcaccacggtcggccgcagcatcggcgaagccagccgcaagacgcgcaccatcgaacggcgcctgcgcggcgtggagtcgctggcgtcagagcaggcgcaatccctgctgggcggcctggccgatgctgatgccacggccgaggacgaaggcaacgaaggcgacgacggcgacgaagcctga

SEQ ID NO: 497712 - DNA, 699 bp, Stenotrophomonas maltophilia
gtgagcaccatcgacgacgacaccctgctggagcgcagctgggagtatcgggaggagacgctgtaccggcggttgttcggcgataccggaccggggatctaccccctcgacatggatctgctgcgcaacgtcttcaagcaggagcagatcgacccgcgctggctgcatgtcggcgtcaatgcgtgccctccgcacggtgatcgacggcactggatctatgtcagcaccggcctgtccaacccctgggaagggcggcacgaagatggagattcggggtggggcatcgaactgatgcttgagacgcaggatgaagcgacgtgggcgctgaccaccttgcgctggttcaccgcgtaccacctgctgctgtgccactcacgcatgcccggcaatccgttggcgccatgggaccggctgaagctgggggggccggtggatcacgcagggagcatgctgcaggcggccgtcttcgtgccgtcattgcactttccgggaccccagcaactgccatcgggacgattcgacttcctgcagctgctgccgttgaccctggacgagcacgcgttcggccgcgcgcatggcttcgaagtgctggtggcccagttgagaacccaaggtgcggcgccggtgatcgatccgcagcgggtcagcatcgatctggcccctgctctcgtacttcaatcgcctccgggctcgccttga

SEQ ID NO: 497713 - DNA, 846 bp, Stenotrophomonas maltophilia
atgtcagcatccgccccggtctccgctccgcccccggttccgccggcttctgccgcgccgcgtgccgtttcgccgttggcggggttcttcatcgacctgggcatcgccgctgtcaccctgttcggcctgagcctggtcagcggcctgctgtggggcctgtaccgtggcgtggtggttggttacgcgaacgcgcaggctggcgctggcgcacccgacgccagttcggtcgcggcgtcactgggccagcccggcgcgcttgcgcagattctcatggcactgttcgccaccggtggcgccgcgttgctgctgtacttctggcgacggccggccaacgccgccgagcgccacgcctcgcgccaggcgctgcgccgcccctccacctggggctggaccctgctggtggcgaccctgatcgtgctcggcagcaacggcatcgccttcctggccaagcaggtcggcgtcgagccggtccccaccaatctggcgctgatgcagagcgcgatcgcacgtttcccgctgttcctggtgctgttcgcggtggtcctggcgccggcctacgaggaactgctgttccgccgcgtgctgtttggccgcctgtggcaggccgggcggcctgggttgggcgtggtactgagcagcctcgcatttgccctgatccatgagatccctggcacgagtgccaatggcccggccgaaatcgcacagctgtggctggtctatggtggcatgggggccgcgttctgctggctctaccggcgcaccggcacgttgtgggcggcggtcaccgcccatgcgctgaacaatgcggtcgcccttgcggcgatggtgttcctggggtcaacgtaa

SEQ ID NO: 497714 - DNA, 246 bp, Stenotrophomonas maltophilia
ttggaccacaagctgcttcgtatggtcgagcatacgaatcaagcgaaacttgcagatgtgatccgctcgcatcgtattgctctgggtgtcagccaggaagcctttgctgaccacatcgaaatgcaccgcgcctactacagcaaaatcgaacgtggcgaaaagaacgtcactctcgctaccttggagcgcgtggctgacggtctgggcacgtcgatgtcagccttgctacgcgccgcagggctctaa

SEQ ID NO: 497715 - DNA, 1092 bp, Stenotrophomonas maltophilia
atggaacaggatgctcgaaaggcccaagttcccctcaaaggtaggggggccgcatcgcgtgtcccaagccgtttcgataccactgagacagtaggagtcgacgatggctgggaatctgtctaccacgagatggaggacgcgccgcggttgagaactcaggtacaggaagagcgagcgcgcacagtcatcagccgtaactcatcccccgacgtagggtttagcgcgtcggtcaacccgtaccgcggctgcgagcatgggtgcgtctactgctttgcccgcccctcccattcctacttgagcctctcaccaggcttggacttcgagacgcgcctgtttgcgaagacaaatgctccggagcggctcagagcagaaattagcaagtcgaactacaagtgcgcaccgattgctctcgggatcaacacagacggctatcagccgatcgaaaggaactaccaaattacacgccaatgccttgaggtgcttgccgacgcaaagcatccggtgagcttcgtcaccaagagtgccttgatcaccaaggacatcgacctgctggcgtcgatggccaaggatcggttggttacggtctacttttctgtcaccacgctcgataggaagctatcggcgaagctcgaaccacgagctgctgctccccacgcccggctgcgagcaatgaaccaactgcacgaggcgggagtgccggtaggggttctgatcgcgcctgtcatccccatgatcacggaccatgacctagaagctatccttcaggccgctcacgaacacggtgcccgggccgctggctacgtgcttctccggctacctaacgagatcaaagatatctggagagaatggctcgagctgcactaccctgatcgggccgcgcacgtgcttagcttgatgcgacagatgcatggcgggaaggagtacgacgccagcttcggcaccagactatccggaaccggaccggtggcggacttgatccgcaagcgatttgaaaaaaagcatcgtgagctcggtttcacgaggctgcctgcgctcgccactcatctgtttcaacctccccaggagaagtcgccacaaggtcaacttttctaa

SEQ ID NO: 497716 - DNA, 789 bp, Stenotrophomonas maltophilia
atgctgggatttgacggcgttccgctagcgggtgcttccattgtgccaagcgcagaaggacccgcgacgttcttcaatgcccggggcaaagagatcgtcagaaaggaccttccgatgatcaccaagtctcgatcgatcaacacgtcgtggaaggactggcacgggcaaacccaccacggcactcagacgagatcttacgaaacctatccccgggaacacattgcgccacctggcgaattcctcaccgccgtggagacagacggtggtatcgcaatggctacgaggatcattgatcggacggagccagaagagagcattgcaaatctcctcaacctctacctggaatgcttcccacactttgaaatcgttgacccgagccttgcggtgccagtcagggtcgagaaggtcaactggcgcattcttcctcctgggaagttcccgtttgatcgagcgatgcaggtgctggataactatctggagcagcttaccgaaagcgatcgcgcagccgctaaacagcgcatccggaccatcactcgtcacgagccagactttatggcagtaggactaggcggtttcagtgagtacatcgtcttcgggttcacgcgaaagagtcggtacgtgttcgagagcccggagacaggcaacgccacctacatcttcaggaacgaatgggaggaggtgtctcagctcaccaagcgccagatcctccaagagcagctacaggaggcccggattatccacacctctcgttgggctatagaagtctcagaagcaatccagcgaaagtga

SEQ ID NO: 497717 - DNA, 345 bp, Stenotrophomonas maltophilia
gtgctgttcaccacggttcccgaagcactcgcccgaagcattgcgggactgctggctacggaaggcagtgtaccggtatggttttccggacttcgctacatccattggtgtggaaagacaaaggatctctcctatgtctccccccacttgggcgacgcccttctgctggatgaccacggcccatacgtgcatgacggccaagagagcctatgggtcgagataccgttgtttggctctccgtactcggcggacgacgacgggttgcagatcgcaactgcacgcctgactgatcgcatcatgcaactggagagtgcatccaacccggcccgcaggaccgaaggctag

SEQ ID NO: 497718 - DNA, 1311 bp, Stenotrophomonas maltophilia
atggcctacgacgtcgaaatctgcaccgcgcatgcgatcacttcaccagcgacggtgacaacgggtgagcaaggcgtgcccttgcccgagggcttctgctttctaatcagcaggtcggacggatcactcgttcagcctgcttttgagttctttgcagattctcatctcaccattgaccggcatccaaagcttgcatgcagcaagaatacgacggcagcaatagcggctgacctcaccgacttccatcactttttggacgcaaggaaaaagcgcgtctcggatgtagacgagcagctcctcaaagcctacgcggacacattgacggacctggactccgcggtgaccctcgagaaatttgccgccgcgaccatccagcgaagatggtcgaccgtgactaagctagtcgccttctgtgtgaaacggggctatctaaggaagccgccagcgctgctgagcaagcagacaaagcgaggaactgttcaagttctcgatgttgacgtgaatctgcccgggctgaacgacgctgacgagctcattactgcgctgcatcccgagacggtcgtaggcgttctcgacgaactaggccctaaacccgtggtcgaaagaaacggtctcgttgaactggcgctcgcgaccacggcgcagcgattgatggctgagctgtgctaccacgccgggttgaggcggtctgaagtgtgcgatctgcatgcgatcaccgtccttaagacgcgcaccgaagggcgcgatccgctttccgcagttgccatcccagtggtcggaaagggcaacaagaagcgcaatgttcccgtaccagtttggctactagaggcgctgaaatgctatgccaagggtactcggcaggccctcattgacctccgactgcggtaccgcaagctggaggatcacggcgcactattcgttctcgacgtaaacgaccgcaggcatgcgggtagtccgataactccccagacgttcgatcgccattttgctctcgccaaagacaggttgcttaagcgcctttccaaagagcccgacctggcgcgctatgaatcaacgcagcgagagcggataaccatccacgcgcttcggcacacattcgccctgtacacgtacatggagaagcgcgcaaacggcgacatggatgcgatcaagtatgttcagtcagtattaggacacagcctcagggagacgaccgagtccatctacctgagaagcgcgaatgccttcgagagcgaaaccagggagtccatcaggctgcacattgaaggtcaatcgtttatgcaactaggcgtagcgggcggatcggcttga

SEQ ID NO: 497719 - DNA, 1830 bp, Stenotrophomonas maltophilia
gtggcaggaagaaggaccgctcaactccggcacgccttgggagatgaggacaaggtcagcgcaacgaagaaatgggatgtacgcgagaccgctgatcgcctggaagcggcgttcagacgcgccggcgaccaacgcgacaacatcgtgaacctcagccggtggaagagcataggtgcagcggcaccgatcttcgccgaagcgttctgcagagcccacaaaaatagcagagagacaagtagatcctcttcagctaacaacatggtgagtggcctggggcagtacctagccgcaacaagagtggagataaacggtccagatgacgttccgatggacctgggcgaatcgtttctaacctatctgaaaggaaaggatgccacgcacccgatcacgctcgcggtgcagacacagcgtcactactacgggaccttcaagaaggtcgtccttgcgctgcacgagatggacccacgctggcaggtgatccgtattcccacaaagccgttcgcaggcctgccacgtaagagcaatcctaaagagcttgaccgtgcggcttgggccaacgtcatgaaggccgctgttgaagaatgcatctcgacaatggatgaagtatggccgcttctggacagggtacacagtgctattgctaagaagagtaagggcgacgctgtatcgctaagcgacccggcggaggcgattgcgcagatcctggcaaactttgacggtcactttcctcgccaagcggaggttcgccagctccctggggtaggaaagatcagtgaaagtgagtacttccgtctgaggagacttgcgcaccccatcggtggtgatctgatcccattcttcctggtactggccatgcactcggggttcaacgagcagccacttagaacactcactctggatggcatatcggagcactacccgcttggacggaaacgaacggtgatcaagtcatccaagcacagggctggggagagcgatcagggggcaccacagcgagcggccttccccgccagcgatcatccgctagccccggaaagattgatacgcttcgtcatagcttggaccagacgaatcagagactacgctgatggcgagcttgccaatgacttcttcctgcacgcagtatccgaaggtgggcgccacaagcgccgaggaatgctcatcgattcctactcatgcagaaccgacgatgtaaacacgcgcgtgaccggttacatcacgctgttctgcaaacgaagggggctcaagtactccggctcacgcgcaaataggcttgcgttctctgaagtggttgatggactgaccgacggcgacgccttcgagctccgagcaatgctgggccatcggctgctgtcaactggtcaagacagctatcagacaaccacgatgcagcgtcggcaaaaggaacagatggcaggagccatggcggcccaggagcgctgggtgacttcaaatggaaatattgatacgcgctcaacccggagtgaccgtgagcacacggcagccacgcagggcttctgctgcgcagatccattccaaagtccgcaaccgggtcagcgcccgggcaaactctgcaccagctatggagcttgccctgcgtgcccgctcgcagtagctgactcaaacgaagcctacgcgctcgcccgcttcctccaactgcaggagctatacgaagaagctagggcagagcttggcagcgagatatggcggcgaaagttcgagaacgcttacctagcgatccgcgactcatggattcccgctgtgagcacaaatgcgaatcgacaagcagcggcgatgatcatgctgacgtcgctccccacacttgaatag

SEQ ID NO: 497720 - DNA, 2067 bp, Stenotrophomonas maltophilia
atgcctgcagtaagaaagatcaaatcagcgcaggcggcaaccctgcatccttcattccaggtggactatgacagtaatgtctggacgttcgctcaaaccactgtcggccaacagagggagttcgtcaccgttgattgggcaatcccggttgcgcgcggggaattactcacagactacaaacacaggggactgctggatgaactgaagtgctaccttaagacctccatcgtcgatgacacggtacgcatgacggttggatctatcccttctacctacatgggcgtgagggagctggtgaagttcatgggggagcgggaaatccgcacgcttttcgacatatccacagctgtgagttgggagtatgtcgaaggtctcgaagagcaatacatcatggctggaggtgatgtcggtcgagatagagcgtggacgcattccactgcctacaagcttattcacccacttacacagatctacgagctcgcggacagcttgcgcgccagaggtggacaagcaccctgcgaagcaccgtttgatggaagaaagacctatgacgttgtgaccgggccgcttgggctcgctcgaacgggtggattgctgcctatcccggacgagatctcgttgccaatcctcacctacgcatatgaatggatcgagcacggctcggaagatgtgatcagacttcaggctgagatcatcccgatgctcatcgacgcaaggagcgcgaagggatcaagacgaatcatatgtcttcgtgagatcaaacggcacatcgaggagttccagatgagtccgatccctgggacactaacgccttggcatgagccgctgctcgcaacggatcggattgatgacgctggggacgagcgcgaaattagcggaactcaggccctcagacgcctaatcctgatgactcaaagcgcatgtagtacgttgctgcaggcatgcactgggattcgagctcatgagctgataggcctatccttggaccacgatccgacgctgcagcacggtgtgatcaagtcagtgacttctctagacggactgatggaggtcttctccatctgcggcatttcagccaaaagggaagcgactcgccatgagtggacagccggactgcgtccgttgggtacaaagcacatgccgatcgttctgaagtccatcgaagtgttggttcggctaatggagccttggagagctctttctggcagcagcacgctgatgctcagcttctcccacgccaagtcccttccatccggtgctgatggaattggccgaatgacagccaaccgaaactctctcctgcagcgcgagttcgccgttgaggccctcactaaaaagcgtggaatcgagatgacgcaagctatctacgaggtgagatccctccgcccacagcgatggaggatcacctttgcgcactacgtcttccgatccaagccggagcttatgcctgcacttcggacccacttccgtcacatgagcgagcagatcacggatcaagggtacatcggcaacgacgcagcgctgctcgagaatctggaaggagagagagtcatggagacctccaggttcctcgttcaaatcactcttggcaagccgatcgggggaggaccggcacagcggcttctcatgcagcatgccgaatcaatggccaaggcactgtcaatgatggacggggaaacactgattgataaggccgtagcatacgtgaagctcaccgacctgcggatatggacagggacgtacgcgagttgtctgatcgatatggtgcctgatcgctccagctgcaatccacacgcaagcctgctcaccgtccgcgcctcgccagacttcggcgtacgatcgcccggcctgtgtgcggggtgcaagtgctgcatcatcctcccagagcatcgggacttctgggaggatcgacttctgaagaatcaggccattgtccaagcagatcggatcaactctaaagaccagcgatcaaagattgccatgagtcgtatcgttcagagtcgagcagttctgaagatgatatccaaggctaccggggacgcctccgatcgttccggcggaagttga

SEQ ID NO: 497721 - DNA, 333 bp, Stenotrophomonas maltophilia
atgagcacgaaggaggcctggtgtccaggccgcgcacagttggtagaactagtaggaatggacaaggctggctttgacattctctggaacctatggtcacagcattcccacatccaccccatttcgttcctgcgcatgcagccaaatggccgaggcacgggcttggaatgcgatcccgatcgcctgtacttggccgttgccatgttgaccagtgccggtattctagaagcagccacagacaagatcgtcgaggtcttcccggatgtggccggcgagcggaaggggttggactcgaagttcagccctggacgtaaacgcaatcggcgaaggtag

SEQ ID NO: 497722 - DNA, 975 bp, Stenotrophomonas maltophilia
atgaccacttccgacatggagacgcgatttcatactttcgccttaatggtcgaaggcggggaggcgatcgatgatctgcagctggacacccgcggtggccaacgtgcggactacctgtggcgatctcgatccgtcattgttgaactgaaagttctgcaaggggacccccagcacaagatcaacagcacattcgagacgttgagaaagcgcgaagacttcccagtaattcttggtcaggcagctgcacacaaggtgcttacgcatcttcccgacggggatgagcaactgcgacgtctccgtcaaaagttcatgcgatccgtggaggccgcatttcgagacgccaaggggcagatcgcaaacactaagcggcttctggagttggatgatgctctaggcatcttggtcctgctgaatcacgatgtcgagtcgttggatccaatcgatgtgggaaaggagatcagtcgcctcatgcaacaacggcaaggcgagacctgggcggtggatgccatttggctgttgtccgaggctcatctgataggcggagcgcagccatgcatcatcattgaaagcgatagagttgaccgcttcccttgggctgaggcgttcttgtcctctctcaacgcccagtggggaatctttaacaacagccccatactcacctcggacgccaagcacttgacggatctgccgatgaggcgaaagtccgagcaacgcacaggagcaatgaccaacgagcagcgctggcggtccaactaccgtactaatccttacctaagcgggttggacgacgatgctcttcggctctttggcgagaaggccattgcagatcttatgccgtacttcctagtgggtggccctaggaagccgatggccgaattagagccgcttttggcgcggtggacgcacttccttgaagaagcctccgatcgtggttttaacgctcgcgggatgggccttcctcgggaacggccttaa

SEQ ID NO: 497723 - DNA, 1311 bp, Stenotrophomonas maltophilia
ttgacaaatctcacccaagtcttcggcgtcagcgccgaccccgtgttgtcgtacatcgtccgcgacaacattgacgggctcttcaccgccgtgctcaaggaggacaagcatgtggtcgtgtacggtgcctcgaagcagggcaaaacagcattggtttcccggtatctgccttacgaccagaacgttgttgttcgcctatcaccgaacacgaacgtcgaagacatttattcgagcatcctccgccaaagtggcgtggagattgagacagggacggtggaggagaagacctcagagacttcggcaactttggggatcaaggcgaaggcgacgatttggttctttggtgagggagaggcaaacgcatcaggtgggcttaaggctggcgataggagccagaaggcctccaagacaattcctttcaatctagccgtggcgcaagacatcgcagagctattgaaggcggtgaacttcaagaagaagatcgttttggagaacttccattaccttgcagaagataagcagcgtcaactatcttttgatctgcgctcgtttcaggagatgggcatcatctttgtggttcttggggtatggcggcagaaggacaagctccgaatctattgccctgatctcaccgaccgggtcgttgatctcgcagtggagccttggaccgagggcgagtttcgcaaggttgctgcagaaggcgcaaagtgcctgaacatcgacttcgctcctgaagtgattcagcgttgcattgagaattcttttggaagcgttggagtcttccaggaactgctgaagcacacgtgtatggcggccggtgtatcggagcggaagttcttggctcaagaggtcgctgatgttgcgtttgctcaaaaggcagtacaagaaaaggcggatcagtacggcgctacacaccaacaagctctcgaacttatttcgtcgggcaacgtcacgcattcaaaggagaaggagaaaacgccccttcacctgccgtactacctcgtctgcgccatcctagagatggggtacgctggtctggagcatggcatcagccgctccgacatcacggacaaaatgaagcagcatcatcaccgtaaagatgatgtgcgcgcatcagacatgagcaacctgctccacaacctctcgactctgcagcacaaaaaaggcatcaatccgcccttgatcgactacgacatcggcaaacgtcagttgtacgctatcgattccaccttctttttcttcctgcggaactgcgatctcgggttggtgaaggacgagcttccatctccgattgacgccagtgagggataa

SEQ ID NO: 497724 - DNA, 987 bp, Stenotrophomonas maltophilia
atgagcaccacccgacacattccattgctgatcctcggttccggcccggccggttggaccgctgccgtctacgcagcccgcgccaacctgaagccggtcgtcatcaccggcctgcagcagggtggccagctgatgaccaccaccgaagtggacaactggccgggcgacgcccatggcttgatgggcccggacctgatggcgcgcatgcaggcccacgccgagcgcttcgagacggaagtcatcttcgaccacatccatgccgccgacctgcagcagcgtccgttcaagctgatcggcgacagcgccgaatacacctgcgacgcgctgatcatcgccaccggcgccaccgccaagtacctgggcattcccaccgaagacgaattcaagggccgcggcgtctccgcctgcgccacctgcgacggcttcttctaccgtgaccaggacgtggtcgtggtcggcggcggcaacactgccgtggaagaagcgctgtacctgtccaacatcgcccgcaaggtttacctggtccaccgccgcgacaccctcaaggcggagaagatcatgcaggacaagctgttcgccaaggtcgcctcgggcaagatcgagaccgtgtggcaccaccaagtggaggaagtgctgggcaacgacgccggcgtcaccggcgtgcgcgtgaagtcgaccctggacggcagtacccgcgacatcgatgcccacggcttcttcgtggccatcggccaccacccgaacacccagctgttcgacggcaagctggcgatgaacaacggctacctggaaatccgttcgggcctgggcggcaacgccacccagacctcggtggaaggcgtgttcgccgccggcgacgtggccgaccagcactaccgccaagcgatcacctcggccggtttcggctgtatggccgcgctggatgcggagcgctatctggatgcactcaagatctccgatcaacagcagcacaagaacgccgcctga

SEQ ID NO: 497725 - DNA, 420 bp, Stenotrophomonas maltophilia
gtgaacgctgtcatctatcacaacccaaagtgcggcacctcccgcaataccttggcgctgatccgctttgccgggatcgagccggaagtgatcgactacctggccgacccacccggccgcgctcgtcttgtcgaactcattacggtggcggggttgagcgtgcgcgatgccatccggcagaagggaacgccgtatgacgaactcgggctaggcgacgcagcgctgagcgacgacgcgctgcttgatgcgatgctggcgcacccgatactcatcaatcgtcctctcgtacaaaccgataggggtactcgtctgtgccggccttcggaagtggtgctggagatcctgccgccgctgcccggaccgttccgaaaggaagatggagagtgggtgaccgggcacgccggaagctcgacgccgtga

SEQ ID NO: 497726 - DNA, 1203 bp, Stenotrophomonas maltophilia
atgtcggcgctcgatcccacgacaagcgacagcgcatggcgcgtcctcctggtgttcctgcgactggggctgacgtcgttcggcggcccgatcgcccacctgagctacttccgccttgagtttgtcgaacgccgccgttggctgacggaccgcagctactccgatctggtggccctgtgccaattactgccaggcccggccagcagccaggtaggcatggcgctgggcttgcgtcgcgccggctggcctggcctgttggccgcttgggctggctttaccctgccatcggccgtgctgatgattctgttcgcgttgggcgttgccgaataccagggcatcgttgaatccggctggctgcatggcctgaagatcgtggcagttgccgtggtggcccaggcggtatggggaatggcccggtccctttgcccggaccgtctgcgggcagcgatggcgttttttgccgctgtgttgactttgtccatacccacggtcgtcggccagatcgtggtgatcatcctcagcggattgatcggtcgctggatgctgaagatcgaaccggcctccggccaatcagacggcggctattccgtctcgcgaagaaccggcacggtggcactggtgctactggtactgccgcttgttctgctgcccttgtgggcggtggctagcggctccctcttggccgtgctgttggagggtgtgtaccgcgccggcgccctggtcttcggcggcggccatgtcgtgctgccgttgctgcagaccgcagtcgtccagagcggcaccgtgagcacggtggatctgctcgccgggtacggtgcggcgcaggcggtgccgggccctcttttctcctttgcagcatacctgggggctgtggccgaggggccgctgggtggctgggcaggaggccttgcgctgttggtggtcattttcctgccagccgttctcgtgctcgtaggggtgctgccgttctgggagtccctgcgcccccgcaaggatctccaagcttcgattgcaggcgtcaacgcaggggtggtcggcatccttttggcggcgttgtatgacccggtgtggacgagcgcgatccatgaccgatgggatgtcgcgatggcgttggttgcgtttgggctactggtcgttgcgcgtgctccgccggtcctggtcgtgttgctggctgccgtggcgggttgggcgatgacgggatag

SEQ ID NO: 497727 - DNA, 459 bp, Stenotrophomonas maltophilia
atgactggctcttgggctcgggacctggacgtcgaccttgcgtcgatcacggagtggggagcacagcatctgatcacgttaattgagccgtgggagttcgaggagctgcgaatcacctctttggcggaacgtgccagagcgcacggtttgacgtggcacggcctgccaattacagatggtgcggctcccgacgcgcgactgcttgagccatggcgatccctaggaccacagttcgcagccaagctcttgtctggaaccaggatcgtggtgcattgcaaaggcgggctgggtcgggccggtaccgtggcgtcgatgctcctcattcaaaccggctgcgcttcagacggcatcgatgcaattgcgaaagtgcgctcggtgcggcctggtgcggtggagactgcggagcaggaggaattcatcctgaactggtctgatcagggagccacgagtctgaggtag

SEQ ID NO: 497728 - DNA, 741 bp, Stenotrophomonas maltophilia
ttgtcgaagccgggctacgttccgcaaccgatcgcgctgggcatcaacaccgatgcgtaccagccgatcgaacgcaagttcaagctcacccgccagctgatcgaagtgatgctggaaaccaagcatccgttctcgctgatcaccaagaacgcactggtcgagcgtgacatcgatctgctcgcaccgctggcggcggagaacctggtcagcgtgcatttctcggtgacctcgctggacccgcatctctccgcaaagctggagccacgcgcgtcggcgccgcatgcacggctgcgtgcgatgaagcgcctgcatgaagcgggcattccggtgggtgtgatggtggcgccggtgatcccgtggatcaacgacagcgaactggaagccgtgctggaggccgcgcacgatgctggcgccagcaccgcaggctacgtgctgctgcgcctgccgctggaagtggccccgctgttccgcgactggttggacacccaccatcccgatcgcgccgcgcacgtgatgagcaccatccagcagctgcgcggcggcaaggattacgacagccagttcggcacccgcatgcgtggccagggcgtgtatgccgatctgttgaacaaccgcttcaagctggcgcgaaagcgtctcggcttcaatgcgcagaacagccattggccgaagctggattgcagccggttcgtgaagccgctgacgccgaagaaggattcgccgcagggttcgctcttctga

SEQ ID NO: 497729 - DNA, 3018 bp, Stenotrophomonas maltophilia
atggacaatggcggtggcggcggtgcaattccgaccgaaacggcgaaggaacagccgaccgatgacaaggagaaggactgtaatggccgcaagggcaatcctgtcgtgctctacagcggcaacaaggtcgagccggaactcgatttcgccagccagggcgaaatgggcctgttcctgcagcgcaactacaatcattactggagcgcgaccggtctgttcggcaatcactggctgagcaacttcgactattcgctcgcgttcaccgatgcaaaccagctggcgtgggtacaacggcccgacggtcgccgcatcaagtatctcaaggatccagccagcggccgctggtacgaggacaaggcccagcccatcgcgtatctcgccgcgaacggagacggcacgttcacgcttcgaaacgaaaacaacgggacggaaatctacaacgccgagggctacatcacccggctcagcaatgagcaaggtgtgagctggacgttctcctataccgatcgctacctgcagaaggtcatccactcctcgggacgcagtatcagctttggctggaccaatggacaggtctcccaggtgaccgacccggccggcaacatctaccgctacacctatacccccaacgtgttcgggaatgggcgtggtcggctcgccagcacgacattgccaggcgctcctgcaacgacgatcagctaccactacgaagacggccgcttcccgggtgccctgaccggcaagtcctttgacggcgtgcgctattccacgtttgcctacgacgcggagcggcgcgccatcagcaccgagcacaatggcggcatcgaacgattccgcttcagctacgccgtgcgcagcaccgaaccggtgcttccgccccccgcccccgctcgaccgggcggtgtccgcgccgacgaagagcgtggatggtgcgagcagcgccccggaggctcacgcatctgctaccagccgcgctcgctgcctgtcgattcgctgccgatggagagcgctctcggcatgaccgccgccgctgcgccgagccttacgcggcccgtcgatatcgatgtcactgtgatcaaccctcttggccgcagcaccacctacacgttcaaggacggaaagattgtgtcgaccaagggtgatccgtcgccgaactgccctgccagctacaaggagcagagctacgacgccaatgggtaccctgatctggtccatgatttccaggacaatctgaccaacttcgactacagcgcacagggctacctgctgaagcgggtggaagcggtcggcagcacggccgaacgtacgacgttgcaggagtgggataccgcgcgtaaccggctgctcaagaccacggtggtgggtgatcttgaagtcgcctacacctatgacgatcgcggaaacgtagccagcgtgactgagcgcaatctgacggcacgtggggtgcccagccagacgcgggtaacccgcaccacctatagctatcacgccaatggattgaaggcctcgatcaagatcgatggcccgcttccgcaggatgacgtcaccttgaccttcaacaaccagggcgatctgaccagcaccaccaacgctctcggtcacacgatcagctattccaacttcaacggcttgggattgccgggacgtatcgtcaatgcgaacggtggtgtgcgggagctgacgtatgacggtcgtggccgcgttgtgtccgacagaaccagctcgggaaccggctgggcgaccacagccattggctacacctccgcaggcgacatcgcctcgctcacccagcccgatggcgtgacggtacgctacggctacgatgcaggacgccgcctgacgcatgaagtccgctcgctgggagacggtacgtgggcgtggacccgtcatagctacaacaacgcttccaatcgcacgcgtaccgaggtttcacagaccgactatccgatcgatacggcagtcaagggaatgattgacgaaatcacccatgacgggcagtggaactggttcgctcgaggctgggcctgctccaccggatcggccggatccatccaggtggatggctacgccgaaggcaacgtctacctgggaagcacccaggcaaacctcgccagcgagccaggggttgctgccgcctgccaagcctcaggcaatggctatagataccagctgccgatatcgctggcccagaggcagcagctgggtggccgcaagttctccatctacggtgtatctccgaagggagcacagcacaaccaagcgctgggcaactccggcaacttcgccattcccacggcaacgatcatcggagacgtcgcaggggttacgaacgacgcgaactggaacttctccgtacaaggatgggcatgctccgtgggcgtcaacgcggccaccaccgtacacatctatgcgggagggccggcaggcgctggtacgtatcttgggagcgttaccggcacgctggttccgaacgacgacgtaaaggccgcatgccaatcgcaaggggcgtattggtttggcttcacgttggattccaatatgcgcaacgcacatggcggaaagcccatctacgtccacggcatctcgccctcgggccaggctcatctgctgctcaatcgctcgggtacgttcacagttcccgcggtagtgcgcaacgccgaagtcgttggcgcgtcggcctatccgtaccagatcttcaatggcggctcctcaacattgatcttcgagttccgcaacacaagcaatgtggtctggaatccaggcgatacctacctcgcgttcggcctcaatcagcccaacgagaacatcgcactctctgcgccggtgccacccggtggcgtggccaggttcagccgcagcgtggggccgaataatccgggcagcgggaatcgaacgttctcgtacgtggcgagaatggcgtccggcggcgttgcctggggcgcggaagcaaaggtcttcctgtctgttgagaacaacaagggaagttgcggtcgcgtcgtctgcgaacgccctcggtaa

SEQ ID NO: 497730 - DNA, 2151 bp, Stenotrophomonas maltophilia
atgccagcactgacgcttgccctgatcgggctgaacgctgttgtctccgtcaatacatatgagtacgacgagctgggtcgcgtgattgtcgagcgcggaaacggcgtacagaacgtgcgttatgcctatgacgcggagggacgcgtcacccaggtcaccgactcgcagaatcgggttactcgcatgagctacgacgctcgcggtcgcttgatccaatcaatcgatgctgctggagggaagacgcagattgcgtacgatcatgcagatcgtccaatccgagtgagcgatccccgcaatctggtcaccacctatgagtttgatggcttcggccagatgtggaagcaggtgagcccggatacgggaacgacacagcaccagtacgacgctgcaggtctacggacatcgacgaccagagcggacggaagcgttgtttccttcgactatgacggcctgggtcgcatgacctctgcgagtgcggaggaccggacgttgggctacagctacgactggtgtggcaatggtaaaggactgttgtgcggcacctcggggccgggaacagcaacacattttgcctacaccgcgaatggatcgctgcagatacgccgcgacttcacagatctgtctggtcagaagacggattacagtacgacgtatggctacgacggcatcaatcgcctgagtgagatcacctatcccaatggtgacaaggcaacctactcctatggttcccacggaaaaccaagcgcgttggtggcaaccgtagacggcacgcagcgttcgatcatttcccaggcaagctggaaggccacgggagcgcgcgggtggctggcttatggcaatggcctcggccggggctataaccacgatccggagggacggctgacggcaatgtcggtctggggacccaacagcagcaaggtcagctattgggactaccagtacagtggtgatggagaaatcaccgccatcgtcgacgctgtcgacccgagcatgacgcagctgatcggttacgactcactgagccgactgacccagctgactcggtttggcgtcaccaacaatctttcctacgacgccggcggcaatcacgaccgctatcaggccggtagtcagctgacccagtacagcatcgacccggggagcaaccgggtgctgaactacaccaatcaggacggcagccgccagtaccagtacgacgcattgggaaatcgtatcagcgagactgcgggtagccggatcagtacctacgaatacgatgccttcaatcgcatgagccgaagcaacatcggaggagtagcgaccgactacgtgctgaatgcgcagggacagcgcgttgccaagatcaaccagagcaccaacagccgctacttctacgctggccagaaccagctcatgactgagctcaacaacggtgtgtggaccaattacttctggttcgatggagagctggtgggcttggcgcgaagcgggcagcacaattacgtgcataccgatcatttgggacgccctgagtttgtcaccagcccaagccagcagaccgtctggaaggcgtacaactacgcctatggacgcagcgtccagaaggatgagattggcgggttgaacattggctttccgggccagtactacgacgcggaaagcggcctctggtacaacggcttccgcgactatgacgcaagcattggccggtatgtgcagagtgatccgatcgggttggcgggtggaatgaacacatacgcgtatgtctcaggaaaccccatctcaagaaccgatccgtggggcctgacccagtgtgatatcgacgtggcgttctcatttgcaaagcagaacaatccagacctcaagttcggcaacggcgcgccgcaagtggatattccacgcccaggtgatgaggggcgatcggatctatatggtgatggtcgtattcatttgaacaagagatacctggatgtgcttgattgggcgggcgtatacaacgttctggatacaatcattcacgaaggcttccacttcacgcgccctagaaagttgcaaactgaagaaaatggttgggatcatcgctacatttcgccggaagcaacgaaacgagcacgtgagcaggtttacaactatgacaaggcccgcaaggctacttgtgagtgcacacaatga

SEQ ID NO: 497731 - DNA, 594 bp, Stenotrophomonas maltophilia
atgaaattctttgtttatgcggcctattctttgctttcactcgccttctgcacccagcttattcacgcacgtgaactgcacgaatgcatcgtcgtgtcacaggcctcgaacgtcaccgacatgccagatggccttgacgagtttgaacagcgtctgtggacagcaaattctggccaaatcgtaaggaagggcgcggacaccctcctcctgcttcgagtgttttcggaagctccgggtgtgatggattcccagcagtacaccaagatcaccggaattctgaagggatacgcgccttcggctgacaaggcgcctgatgttggcagtgcacgcctgaccagtggaggcgcgggtttcgcgcataagggagactattggttgtccgatgcggcggcagttgaactgcgtcagccgcacagccacagcagtcggatggaagtcaaagtgacggctgtcggatggaacagctatcggaaagaacaccggcccttcgatctacggttcacgtgccaactcagggaaatccctgtcgacaggctcagtgcttggcaaggcggaaacggtgatctctggttgtcttttggaccgaccaagtag

SEQ ID NO: 497732 - DNA, 144 bp, Stenotrophomonas maltophilia
atggtcgtctttcagggtcacttcattccggccgccaagttcggccagtacgacaatctccctgaatttcgcaaattcgacgaaaacgatgtcatcgaggagatactgcgaagatccggcgattttttggtcttcgactcgtaa

SEQ ID NO: 497733 - DNA, 744 bp, Stenotrophomonas maltophilia
atgaaagtctgccttgctccagtcattgccctgcttgtcgctggcctgatgccggccgctgcgggtgcttccccccagatcgccaacgcccaacctctggcgctgagttgcggtaccactgaattcgtcggcatgaccagcaactcgtcgacgctggccaagcgccagtgcaatggtagctatgtctatggaatcggcgtctcggtcaatgaagcggtggagaacctcaacggcttcatggcggtgctgcaggccggcgtgagctgcagcgcggatgccagcagcatcgtcagtggtgcctacggcaagggtgttttcgcccagtttgtctgcaatggctggtcgatcgccggcgtgggcaactcacccaccaccgcggcgcgcaactcgctggccatcgcgacggaaatggcggccacgggtacccattgcgcagcgccgctgcagggttcgtactatccggaatcctgggggttccgtttccgctacgactgcggcaacacgcagaccctgaagagctggtccatcagtgggctcggtgccagcatcgatgacgccaacgtcatcgccatgcgactgatgcgttactccacagcggcaggccagagctgcaacttcgagaaggccgaaatcaatggcgtcattctgcacgccacgctggtctgcaacggctcgtacatccatggctacggcagctcggtgacggccgcagccaacgacgcactggcccagatcggcgcctga

SEQ ID NO: 497734 - DNA, 207 bp, Stenotrophomonas maltophilia
atggatggtgcaaaagccctgttgaccctgtttgcgctgggcatcagcctggtctggatcctggtgccgttcgccatcttcgccgtgcgcaacctgctgcgtgaagtactggtcgagcagcgccgtaccaatgaactgcttgaacacatcggcggttaccgcattccgaagccgcaacccgaaccgaccgtctggcgcgcgccctga

SEQ ID NO: 497735 - DNA, 657 bp, Stenotrophomonas maltophilia
atggatgtagccacgccgacacgcgatggacgccatctggtaccgatgggcctcttgatggcgctgacggcctgctcgccttacgcggacgcagagcgtgacgtcgccgcaggtggacgcggcctggccaagctcaacccgtcaccgcagcagggctacgagctggtgctgacactgaaggatgcccccagtcccttcgcggtggtcgagggcgttgcccagtacgacgtcagcaaccacagggactgcggccgggtcctgtgggcgaccggtaccgccagccgtatcaccagccaggagttggtggaactacacaaggtcgacgagaacgaataccgcggtacgttctacctcgaccgcatgcaggacgaggattactacgggcgtggcgtctgccattggacgttgacgggtgtcggtgcgatgttgcgcgctacgaccggcgaggcgaatacgcgattccttacgttcgtcgacaaggagcgcatggagagcgactcacctcttacgctttattacccaaaccttatctatccgcgcgccgacactgtcgccaactttggcgccagtggcgaggaagatccgtcggggtacagcgaagatctgcgcgacgcgctgttctcaaccaccaccactgtgcagaagctcgtgccatga

SEQ ID NO: 497736 - DNA, 588 bp, Stenotrophomonas maltophilia
atgaaccaggaacgtgccgctgctgaagccgatgtcgcccagggcgggcgcggcctcgccaagctcaaccccaccccgcgcaaggcctatgagctggtgctgcgcctgaaggatgcccccggcgatttcgcactggtcaagggcgtagcgcagtacgacgtcaccaacgaggatcagtgcggccacatcgagccggccaccggcacagctgcacgtatcaccagccaggaaccggtggagctgcgcaaggtcgctgagggcgagtaccgcggcacgctatatgtggaccgcatgctggatgaggactactacggtcgtggcgtctgcaagtgggagttcaccggtgccggggcaatgctgaaggcgacgggtgccgaagaagagacccgcttcctcaccttcgtcgacgccaagccgctgaccgaaggtggcgcccatacgctctactatccggatctggtctatccgaaggcagatcgcgttcccaacttcccagccagtggcgagcccgatcgcagcaactacgccgctgatctgcaggacaagctgtttacgatcaccctctccgcaagtgaggtcgcgccgtga

SEQ ID NO: 497737 - DNA, 537 bp, Stenotrophomonas maltophilia
atggaagacagggttggcgcacacatggacgatgccctggcatttgttccgtccggtgcgaacctgctggaagccgtaaggggcgaactcaacggcgatggcatcgagtatcagctgctggtcatcgaccagccgacgccggaagggctggtgcccggccagcacgggccaaaccgggtgctgctgttgctgcgcggtgatgggcgcgggcgctggcagctggccgcgcgcaacgacaagctggtgccgtgttccacccgaggtggcctggccggcgacccttttgcgtatgcaatggtcgagaagggcaccttcagcgtgatcaccaacggcggtagccgcgagcgctggagcagcacctaccggttccgctatgcgcccgcggacaaggcctgctgggttgacggggtgagacgcaaggtcgtggatatcgagaccgaagcgaccaacatccgggattactcggcggcggagctgggcagggtgaggttcgaggacttcgacccatccagtgttgccgaggtgtcgcttccatga

SEQ ID NO: 497738 - DNA, 525 bp, Stenotrophomonas maltophilia
atgaaacgaatccacctcgcttttctcccgtgcctgctgattgcaggcctgctgccgttcaccgcgcttgccgaaggcaattgcccgcagggcatgtatcccatcggtggccagggtgtacagggctgtgcgcccattccggtgagcagctcaggctccccgtacaacaatcgccccaactgggcgcagaccgtgcgtggcgtggcgatggatgcccgcggcgacaccttcatcagcaactcgatgcgctcgcggggcaaggccaagcgtgcatccatgaaggagtgcagggagttcgggcagggcgaatgcacgttggcgaccctgttccaggcgcaatgcgtggcagtcgcacacgcgggtctgggcactgaaaccaccagcgttgccaccgccatgtccgaacagggggcggtcattgtcgcgatgcagcaatgcaacgcgaaggcggcctggaagcagctgccgcagggacaatgcgggatcgccagaacggcctgcacggcggatctgttcatcaggtaa

SEQ ID NO: 497739 - DNA, 1158 bp, Stenotrophomonas maltophilia
atgatcaggtcgattgccaattttgatttcaatggcggattccaggatttgatggggcacgttgcacgtgtccaatcgatcggggatttcgtgttcttcaagttcatcttcgacttcctgcgaagcaagataaacaagttcggcatcgacatgatgggggaaatgatgcagtgggtcggcggcatcgccctcacgctcatgaccctgtgggtgctggtgcagggcttccgcatcgtgaccggccgcagccgggactcaatgatggtgctggtgaccaatatggcgcgtgcggcgttgatcgtcagcgcggccaccacgatgggcgctttcggcaccaaccttcagagcttcctcacccacgacgtcaaggcagaaatcacgaaggtcgtgacaggctcgaacgagtcacccgaagctcagatcgacaagagcctggcatggatgcaggtggcgctttccagtatcgacgccatccagatcatgaatgacggggagctgctggaggacaagaagcgggcactgttcttcatcggcatgggcaccgcaggtccagccatcaccgctggtgcgatgctgatgctgtatgaaatcgccatggcgctgttcatcggctttggccccctgttcatcctctgcctgttgttcgaccagaccaagcagttgttccaacgttggctgttctacggcattggcacgatgttctccatggccgtacttgcagcgatggtttccatcgcactggacatggtggtacgtgtggcggccactttctggaccacagcgctggtgcaggaattcatcctcaaggaaagcatgtccgacggcatgaccagccaggcaatgcagcagggaggcatgggcctgatcctcaccgcgttgatcctgactacacccccaatggcagcgatgttcttccagggtaccctgggcaccttcatggcatattcgcagataggtggtggcgcaagtgcctctccgagtgccgatggtcgtccgccgggcatgtcggctccgccgccggcggctccggagtcgtcttctggctcaaactcccatggtcagcagtcggcgatggggaagatgtttgatggaaccggaggcccgggttcagcggttcccggtcagcgtggtgcggcaaatccgagtcatggaaactag

SEQ ID NO: 497740 - DNA, 801 bp, Stenotrophomonas maltophilia
atgagcatgacatcccgaaatcacaagcgccaccgcggtctgcgtcagaagcgcctggcagccatcctgctggggagcatggtcatgttctccaccacgtcggtttcggccggtggttaccctgtcttcgacctcagtaatctcatgcaggcactgaaggactttgcccaagggaaggcgcaaatgaaggctgacgggctggagtacgcggctcaggtaactcggtggagaaggacgttccaggagtaccaaaatgcgcttgtccagatccagggcatgatcaacaacttcggcttgccgccaggcgccacattggagcgggttccagacgactatatggtcgccgacctctgccgtacgtcggcgggcttcagcgctggcagcctgctgaagaagtttgtgctggatacctccggtgatctctacgcgcagcagcagcagctgtgcgtcaacatccagatgatggaaaaccggaagcgcaacgagacggtggatttcatcgagaagaccattcccagcatcaacgcgtcgttgtctgagatcatgggctggcgaggcggcgccgatggcaatcttgcgggaactctttcggccgtgaacagtgactccctgcgtacggcaaacgatatttccaagctgcagcaggagtgggaggcgcgcatgcggtcctacgacgcctatcaggagtcaatgatggccaatcagcgcgtgctggcgcgcgtggcattgaagggcaagccgggcgtcatctcgcagctggtcaagacggccgcattggaacgcgctttgcacgtcgactga

SEQ ID NO: 497741 - DNA, 420 bp, Stenotrophomonas maltophilia
atgaagcgattcaatctcgacctcgtccaggcccagcgcacgctgaagaccatgctgatggccgtcgcattcgccggtgctgtgttcgctccgcaggccctggccggcactgacttcggtggtaccgatggcaaggtctgcggcttcttctccaacatcaacggtctgctgaacatggcctcgatcgccgtggtcacgatcgccgtgatcttcgccggttaccagattgcgtttgcccacaagcgcatcggtgacgtggccccgatcctcatcggcggtgtgctgatcggcgcggcaggccagatcgcgcgcatgctgctcggcaaggaggctggcagctgcgaaaaggtcggtggtggcgacggcgctggcatggcgtttgaaatgatcaagcacgccgtccagtactacagtgcataa

SEQ ID NO: 497742 - DNA, 1047 bp, Stenotrophomonas maltophilia
atgttccgcaagaaggatcccggcaatagtcccaaggtcgagcagtcggtcgccaaggcggtcagctacgagatcaccgtggccgacatggcgcgtcgtagtgagcgccgtgcctggtgggtcgccaccggctcattgctgatgtcgctggcactggctggcggctactactacatgctgccgctgaaggagaaggtgccgttcctggtgatggccgatgcctacacgggtaccgctacggtggcgcgcctgaggggcacgttccagggcgagacgatcaccaccaatgaagcggtcaaccgcagcaatgtcgcccagtacgtgctggcgcgcgagtcgtacgactccgcggtgatggggttgcgcgactgggagctggtgttcgtcatgtccagtgatgccgtggccgcaagcatgaagcagcgctatgccagcaacaatccgcagaatccgttcgtgatgtacggccggggcaaggcgatcagggtcaagatcctcagcatcaccccgctgggcgtgcaggcgaacggcagcttccgtggcgcgtccgtgcgcatccagcgcagcctgcttgacaagcgcagcggtgcatcgacctatctggacaaccagctggtcaccatgcgcttccagtacaaccagaatctggcgctctccgaacaggaccgcgtgctcaacccattggcgttccaggtcacggagtaccgtgtcgacaacgactatgcgcgcggcgtgcccgtgccggatgacggtgccatgcagcagcaggcccaggatgccgcgcaacaggcacagctcgccgcacagcaggcgcagggcatgtacgttccgaacaatccggccgctgccaccatgatcgatcccgccaccggtcagcctgtcgcagtgccggccaatgggcagatgcagccgatgcagggtgcgcccatgcaggggcagccggtccaggggcagccgatgccggggcagggcgcgccgggacagccggcaatgatgccggcaccgaaccattccaccggaaatgctgatggagcaagcaaccgatga

SEQ ID NO: 497743 - DNA, 645 bp, Stenotrophomonas maltophilia
atgaagtcacccaccgcccgctcccgtctccccgcccggccgcggaaaatcggcagcgaagtacgcatcttcaggcgctatcaccagtacgccatcgttgccgccggagccggaccactggcaatactcctgtttgccgtcgcacccgaacttgggccgcttccggcactgggcgcggcagcgattttcacgctgtcgccgctgattctcggcttcgttgtctattccccacaacgggaccgggtggtactggaacaggatcgtctggtattccagcaccgtcctcctctcccgttcaagcagatccggtcctacaacctggacgatcatgtcgatctgatcctgatcgatggaccgagcgtgctgctgcagcgcactcgggcatcgatgcatgatttcccaaccttccgggacgcactggcagaggcgctcgcagatcggcccgccaacgctgccgcggctccgcaacgtcgccacttcttcggtgcctggcccgcacgcgtttggggtgcgggcctgttgctggcgacggcggcactggtgatcacgggcgtactgcatggctggccgttgtacaaagcaccgatccttgggatcgcgcccgtggtgggcattgggctattgctgtcgcgccgccgtcactga

SEQ ID NO: 497744 - DNA, 270 bp, Stenotrophomonas maltophilia
atgctccacgcgcctgcccccgcacatcacgatgccatcgccctgcaggcgggcgtgctcggcagcgtgttgggcgtggctctgtacaaggccatcgcgttgtcggcgctggcgaccggatccttgatcgtgatcgggctgtggctgctggcctgcgcgctgctggctgcctgggcactggccgcctgcctggcctgccttgcgctgagccggcgcgtattcgtgctgatgctggcgctgagcatgatcctgatgatctgcgtcgcctga

SEQ ID NO: 497745 - DNA, 246 bp, Stenotrophomonas maltophilia
atgatcctgcagcccctgcttcgcgcctccctcaccgcctttgccctggccacgctcagcgcctgtgccacgtatgacgacagcaacatgcaccaggcctgccaggagtcgccgcatctgaaggacctgccgcccgaagtggctgcccgcgagagccgctgcaacaagagcatggaagtgtggtcgagcgagcgcaagggcagtgacaggccgatcgacctgagcggcaagaagaaggatctctga

SEQ ID NO: 497746 - DNA, 1704 bp, Stenotrophomonas maltophilia
atgcatcccttcccccttcctgtctcggcacccgatcaactcgcctaccgactgctgcaggacagcgactgggcccgttccaccgacgcgatcaacgctcctcccgaacttcgcgctctgctggcgatgatcctggattctccggagcctctgtggatcgcatggggccacgacaacaaggcgttcttcttcaacgatgcctacctgccgatgctgggcggcaagctgcacggcgccatgggcagccgattggaagacgtctgggcggacgtctgggccgacgtcgtcgatgctgtcaacgacgccttcggcggtacaagccgcagtttcaagaacatgccgttgatgatggaccgtgatggcacgttgcgcgagacattctggacgttctcctactcgccgctgcgtgccggttgcggaggcgtggccggcatcatctgcatggtcagcgagcagaccgagcgggtgatcgaacgcgaccggcacacccgccaggtggcggccatcaccgagcaggcacgcgaggcccatcttgaactggtacgcgcccgcgaacagctgcggcagtcgcagaagctggaggccatcggccagctgaccggcggcgttgcccacgacttcaacaatctgctgcaggtcatcaccggttccgtggacatgctgctgcatacctggccggccgaagatgcgcgcctgcgctatgtacaggcgatcgaaaccgccgctgaccgcgccactcgcctgaccgcccagcttctggcgttctcgcgcaggcagagcctgtcgccgcaggtattcgacctttgcgagagcgtacgcgcgctttcagacatcatcaccacagtgctgggtgcacgcatctccgtgtcggtgaacctgcccgacgccccgttgccggtgctgctggaccggacccagctcgacaccgcactgatcaacatcgcggtgaacgcgcgcgacgccattgacggccacggcaaggtgacgatcgatgtggaacagctgacatcggtgccttccgtacggttcgcggcgccgatgaaaggcaacttcgctgcgatcagcgtcagcgacaccggtgccggtatcgatccgtccgtggtggaccggatcttcgagccattcttcaccaccaagggagtgggcgcgggcaccgggcttggcctcagccaggttttcggcttcgtcaagcagtccgagggcgaagtggacgtacagagccaggccggtgtcggtacgcgcttcacgctgtatctgcccctggcgcaggcaaacgcctccatcgagctgccgaccgcgcaaccgggattgctgcatggtcacggattgtgcgtgctggtggtggaagacaatgtggatgtggccgaatttgcagtcggtgcgctgcgcgagcttgagtacaacgtcgtactcgcgcgcaatgccgacgaagcactggcggagctcgagcgcgacgctgcgcgtttccacgtggtgttcagcgacgtggtcatgcccgggaccaatgggctggatctggcccgcaccatccgcagccgcctgcccgatcttccgatcatcctcaccagtggctacagcgaactgctggcccgcgatccaggccacggtttcacgctgctgcgcaagccctactcactgaagcagctggccttggtgatgaccgaggccagctgtcgctcgcagacgatggtgactgcgcattag

SEQ ID NO: 497747 - DNA, 1524 bp, Stenotrophomonas maltophilia
atgctgtacgacgttgtcattgccggtgctggcccggttggcttgttcctgtcctgcgaactggcccaggccgggtgttcggtgctggttctggaacaggccgggtccgctgattcgccgttgaagcgcctgccattcgggctgcgcggcctgaacgcccccacgctggaggcactggatcggcgcggcctgttggacgcggtcgccgcgacacaggtcctcaagcccgacaagggcgcaccgccgcccggcaccgctcattggctggcgcagccgcgtgcgctgggtgggcacttcgcgggtattccatttgcactggacgatgtggaccaggcgcgctggagctggcgcctgccgacaccggcgggcacccagatggcggtggagttgcaggccctggaagcggtgtttgccgaacgtgcggctgcgctgggcgtgcgcatcgaacgcgggcgtgcggtacaggcggtggatgcgcacgaggcgcaggttgccgtgcacaccggctccggcagggtccacggccgctggctggtcggttgtgatggggcccgcagcacggtacgcaagcaatcgggcttcctctttgctggaaccgggccagagttcaccgggtacacgctgctggtcgaactggcagatgggtgtgtactcacaccaggccgacagttcaccgatcacgggatgtgcaatttcaacccgccaggcatgctggcgctggccgatttcgatggtggcgccggccatcgcacgccactggaccggcacaccgcgcaagcgttgctgcggcgggtgtctggctgcgaggcaacgatcactgcattgcacctggccacgacatggaccgatgctgcgcgccaggcgacggcctatcgcagcggacgtgtgatgttggcaggtgatgccgcgcacatgcattcgccgttgggcggccagggactgaacctcggcatcggcgatgcgatgaacctcggttggaagctggccgccgtggcgcggggcaaggccgatgaggcgctgctggacagctatcaggctgagcgccatccggtgggcgccaaggtgctggactggtcgcgcgcgcaggttgcgctgatgcgacccggggccggttcgcgcgcactggcagcgatcatggccgacctggccggcacccgcgatggggccacgtatctggccgagcggatctggggtgtttcgcagcagctggatcttgacggggaccacccgctggtcggcaggagcgcgccggacttccggttggtcgatggccgccgcctgggcgaactgctgagagcggggcagggggcgctgcttgttttcgacccggcgtcttcgccgccgcagcatggccaacgctggcagccttccatcgcctgcgccgcagataccggggatgtggcgtcgggcctgggggcggtgctggtgcgcccggatggcatcgttgcctgggcctgtggcacacggggggatatgtccggcctcgattcagcgcttgcttcctggaccggtccgacccggtga

SEQ ID NO: 497748 - DNA, 645 bp, Stenotrophomonas maltophilia
atgacctcgccccctggtcgtcgcgaacaacgcaaggccgagacccgacaagcgatttcggacgtcgccaccgagctgatcatccggcgcggcttcgaggccgtctccatgtccgagatcgccgaagccgcgggcgtctcacgcaagacggtcttcaactacttcgccagcaaggaagacctggtgttcgatcgcgatgaggaggcgcgcatgctgctgcgcgagggcatgatggcgcgcagcgccatgaccccgctcgcggccttccagtcactcgtgcgtgagttgctggaggccggccatccgctgctgcgcatcaataccggcgctgccgccttctggggcaccgtggccgagagcccggtactggtcgcgcacgcgcgacgcctgcaggcgcagttaactgacgatctggcgcgattgatggccgacgctgtcggccggccagcacatgacgccgaagcgcgattgggcgcggccatgctgctggcgtcgatggtggcggcctatgagaaaggactggcaagccagcttcagcacgaggacccgcgcgaggccatgctgcagctgatcgtgcgcggtgccaccggggtgctggtggccctggcgggtaccccgtatacggatcccggcgcgcgtccatag

SEQ ID NO: 497749 - DNA, 2142 bp, Stenotrophomonas maltophilia
atgcccctttccacgcccctgcagcgcagcctctgcctggcactgaccctgcccctggccgcccttgcccatgctgccgagccctcgacgaccacgcccaaggacctggacaaggtcgaggttcgcggacgtgcacagacgctgtatcgggtagacgatgccgcggtcggtacccgcacggatacacccctggagctggtcccacagtcgatccaggtcatcccgcgtgaactgatcgacgaccaggccgcgcgccaggtgaccgacctctatcgcagcatcagcggcatcagctatttcagctatgccggggtgaccctgcgcggcttccgccaggagaacgtgctgtatgacggcctgcgcggcgacccgtacgcaggattttcggtgccgcagctgttcaacatcgagcgcgtggaagtgctgaaggggccggcaggcgcactgtatggcgggggtgatgcgggcggtgtcatcaactacgtgacccgcaagccgaaagccagcgacgaacgccgcatcgaggtccagctcggcgacaaggacttccgtgccggatcgatcgagggtaccgggccgttgaatgccgccggcagcgtacgctatcgcgccgggctctatgccgacagtgaacagggcgtgcgctggaacaccgacagcgagagcgtgatcggcgacgcctcgctggccttcgacgttggccagaccggcgagctggtgctgcagttcaccgacatcacccagaaccttggcggcaaccgcctgcgtggcgtgccggtcaacgatgcaggcacgttcctgaccgaccgccgctggaaccacaacgaggccagcgacttcctcgacatgcgcgccaaagtggcgctggcgcagtaccgtttcgcgccgagcgacactctggacctggacttcgccgcccgctggttcagcaacaacgaacaccagatgtaccacgagccgatgggcctgatcgatcgtgaccgcgatggcgtggccgagtggatgacccgccagctgcgcaaccagatacgcgacaacgaagcattcactgccaacggcaatgccgtctggcgggtggccaccggcacggttgagcacaaggtgctgttcggcgccgatgtgtaccagctggatgcggatttcaccgcacagaccgcgaacagcgctgaccttgcgcgtggcgccgggccggtgcgcggcatcgacctgttcaatcccgtgtacggcgccagtacctggcacgactacaacctggcggccctgccctggcgcagcacatccacccgcagcaagcgccatggcggctacctgcaggacgaactggcactgggcccgcgctggcatgtgctggccggggtgcgctgggatggcttcaaggatgaggatcgcatcactggcaacagtgtggatggcaacgatctcagctggcggctgggcagcacgttcaccgtgcgtgagggcctgaacgtctacgccaacgtcgccagtggtttcgtgccgcagagtgccgccaaccagaacccggccgctggcggaccgttcgatgccgagcgcagcaagcagtgggaagtaggcatgaagtcgctgctggccgaccgtgtggccttgaacatggcggtctaccggatcgaccgcagcaacatcgtgcaggccaccggcgaggtgatcggtggcgtgaaccagttggccgcgctgggcctggtacgcagcaccggcatggagcttgacctgctggccgacctcagcgagcgctgggtgctgaatctgacgtacgcctacaacgatgcgcgggtgaaggacgccggaccgaatggcatcaccaacgcctcaggcgaccgattcgccaatgcgccgcgcaacaagctggggttgtggacgcgttatgacctgccggcgatcaactccgccatcggttttggcgccgatcacgtcggcgaacgcgtcagcctggatgggcagacggtcaaggcctacaccgtgttcgacgtgagctggaagaccacgtggaggcagtggcagttccaggccaacgtcaagaacctgttcgacaaggtgtacgcggccagtggcttcattgaacgcaacgggcatttccccggcgatccacggcgggtgtatgtgcaggcggcctacagcttctga

SEQ ID NO: 497750 - DNA, 198 bp, Stenotrophomonas maltophilia
atgaagattggattcaagctgtctgttgctattgcggctgctgcactgaccctgggaatcggcagtgcctccgcgcagtcccgctgtaccccttgctataccgcgtatgacgcgtgcctggcggcgggtaatggcgagaaagtctgttacccggcgtttgctcgttgcctgcggaacagcggctgcaccatcccgtaa

SEQ ID NO: 497751 - DNA, 1323 bp, Stenotrophomonas maltophilia
atgagtggattgacgcaagagaatctcaagattctggccagctatgccaaggccggaaaccgcgagttgtactggaactatctgtcgcagctgccagatgcggatggctatggcacgcttgcgctgggtgttgttcgcaacgacagcctgccaggccgcgttgcaaacagctacgcgcaggattacgcccgtgatcaggagggcaagggctccggctttcccgatgcgcagctgagcgagcgccaatgggagatgtttgggcagacgcttctgcgccaggacctggagcgacgcctgtactggatggagcagggccgcccagacctggcactgaatcttcccggcaaggatgtaatgctggctcacgaccgtgcatttgaacggcatgaactcgatcccaactgctggacgccgcgcgtgttgctgcaggcggctgagcagaagagcggccccgcgaagctggaacagatctggaccaacatgctcaacaatgactacgccggaggcccgcgtgtaggcaacaccagcgtcgatgccatcagccagatgggatggacgaaaggcggccagtacctcacccggttgagcgtgctggaagccacccaggccctggaagggcgctcggcggtcgatccgaacgtcatcggtggcaacagctactacgcgatgtacttcgaggcggacaggaaatgggccagcatcagtgcgggcggcggtcacatgtcgctgcgcgagatcaccgatccctcacgtatcgccgaactcaacgacgcgcgcgaggttcgtctggagcgcctggagaagcgaacccagttccacccggacgacccatatcggaccattacccgcagcccgcttaccgcagccgtggacgacgtggcggatccctcacaggcgccgacccgtctggccgacattggtcctggccaccgtgagtacacattgctgcagcaggtgcgcgaaggcgtggccgcgatcgatgccagcgcgggacgtacccacgatgagaacagcgagcgtcttgtggcgagcgtgatggccttggcccgccgcaaccagcttgaacgcgccgatcacgtgctgctgagcgcccagacggccgacgctcccgcagggcggaacgtgttcgtggtgcagggcgagatgaccgaccccgcccacctgcgcgcttcaatgcccacggatatagcagtacagacgccggttgcgcagtcgttgcagcagatgaaagcggtcgacctggatcgccagcagactgccgcgcaacgccagcaggaaattgatgtgcaggcgcgcgagaaccatgcgatgcggatgggatga

SEQ ID NO: 497752 - DNA, 990 bp, Stenotrophomonas maltophilia
atgacgttcaaagcactgctcacccgcaagacgaacaaccaggtttcgaccgagctggtcgattttgatgaagccgatctgatggacggcgacgttctggtggacgtcgagtactccacgctgaactacaaggatgcgctcgccctgaccggcaagagtccggtcatccggacgttcccgctcattcccggcatcgatctggcaggtgtggtgctggaatccagcagagccgacttccagccaggcgaccgcgttgtgctcaatggctgggacctgagcatgggacatcacggcgggctggcccagcgcgcgcgcgtgcggggcgaatggctcaaccggattcccggcaacttcagcacccgcgacgccatggccatcggtaccgcaggctataccgccatgctgtgcgtactggccctcgaacatgcggggctgacgcccgaaaagggcgatgtgctggtgaccggcgccaacggtggcgtcggttcgatcgcggtggcgatcctctcaaagctgggctatcgcgtggtggccgccaccgggcgcccggaacacgccgagtatctgcacagcctgggtgccgccgagatcatcgaccgcgcgcagctttcagaaccgcgcgagcggccggtgagtgccgagcgctgggccggggtggtggatgtggccggtggccctaccctcgtcaacgccattgccgagacgaaataccgaggcaccgtggccgcctgcgggctggcgcagagtgatgagctgcatggctcggtgctgcccttcattctccgcaacgtgacgcttgccggcgtggattcggtgaatgcgccgcaggaggttcgccagcgcgcctgggatcggcttgcgactgacctggacccgcagaagctggaaagcaccgtgcagcagatcggcctcgccgaggtgctggatgtctatgagcagatcattccgggcaaggtgcgtgggcggattgtcgtggatgtgaatgcgtga

SEQ ID NO: 497753 - DNA, 321 bp, Stenotrophomonas maltophilia
atgccaatgaccgcgttcgcacttgccgctgcgctttcgggcctgcccgacatcacctgggagcgcgagcgcgccgaggatgcgcaccagctcatgctgtgccagatctatcgcgatgcgctgaagcagaacgagggcaaggacgatgcctatccacgtgccaaagcggtctgcgacctgctggcacgcgagtacaaggacaagtgggatttcaatgcgcaggatgccctggccgcttcggcggtggatctggacgagctgatccgacgcggtgatgtggtggaagtaccgccgacgaagcaggagcgcgcctacgagtga

SEQ ID NO: 497754 - DNA, 402 bp, Stenotrophomonas maltophilia
atgagtgcaactgatccggaactgaagaggctgcttgcgaggttcgatgattaccacaccttcgaaggctgcgagctgacgtgccctgaaagccatgggatcgatgacgatacaccgctgcatgtagcggcgttcaacaatgacgtggagctgctgaaggggctgatgccgttcgtgacgaatattgacgtgctcggagatattgggctgacgccgatggcgaatgcggtgattaatgaaggtttcgaggccgttgtctatcttctttcctgtggtgcggaccccatgatcttggatgaggtgggcgattcggtgctggaaataatgaagaggaggcccgtcttcaatgagctggtcgagcagatcgagagcgggtcgccggggaaggttcgaggtcgatga

SEQ ID NO: 497755 - DNA, 1824 bp, Stenotrophomonas maltophilia
gtgattggaattgcctacccggataccagtcttgacgtgagctacagctatgacctggcgccagagtcgtgccctgccgacgagcggtttgcaaaggggaggctcggcgaggtgcagcatgctggcggcagcacgctgtattgctacggtcggcttggccagatcacccggaaggtgcagacgatcaatggtctgacacggacagtgcgatactcctacagtccatccggaaaccttgcgacattggtgtacccggacgggagcattgtcgactacgtccgggatggctttgatcgtgtgaatcaaattggcctgacccggcttggtcaggcccggcaggtcgtggtgaaggacgtagcctacgccgccttcggtccggcgatcggctggacgtatggcaatggtcggcggctggatcgttctctggatctcgactatcgcgcacaggctgtgaatgatccgactcccggggggctctcccagagctacagctacgatcccgttggctccatcgtggcgctgaagaatggcagtggctcgcaggtgatggcccgctatgcctatgatgccttggggcgcctcacgcagactcaggatgggctcaccgcaacgcccatcgaaacctatgcatacgattccactggtaaccgcacgtcgctgaagaccgcgggtggcgcctcgctctacacctatcccgcgacgagtcatcacctgacggctgtggatggtgtggggcgcgatcatgatgcctccggcaacaccgttcgcgtggaaggcaaggaatacgtgtacaacgacgccaatcgcatggcagcggtgaagcaggacgggaatttgcttgagggctacgcatacaatcacctaggggagcgcattcttcgcgttccgttcggcggtgataagcagatcaccctctatgacgaagccgggcaatggctgggcgaccactttgaatcaggtcggtcgcagcaggcgatctggcttgaagactatccagtggcattgatcagctctgcagacgctggttctccggagttggtctacatccagcccgatcacctcggaacgccgcgcgtcgtggtcgatcctgtccgcaacactgccatatgggaatggagcagcaagagcgaagtattcggcaatcagatgccgaatacggatccagatggagatggcgtggcattcgacctttcacttcgtttcccggggcagcaggcgacggaagcgaccgggttgttctacaactatcaacgcgagtatgacccagtagtggggcgctactcccaaagcgatccgattgggctcgctgggggtatttcaacattcagttatgtaagtgctcggcctgtccagcgcgttgacccaaagggtcttcgcgagctgcagcgcttggctggacagctggccgatacagggcggagctcggagatggataccgcaggcgttgtggcatcgagtgcaacggcagcgcagttcatggatctcggtgcgtggctcgatccgacaagcggcaacgcgtcgctgttgggggcgctgatgaattcggcgtggttgaccgataaggaacgaagggatctcgagtaccggaagtacaaagagttgaatcagcagggatataagcgggatgaggatccatgcagaaatcttaggaatagaatcgagtacatgaagaagcttgccttggcgcggcattcatgggacatgcgatggatgacgccaaagtaccctggagggcgccatgctgcggtgaatgccagagattgggcggagctgaagatccttgaagagagacttcggagggagtgccccgatgagtgcaactga

SEQ ID NO: 497756 - DNA, 1773 bp, Stenotrophomonas maltophilia
atgagtggaggggcactcagctcgttcacctattcgcgcggcgacggcaccgtagaaacctatgatcgtgatggtctgctcacatcgatcaccgatcttggcggtcatcgacaggtactgtccaatgcttatgcggatggcatcaagaggctggagaaggtaaccgaccccgaagggcgaagtctggtcttcacgtacaaggatcgaatggtcgcatcggttacgttgccaaccgggcgtgctatccgatatggctacgccgatggggatctggtcagcgtttcctatccggaagcgccagccggtgagtccgtccgtcgctaccactacaacgaattggatcagacgactggtgtttcccagccccacacgttgacgggcatcaccgatgaaagtggtcagcgctacgcgagctggggttacgatggctatcggcgtggtgttttgagtgtccacggtgactacgcgacgggtaccatcgatagaaccttgctagcgttcaatgacgatggcacgacgactgtcaccgacagcttggggaaggtgcgccactatggcttcgatgtgaagcatcgtgtcgcccggctcgcgtccctcgatgagctgtgtctggggtgtagcaacaccgccagggccaagacctatgatgggaatggcatggtgcagtcatcggtggactttgccggtaacgagacaacattcagtcacaacgcgcgcctgctcgaagtccagcgtgtcgaagctgccaacgatgcaacgggtctgcggcgaaccgtgcagaccgactggcattccagtttaagggtgccggtcgagcgccgcattcttgatgcggcgaacgtattggtatccaagtccacctggacctataacgcacgcgggcaagcgctggctgccacgcaggtcgatccggcgacgggcgagacgcgaaccacgacaagcacctactgcgaagcggacgatgtggctgcagcgcggtgcccattgcttggtctgcttactcaggtcgacggaccccgattggatgtcactgacacgacctcctatgtctactatcccagcagcgatgcgggctgcgctgcgggctccggctcatgcctctacaggaaaggcgacctgtggaaagtcgttaacgcagcgggtcacatctccgaggtgcttgcctatgacggggctggaagaccgacgtctgtcaaagaccccaatggcatcgttaccgagattgcgtaccatccacgtggctggccagccattgtcagatttgattccgcatccggcgccggtgcgcgcgcgatcagtctcgactactggcccacaggcctagtcaggcaggtgacacagccagatggatcatctatttcctactcctacgacgtagctcaccgattgacggcgatttccgatagccaaggaaactcaatcaccttcatcctggacaatgcggggaatcgcgtcgcggaagagacgcgggatgtaaatggcgaactgaagcgagcgctcagccggatctacaaccagttcgggcaattggcgacagaggcggatgccggcgccaatcccactgatttctcctacgatgccaacggtaacatcgcttccacgaccgatgctctgggccgcaagaaccgacagcaatacgatccattgaatcgccttgtgctgtcccttcaggatgtcggcggtttgaatgtggaagtccgtacgcactacaacgccatggatcaggtgacccgggtaactgatcccaaggggctgtctacaacctattcctag

SEQ ID NO: 497757 - DNA, 795 bp, Stenotrophomonas maltophilia
atgtttcaacgcttgttgctcgcgctcgcactggccagcgcacccgtcttggtccacgcgcacgcgccagccaccgattccgttgaggtccacgggaagaagcctgggtttttcaaacgcctgttccaccgccacaaagacgccccgcagtgggacggtgtccagcccgagcttcgctcagcgctggaacgcatcgccttgcagatgaaggacgagggctacgacctgcggctgatggagggctaccgttctaaacagcgccaggccgagctgctcgccagccaaaagggcgtgacccaggtggggcgaggcagcagctgccacaaccacggttgggccgcggacatggtcatctacaagcgcgggcgcccttcttgggacctgaaggacgagcaggtgcggcagggctaccaacgcttcggtgagctcgcccagcaggcgggattgaggtggggcggggcttggaagagcttcaaggacatgccccacgtcgagatgcgcagcgagtgcctggtagccattcgtggcggatctgccccccgccgatcgctgcaaacagtgattgccaaggccgagtcagtgtctgacgcaccgaaagcaccccgttgggcctggagcgtcgattccgagctggcgccggactgggcgtgcgaatccgtgctttgcagtgtgtcgtgggcgacggtgagccggccatggagctatggcgtaaggccgccgttgaaaggactccgtccagaaccgtttgctgaggcgtcctgtcccatggccccaattgccctgaggcacacatga

SEQ ID NO: 497758 - DNA, 1761 bp, Stenotrophomonas maltophilia
atgaaacgctccctcatccactgcgctttgctggcaggccttgttgctggcacggcgcaagcccaggttcaagtgggcaacggtgccgttgccaccaaacccgagaccactgcggtaggcgaccgcgcccaatcgttgaccgttggggccacgaccatcggggcggacgccctcgccgacggcgggataatggtggatgaaaatggcgttccgggtgagtgcctgggggccactgcggtgggcaatcgcgccaccgctcgcggatgccatacaaccgctctggggttctcgagcgaagcgcagggctcaaatgcgctcgccattggctctcgcgcacaggcatttgcggtttacgccgtcgccgtcggaccccaagcccaagccaccggcgattccgcggtggccattggcgggcacagcctggccagcgggatcaccggtgtggccatcggctctagtgcccgcgcgctcggggatggcgggaccgctgtaggctcaaccgcaagagccgatggaaacggcgcggcggctttcggggccggggcgaatgctcaaggcgatcgcaacctcgcgttgggcgccgcatcccagaccgagggcgaaggtgcatccgccgtggggcccggtgccaacgcaaccgccgactttgccggcgcctacggttacagcgctggcgttgccggcgaggccggcaccgccgtgggtccatgggcacaggcgtttgcgccctactctgccgccttcggcgcgtctgccacggccaacgccacagaaagtgtggcattggggccccgtgccgtggccaacgcatggggatgcgtggccgtgggcgccaacaccacgtgcgatgaagaagacactgcagcctttggcaaccgccgcttgacccaagttgccttgggcaaagcggacgacgacgccgtggccgtcagccaactgcggaccgccgtggaaaccttgggcgctggcgcctccatggtgaacggcttgatcgtggcgccgaactaccagctgagcagcggtaacaactacaccaccgtggccggtgccatctacgatctcgatgggcgcgttcaccagctggaacaaaaccctggcggcggtggtggcacccccggtccacagggccccaccggtccgcaaggcccagcaggcaaggacggtaaggacggaggaagcagcaccacggtggccggggccaacatcgaggtcactgacaacggggacggcacccaaaccgttggcttgaaagacaacgttggactgtccgaaaagggctcggtccaggtggccaaggccatccacaacagcgacggcttcactgtccagggcggtccatcggtcaccagatccgggatcaacgccggcaaccagcgggtaaccggggtggcagcgggggcgatcgccgcagggtccacggacgcgatcaacggtggccaattgtgggattaccagcggcagcaagacgaccgctggaacctgacggaccgccgtttccgccagctcgacaagcgggtgagcggtatctgcgccatggcccaagccaacgcccagatggccacctcgacgtcggccatccatggggagaaccgcaaccgcttggccgtaggcgtaggtggctgcagcggccaagccgccatttccatcggctacacccgcgacgtgaccaccccacgcggatccccatcggccttctcgatcggggtttcccgcagcgggcaggacacggccgtgggcgcagcctgggccatcggttggtaa

SEQ ID NO: 497759 - DNA, 525 bp, Stenotrophomonas maltophilia
atgagccggcaggtgacggagatcttgcgtgatcgaagcaaggtcacctacaaccagagcatccgcatccagccgcagcttgtggcaaggggagttctgggccacttgtcatcggtgggcttgaatcgctacgacgaacgccacagccagcacctgttcgatgaccggtcagatcttctacgccaggttcggcttcactactgggtgtatccctacagtggtcgaacggttcttcgcgacttcgggctgggcatcttgggcgggaaaggcagttcggcgatctatgtcctgaaggcctatccgctggcctttgcaatggtctggaacagggactttcagttcgaggactggcagccgcagagctttgacccgttcgctgggttcgagccagaccaagaggcgaacctcccgctggagttcgtgggcctgccgggacaggtttggccagagcacgtccaggggaacacgttcgcgctccttcattccgatggtgcgttcgtggcaacggagaaaggacggggctag

SEQ ID NO: 497760 - DNA, 456 bp, Stenotrophomonas maltophilia
atgacccaccgccacaacctgggacgcagcgagaagtatcacgccctgccccgcaccctttacgccctgctgttcgacgacgggggctgttacatcggccaaagctcaaacccccagcagcgggagaagcagcaccgctcccccaaaggcggctggcaccgtcccttccggttccatgcgctggaggtggtgacagccacccgggcggaaaccgaggcgtatgagcaggcgtggcgggtgaaggcctcccgggagggatggcgcatctacgccaagccaccggggatcgtggtcaacccccaccggcgggccacggcccacgtgcgcgggttggcccaccaacggcggtggcagctgggaacaccggtcaaagcgccttccgaacgcgtggggtggtggccgtgggtagtggtggtgatcagcgtattgacactggcccgatgcgtcaccgtgtaa

SEQ ID NO: 497761 - DNA, 2835 bp, Stenotrophomonas maltophilia
gtgatcaattgcacccgcatcgatgcccgcggccacaacaagcgcaacggcaacatgttcgactacatgctggccaccgagcgcctatccatcgacagcgccgtggcttactacgcgggcagcggtcctgatccgaggcagacgctcaattggggcggcagccttgccgccgagctctgcctggaagggcagccggtcacccgcgaggtgatggaaaagctggggaagggcttttcacccaccggaaggccgttgtgcaaaaacgcgggcaaggaggcccgattggtcatcaagacggatcgctggggaaacgtgcggttggacgacgacggcaagccgatggagaagtgggagggcggccaccgggtggggttcgatctgaccatttccgcccccggggacgtgagcgtggcgtttgcccttgcggatgaacgcgagaagctggccatcttggaagcgcaccgccaggcctgcgccgtggcgatgcgctacatcgagagcaaggtagaggcccggcgcggaagagcggggaaagacgttatagacacccaggggttggtgtgggcagccgccgatcacacaagcaaccggaacgtgcagtgcgatttgcacacccaccatcttgtctttggtgtttcgaagggggaggacggccgttggggcacgtttgatgccatcgagatctaccgccaccgccatgcggccgatcacctctacaaggccgagctctacagcgcgatgaaagcgctgggctatgggattcagcgggagcgcgaggtggacgtgatagggcgcgagacgggccagattctcaccacgattgccggcatcgaccgtgagctggtgcttcagacgaagacccgccgccaggaaatcctggactacgtcaaagaacaccccaacgccagccacgacgaggcctgcaaggccacccgcaaaaagaaggaagaaccgcccttcgagcaggtggtcaaggactggcagcaaaccttcgccaacattgcccgagaaaggccagacctggttcccaccacccagtcgctcaagcagacccaaggccagcacctggacccgcatacctttgacgaggtcttgcagcgcatgcacgagaacgaggcgatgttctgcgagcatgacctggtccgggagctggggatggagttcgccgggcaaaagaacgcggaggagatcctcaaaatggtgaaggagttcaccgaacaggacgacctggtgcgcgttaaagccgaacacctccacaaagacgaccgtggcactcgtttggcacgcaagcaccgggaggatcgcttctgcgccacctggatggtcgaatgggaagccgagatcatccgtcgttcgaaggagcgggagaacgagacggacctgaagctgttccgctccaccgtagaccgggaaatcgccgcctatgagaagcgaaaggggttcacccttaccgaagagcagaaggctgccattggtcatttgacccatggaacggcaggtgtcggcgttatgtcagggttggccgggaccggcaagaccaccgtggccgaggtctacaagcagtgcttcgaagccgaaggaaagcagttgatgggcttggccgtgtcgggtaaagccgcggctaagctggaagaagagtccggcatgctctgcatgtcggttgcaaagttcttttcccagctccggcagggcaaggttgctctgacgaagaatgttgtggtggtgctcgatgaagccggcatggtggctaccgatgacaccctgaagctcatgacctactgccagggggtcggtgccaagcttgtcatgcagggagacagtgaccagcttcagcccatcgctgcgggcaacggctttgagctggcgaagattgccttgggcgacacgaagctgaccgaaatccgccggcagaagaacgccggtgacctgatcactgccaacagcttctacgagcgggaccaccaggggaaggtcaaggacatgcgccgcgggcaccgcagccgccaaggcaccctcgatatgggtgcgcagacccttcgcaatctcaaggagagaaattgcatcgacgacttcggcacggaaaagcaggccatcaaggcgttggtggacgactacctgaaagaccccaccccgatggacgagaagttggttctggcccacacgcgctctgaagtcaaagccctcaccacgggcatccgaaaggggctccaggagcaaggcgtgctggacaaagaggagttcaccttccgctcgatcgtaaaagggcagtgggaggacctgacgctctcccgccgcgaccgtgtgatgttcacggcgaccaacaacgacttgggcgtcatcaacggcaccgagggcacggttgagagcattcggaaggacaaatccggtggctacgacctggtggtgcgcatcgactcttcgaacccgaaagaggacgggcgcatcttgaagttcaacaccagcgagcacaacgccttggcccaccggtatgccatgaccgttcacaaggcgcaggggcaggggaaatccgaggtttaccacctggccacgaacatgggcatgctcgaccagcagtcggccttggtggcgttcacccgcctcaccaagggcagctaccgcatgtatacgaccgacgagatgatggagcgcatggccgaacggctgggaaccgaacggcacaaggaaatggcgctgagcgtcggcttgtccgagacccaggctgctccggtgcgcaacctggtccaggacgtggaagagctgttggcaggattgaaaccgcaaacccaggtgccaatcacaaacgcggaacggcgcgagatgaggcttacacggtga

SEQ ID NO: 497762 - DNA, 723 bp, Stenotrophomonas maltophilia
atggcaacgatcaccgtgccgatttggaagccagtcgccaaatacgctgtgaaggcagccttgacctcgcgttttcgggaggagctggacgaggtggccaacaatcgaaagggctccaccagtcggatttttactttggtcgtcctgtatcccgataacaccaacacggcggaccaaaacgcggtggccgtcatgacacaacaggcgccacccaggatgcttgggtatttgccacgggaggtggccgcagaatatcggcagcgcatggctcaggccggctacgaacacatggtgtctgcgtgtgaggcggttctgtccggcgggctggtgaccacggacaaggtttacgactacatcttggaagtggacctggacatgtccatcgacccgcatccggatcacctcgtcactcatcccgagatggtccgccataccgctgacccggagttcaagaaggacaccgatggggcatatcgcttcaagtgctggatcccgcacgatgcggtgggccacctccatccgaaacagcgcaccaagggttggaccacggactcctggaccacggtcaactactaccttagcaacgcgcagagcatcggcttgggtttcaaggtgctttcggtgcccaagtccaagcacgcgggagtcttcggcgaagagccagtaaccgccgtcgtggaggagataaaacgccgttgggtcacgctgcgcctggagaagtaa

SEQ ID NO: 497763 - DNA, 1875 bp, Stenotrophomonas maltophilia
atgagcaaacccaagccctttgacgcgctgggcgacgtgcccggcagcgttgcgccttcccagccggtccgatactggcaccgcgccgttcttgccggtgcattcgtttttggcttggcctacgtggggagcatgggcgttgcctggctcatcccgaatcccgatggctcgctcatccgcttcgccgatgctttgaaaggcggtctggtgaccgcctaccacttcctgaccgtcggcatctcggctcgcgccccggcacgggagttcatcgaactggtgtcctaccatcacccagtggcgacgtggtcccggatcggggtgtcgcttctgctggcggcgggcctcggtctgcgggtgttcctcaaggcgaccgagccggtgagcaacacctggcacctgtccggaccgcggttgttggaaggaaaggaggccgtggacgaagcccggcaccgctcggtaacccctaaagacgccgaggcggatcccttcgccctgtccctccaccccgatctgttgctgtctaaaaagcattgggcgcgccacgtcctgatcaccggctcggtggggtcgggcaagagcgtcatcctcaagcacatcctggaacaactgacgcgaaagagggacgcaaagctgttcctttacgacatcaagggtgatttcacgtcgattttcaaaaggcccatcatcgtgtcgcccttcgatgcgcgctcccacgtgtgggacgtcgccgccgacgtgcggaccccgacccaagcggcggcgttcgccgcctctctcatcccagagggcgacgggaacgccaaattttggagcatggccgcccaggacttgttgattgggtgcgtgcgcgagctccaaaacacccggcctggcgagtgggaatggcccgatctggcggccttggtgcgccgcccggccgcggagatggccgcaggcatgcgcccgcattacccccgcggcgccgcactggtgcgtgacccggagagccaaaccacgtccagcgtgctgtcttccctggggggcttcacccgccttatcgacgatctggccaccgcatggcccaaggttggcaagcgccgtttctcgatgaccgagtggatacgggacgactacaacgggcgcaagcaggtcattgttcaatccggaccggacccaaccctgacgaaggcctacatcgccgccatgatcaacgtggccgtcccggatctcattgggccgggcttgccggacgacgagggcgggcgtgggctctacttcgtgttcgacgagctgaccagcgccgggcgcttgaacatcgatcccttgctggcgttggggcgcagcaaaggcgtggtggccatcatggcggtccaggatcactcccaggttgagctggtctacggggacaagaccgcgcaggccttctcgtccctggtgggcacccacgtggtgtgccaagtgcagatgggagccaccagggacaagctggccagccagctcggcaagcggaaaatcgcgtggcgcgggcacgagaacaaggcccaggtccacgaagaaagccgcgcgttggtttccagcggtgagctcaccgaccggctgggtttccgcaaaggcaatcgctacggtcccgagaagtggggcatcgaggcgatcgtgcagatgggcggggacgtgctgttgctgacatggcccgggaagagccatccaacggttcgcgaggggcaggtggccgctgcgtggaccaccaagccagccggacctgaagggccgtcgccggcaacgtccccttcaaacgctggcgcgtcggccttcccaaccaccgccgaaggcatcgatgcggtgcagcgggtgttgaccatgacacccgaggaagtcgacgcgctattctcccgttga

SEQ ID NO: 497764 - DNA, 825 bp, Stenotrophomonas maltophilia
atggagatggacatccaagaatctctgttgcgcctcttgcgtcccctgggcctccaacgagcggaggccttggcgggcgcgctcgcgcgcgaagccggcgcgtccaaaggccttcacgattcgcaagtgttggcgcgtgcccacgccctgagcgttgcccctgtcgagggtcgattgggcgatctggtttggcaggtgcgccagcgggagcacgatggggcaccgcaagtggacctgcgttggggcttgcatcggctggggttggacgcaccctcacgggcctccacccgggacctggtgcgtgcttacgagaggcgcttggcagaccgtaacgaaccgatggtttacagcaccctggcagagagggtggctgggtccatggctgagcacacctcgctcttccaaggcatggcgatggcggtagaggaggcgcgggctcggcggtcggatgcaaaccggttgcgggagaacgcaccgtggcagggctggctcgtgggggcgtcccgggcgggccacgaagcagcactgctggcctgcatcggcatgggcgcagacgcccggctgcccgatgccagcggcaacacaccactgcatcatgcggcccggtttggtcacttctcgctggtcacgcctctggtcgaagccggcgccgacgtggcggccctcaacgcccacgggtgggcgccgctccaccttgccgccctccacaagcacgcccgggcctgcctccacctgatggcccacggcgccaatcctgagcagccagggtggcgggggcggaccccaacgcgcatgcaccgacatgagcaaacccaagccctttga

SEQ ID NO: 497765 - DNA, 228 bp, Stenotrophomonas maltophilia
atgaatatcaacaacaccaacttccaccgttttcccgacgttgctcccgagcatttgagttctttcgccttggtcggcgggtatgtggattcccaggttctggctggaaggagcttggacggtgtgcttcaggaactggacagcagtagcccagggcagaagctctggcatgacacagagattcttcggcatttcagtgttgcggtggctactcgcctcaacagctaa

SEQ ID NO: 497766 - DNA, 204 bp, Stenotrophomonas maltophilia
atgtccacgttgttcaatgccctcaaagacttcgctttcgagaacgcggtcccactgctgaccggcttgttcctgctgatcgcggccttcgcaacggctgtcctcgcctaccctccggccgttccggttctgctcaaggtaatggccatagcggcggtgggctttgtgaccatcggggtggtggtccagagttccttccggtga

SEQ ID NO: 497767 - DNA, 525 bp, Stenotrophomonas maltophilia
atgagcaacaccctctcccaacccatcgaagaaatgaccgagctgcgagcactccaggcgcagcgcaacgagcggcttctgggcgatcgcccaccgccccagaaggacagcgcggcgcgggcagacttcgagcagaacgtggcccaagaccaagccgccatcgagcaacgccgacagcgtgttctggattgggcagagaaggcctcgcccgatcagatcgctgcgctccaggcaaagatccaggaggccgacaaagccgttcgtgatgcaaagccggacgacaagcgcgagcaggtggttcatgcgaccgttgcgcagtggcggcagcaacgcggggcccagcgggaggagactcctcccatgttgacccgtgagcagcggatggagaacggacctgggcgcctgggatacgccgattacgcccgcagttcgttgaaggaggcggctttcatgaaggactacgctgccaattacgattgggagaagcaccaaaagcaggcccagccgaacgtcttccgacagtaa

SEQ ID NO: 497768 - DNA, 2982 bp, Stenotrophomonas maltophilia
atggcagcaatcagtttgttcaacgtgcttgactggacgagcggcctggggcgcaagttccgccggaagagcggcgagccttggaacgtgaaggaagaaatcatcgtcagatccgccgaggagtatgaaaacctggtggggcgctttgacgtgaccgatcgcgttcgcagtcgagagctcgatgtgccagaggctgaccgggatttcgcgctggagtgcggcgccgtctgggacgagaacgcccaggggttcaaggtgcccgacggacgcagtgaggacgaattccaggagtggtggccgaaggtttcggaagatttgcgcgacacccaatcgcggatcatcacgacgaagcttggacggcgtgccgagggcttcttgcagggcaacgacatggggcagggcggcgacagcctggccactcccttgatgtatctcgccttccccgtgatcggcgttctggcgaccttcctagtgagcctcatcggctgggcaggctgggccgcgctgctgctgaccattccatacttcatcgccctcaagcaaggcgagggcatgaaggaggccctgaaagccctggtgctgctgcaatgggttccgatggcgcttcagttcatggtcggcggcagcaagggcggcaccgaggtggcaatgcaagccggcggcatggctgtgtatgcccagatggccaagacctacctgtggtgggcctttggcttggtcggcatcctgtttgtggtttgctttgtggcggcggcctcgcacccgcaccggggcgtcattggcgggacagccgcgcgcttcattcaagcgatgaagtgggtggggctcatctttgccacactggtggtcgccaaggtcctgccgtttggcttgggcgaggcggcgccttacgtgctggcatgcatgtatgcgatgcaatacgccgaaggcaactttgtccaaaacgccgcccggctttacctgcagaacaacgacaacaacctggccacccagggggcgctgatcaacgcgcacgtcaaggcgcgtgaacagcaagctgaggcggcactgcgggacaagaccccgctgatcaccattgggcgcgccacgggacacctttccgacaagggctatggctactcgcccgacctgggcaccgtgatgatgttctcgtggagggattgtcagcagggcctgctcgtgttcggagccatcggatctggcaaatccttcgccgcgctcagacccatcgctcgtcggttccgtagagccgctttggcgatggcatgtgtggcgccaggccacgcagatgcaagggagcgcttgaagcagcagaagcttgccggcggtggcgcgctcatcgccgacggcaaagacggggcgatcatctcggacttggaaggtttgttcgatatcgtcgtcaaacccgggatgcgggtggcgccatacgaggggttggcgcccgatcaggtcgtccgggcattgcgcggtgcagccggtgggcgagtggacgagaaatccaagctttggacggacggcggtgacgcgtttctctaccacaccggcatcatccttcgtgcgctcgtggatcacgagatggcttacaggtcttggtgctcggccaagctggaagggctggagcgtgcacagttggatgcggagcttgagctggtcaaacagcgcaagctgggcgaggacgtggccgagactgaggcgttgatcgagcggatcgccgagcagatcgccatccatcgaatccctgtgagcgacgacagacaatggcaatacacgccattccaccacgccaagttgttgtccattgtggaacgcgtgattcccgccagccccgcgcctcgtgccaatgcaaagctgatggaggtggtgaaatacttgggcttggaagaggcggacacgagccatgacgaagaagggcggctggcctacgcggcctacctgcaacagcaccgccttcgtcaagagagcgctccgcagaccatccacccggatctcttccgtcccatgtctcagctgcagagctcgctggaatgggcgttcctggagattcccgcgatgcatccggaacagaggcaatcgttcacgctcaactcacgagggctgctggagaagctcttgcgaggcgaaaagctgcgtgacagcagaacggacatgccatggcactcgatcgagaagggcgaggtggacgtgtccgatgcgctctacggagccatggtaggcctcttcttgcccccgacccaattcggtgaagcgggtgaaatgatgatgcgcctgctcaaacagcgggtcatgaatggaatcaaagcgcgtggtgcattcggcgacaagtggcgcgaagtgttgcctgggcaaattgaagtgatgttgatgatggacgaggcccacctgctgttgacggccgatgacatcaacctgttctccgtttcgcgctcgctggggttgatgcccgtgcttgcaacgcaagggtttgagagcttggtcaacgcctttgggtcggtcaacgaggcggagctgatggccaacacgatgcagtcggtgatcgcgctaaagtgctcgcacaacacccacgaatacctggaaaagcggttcgggcaggccacattgaccaccttcaagcagcgcacccggggcatcgactaccaaggcggtatgaacaactggcgccactctgtgctcaacgacccagatcatgcatacgcgtccgcctacgacaagatgcgcatggaaggggcggggcggttgacggcttcgcgcatcgacgccgtgacgggtcgccgctggcggattggatcggaggacacgctgggccaagacgagatcgcgcgcgacatcgacatgcccaccgggggcaagcgcgaggtgcagccgctcttcctgcaggaagaatactccgctcttcttgagccccgcggtcacgccatcgtggcgctgagccgtgccggcatcaagcgcttcgacctggcggagctgctgcccgacgcggattga

SEQ ID NO: 497769 - DNA, 333 bp, Stenotrophomonas maltophilia
atgttcaagtggctgttcacgcaataccgggagcccggaaaacttcatttcggctcaaagtggctgaacctgcacgggcgcttgttcctcggcagccctgaatcgtttggcatgggccacctgagcgaaggcgtccgccgcactttctactacttgcgcgccgatcgcaggcctccggtcagagacgacgccgcgtatgacgcatggaccaaggatcggctctacgcgagcaaggttgagcaggtcgcagagcgctgggtggccaaagcgggctttctggcgtgcgcgccgctttgcttggtgcttgccgtcttggcgcattggcttcgttga

SEQ ID NO: 497770 - DNA, 1065 bp, Stenotrophomonas maltophilia
atgaccccagaagaaaagaaccagagaatcctgaagcgcaagcgcgaagaattgctgaagcgtgccaacgcaaccccgaccgcatcgcccacgcaagaagagcggctggtttccgacggcatgaaagaaaacctgaaagcggccagtcactgggctggagtgatcagcaagcgcactgccgagttgacccagaagggcgttgctgccgctgcagagaaggcaaaggaagccaaggcacagctggacgcgaagcgcgcccgggaagcccaggaacatcgtgctgtcgaagagaagcctcaagacgctccgctcaccttggaggaggaaatgttggttaggcaactgacgtccgatgcagctgcaccggttctcgtaggagcgggtgataagggaatgtgcaccgtttgggagctggttgatgaatttggagagcccggcgcacaggttgcagatggattgggtggcccttcggtggacgccaaggcgttgagcaatgaagatacggcagccttggtcaagctgtctcagcaggacgcggtggaagtcctgtccgtttccgcggggcctgaagggtccaaccggcccccggaggccgcgtcaccagagcagccagtaactccaatccaacccagcccccgctctcgtttgccttgggtcttgaccggtgtggtggcggtggcattggtcgtgggggcgatctacttcttgcttgggaagaacaaccaagtgcctccaagcacaccggctcccatggcaccggttgccactccagccgctcccgagcagttgcccgaggtggtggaagtccccgtggttgcgcctgctccagcagtgctttcagaacaggccaagccagaagccacgatcgagaaacccgcacctgtcgccgctcccccggtatcgacgacagcgccaattgcgccccagccaatgccttcgccgaaacgtgcaaccgccccattgccgaggaagccccccgcacccgccgccgaaccgcggaacgactggcagcaaaaagccaatgcagacctagacgcttgggcgaagaagtcggggatcgactga

SEQ ID NO: 497771 - DNA, 636 bp, Stenotrophomonas maltophilia
atgaaacgtttttccctttctctcactctctgcctggcggcgttcatgccgcttcacgtttccgcccaggccgccgctgatgcggtccatgccgcagaggacgatggcaagcccaaggccgataagaggcgcctgttcaaggccggaggcatcggttgcgtggccggcggagccatcgccttgctcacgggcaagaaagacaaggccttgggcgcttgcgccgcgggtgctgcagtgggtgcttccgcgtcctacgtgaagcagcagcgggaacacgccgagcaggccgccgacgctgcccgtgcggctggcatgaaggccgaagtggtcaccaagaccgaaaccgtggagggcaagcaggaagccgtcctggattcgttgcgcttgaactacaaccccaccgacatgaagcggttgaacagcgacacccgggccttcctcgacaagttcgcaggtctgttgaacaagtccagcaacgggttgacggtggtgttccaaggagccgacaaggccgcctgccaagtgcccatcgttgagctggccaagcgtggcgcgctgtccaaggtcacggtggacgaccgctgcggcagcggtgagcccgtgatcgtcgttaccccggtgcctgacgtccggtga

SEQ ID NO: 497772 - DNA, 402 bp, Stenotrophomonas maltophilia
atggcgttggttcgtcaaaacgtaaacctcgaccgtgggcaactgaaacttgctcagcggcttgcccgtgaatcgggcagtgggtttagcgcctacgtgcgagaggcgctggagcgacacaacacttccatgtctgtggcgagtgtgctggagaactctaacgctcacttggaacagctcatcgacgagttgcgggaagagaacgcgttgttccggagtgcgctccaggaagacctgcggcggctgcgagacgaaacgaaggcggaacaggacagcgccatccagcgctacgaagaagcgcttcgcaaggtggtgacggcggccctctcgcaaccctctcccaaaggttctggtgcggccaaggtgcccgcagccggtcccatgactgctccacgcacctaa

SEQ ID NO: 497773 - DNA, 1092 bp, Stenotrophomonas maltophilia
atgaacaccgctgacctggacgcgtttgcccgtcgcgtgctggccttccatgccgtccgtgcgcctgccatcccacgctgggcgctggacgtggcccgccgttccgaaagccctgtgtgcgctttctgcaccgcccccttggacttggaccgtcgccactcgtgggggctctcaccgctcgttccgtcaagcctagccggcccaagggacaccgagaacctgcgcatggcttgcaagcgctgcatcaccgagcggggcagccgtgacctgttggcctggcccgagttgagccagcggctgccaccagaaccgctggacgccctgctggccgaccggctgtttgtcctgcagcgctccgacaaccacctggtcgaggtggggcgctttgccaagccagccagcgtccttgcccagctccaagagcgctggatgcacccccggttcgtcgttcacgtccagaggcattcggacggctgggtgctggggtggccactggcccaccgtgccgatctgacgcgaaacgacttggccgcgctcttgcgcaacatgcaccagggccaacggctggaacatcccgacgtggtggccttcgggttaaccgaggatgtttttcaatcggcggtgtggcaactgatcgccctccacgccttggtcatccccctggcccaaggggaagcgccccctcccgatcgaacgtttgagaatcggtggatggcccggtatccaagcctgagccagatccgccggcggcgacagggcgctcacgaaacaccgtggcctagccaaggcaaagaccatgcccggacttacagcgacaagcccaacgcggttcgcatgcggacacagcgccaagccactcgtcaggaggaaaccaaggcacagtggctcaatgcccggcgccgtttagcgaaacgggacgctggggtcgccagtggcacgttgcgggcatggctgcctggggaacgggccgcgctgcaggccgacgtggacgatctggcagcggcgtggttgaaagcccgcaagcgccagtcgaaagggcgcccggacaccagggatcccttaccattgaggcaagctcagacaatcaattga

SEQ ID NO: 497774 - DNA, 897 bp, Stenotrophomonas maltophilia
atggacgaaaaagatcaggacaaggaaagcgacggtaaggctaaccggagcccgccgaagcctcagcggcgaaagaagaagtggaaggagcaattcaacaagcctttcagcagcctgttcaccattcgcgataacgaagatggaaacccgccggagctagaggaatacctggttcgtcaacacctgcaaaaagggctgagccacctccggatgagcagccgtgatgttaggtcagcgctgaagatcttgagcttgggcgagctgaaccaactttggagcatgcgcgaaaagaaactcaagtatgtggaggacgccgcacttctgttggcgcacatccggcaccggtccgggattgaccttcagttgcgcccggcatcagagcttttcagtcacgatgtgatccaagccctccagggcgtccttgaggagagcgggcgattaagggtggaaaagccactgccccccgctcctgatgctgccgcagcagaggggaagcgaatggagcaggtcctccgggtgatccgagagggccaggctgagtttcgcaagcgcctagtcgctcactacggagcggtgtgcatggtcaccgggaccgccctggccagcgtcatcgacgccgctcacatcgtcccttacaacggagcttccaccaacgctctgaacaacggcctattgctacgaaaggacatccacgcgctgttcgatgcaggcctgttgaccatcgggccggacctggtcgtttacgtcagcgcgggggtggacgatccgttctaccgttcgttggacggaaaggagctcacgctggacgccccagccaagatgtccaaggaggcgttgcgaaggagggtgactgaacaggagtcatccaagttgagcaacacccccctgccgatgtga

SEQ ID NO: 497775 - DNA, 147 bp, Stenotrophomonas maltophilia
atgagcaacagcaagaagaccccaatgacccatgctgcccagcgacgtatccaaagcgcggtggatcgccaacccagcccctcccctcaacaacgggcgttcaaggccaaagcagcctcggtggttgcaaagcggaacggcaagtga

SEQ ID NO: 497776 - DNA, 1041 bp, Stenotrophomonas maltophilia
atgacggcacagccgttgaccggttggttgcttcactcgatgggaatctgggcagacaagcgcacgctttccgatcggttgctcaagatttttaaggtctccgccaagacttgggaggctgggattccacgcaggcctaagaagcgtcagcaggtctgcgatggcctggttgcttacgcccggcaaagccatgctgagctgatgccggagtgtgcggagcgccaagcccgtgcgatggagcgaggtgcacgcgctctgtccgaacatccaacgctccccccgtgtaacttcttccaccacacgcttggtatcgcaggcggagataggctggaagcactggcggttgcattcgaccaggtttccgccgacgtcctgcatgggcggttgtccagggacagtctgtcagcggcggtggtcaaagcggcagcagaagtggttggactacccgcgggtgttatgcagccggatagccggctggatccaggcttggatgcgttgcttctgctgctggctcagatggatcacgacctcaccactcctctgatggccaacgcgggtgagatcaacagcttggtggcacttttgattgatgcgcccagaagtggggtgagaaagcgggttcagcaccgactgttggacatctattttgccttggctacagccgcggccgggcgtgacctgccggagagcttgccgaaggtccgtgagattgaggacgtgctcatgggcggcccgcccgaatccggtggccagtcctgggtggtgcgttggcgcaatggaaccaaagcgcttcgagaagaggacgtggcatcggtgatcgcgcacgtcggacacgtttcggggaaagacgtgtcatggaccatgcgacgtctctatgtcgccgcccaagtgtgggggagggtggaagagcagggggcggaggcggttaagctggccggcgagcgctacttccagtggtggaacgctctgtgcaaccaggggcgggtgaagaccccatgggtccagccctactggtcccagttttcgacaggcaaaagatga

SEQ ID NO: 497777 - DNA, 609 bp, Stenotrophomonas maltophilia
atgatggagtttcccttggcttccctcccagatctacccatggccactcgcaaagctcctgccaagaaggctgccacgaagaaggccgtcaagcgcacgttggatgacgtcaaggacgtgacgcatgccaagccccgccgggccagcaaagcggcaagcgttccgattgcccgaatcccggagcacctgttgctggggccgggcgactacccggagcgcaaatcctattttgactatgacgacagccagaaagcgggcagcgtcggaggaaagcgggttcacatggtcatgccccgatcggtcaccctccatgactaccgccgtcgggaggacgggctgcgccaccaccgggccatggtgaccatcccgccaaaactccgcgagaacatcgccaagctgtttggcttcgacgattcggaaggcgccggcagtgaagtcgcgttgacgaccgccatggtggcgttggccgactacgccgcggcgtcgctcatccaggataaaacgctgttgatcgtgagctcgccggtggacgagcacgcggaggaccgcaaggcagcccgagtggcggtgcggaacttggggatgagcaagaacgggaagatttactga

SEQ ID NO: 497778 - DNA, 597 bp, Stenotrophomonas maltophilia
atgcgactgtgcaacttctcactcaagggcggcgtcggccgcacgacgctggccctgaatcttgccgggtgctatgcccgtgaccccagcctgcgtgtgttggtcaacgaccgggacccccaagccggagcctgtgcgtttgcctcactgtcggacgaaacaccgttcagtgtcgggcgctcgcgctcccctggcttcgacgtggagatcaccgacactccaccacgcctgccggacaacgaagtgatccccgaggccgatctctacctggtgcccacgttgctcgatggggccagctttctcatctttctgcgaaccgtggatgttcttgaaaagaagggaaagcgttacctgcccatcgccaatcgggccaacgagaagcgggcagcccatcgacgccgcttgcagcaccccaagatgtcgggcgccatcctcgtgcgggatcgtgcgttgtttgcggactgctacgaggagggaaagaccgtgttcgacgccaacggccgctgggcccgggtggcccaggaggagatccacgtcttggcggtccgcgttcgcgataccttggccgctggtgcaggccggagggctgcggcatga

SEQ ID NO: 497779 - DNA, 465 bp, Stenotrophomonas maltophilia
atggaaatgaccacggatcggcttgctcaacggcttctggatgccatcgaacaccgcaacccttgggcgcttgaagaagccatcgcggctgtccgcgaggcacgactgaaggcgtggaggggcttgacggctttcccgtccttggaccacccggtggggcccaacggaataacagctttccacgtcgcttgcatggcgtggcacgtgaaccaggatgacccgcacaagcggcagtgctacgacaagatggccggaatgctggctgaagccggagcggacgtgttcgcggagttcggtccggcaaaacaacgctggacgatcatcgaagcactgcatggcgctgcgccgccgtctgtcaaagcatggatggcctctcagccgttcgatctgcattgctcgccttcaaacgtcgcctacacgctgcagtggggctgccgtcgtccaaccgtctcgctggaagaatag

SEQ ID NO: 497780 - DNA, 174 bp, Stenotrophomonas maltophilia
atgattgaaagccccatccgcacggcccgccccattgcgggccctcctttcgctcacatccctccaacggctcccgcgttcctgcccgaaggcaagcttcgccggcaagcccgcctggcccgccagaaacgccactttgagcgccagctgcggaaggagctgcaatggaaatga

SEQ ID NO: 497781 - DNA, 2466 bp, Stenotrophomonas maltophilia
atgcgtccagtgccgtccgctcccgccgtcccattgtcctcccgcccgctggcgcgcctggcctgtctgctggcgctttcggccatgccgatgctgctgcaggccgctccggcggcgctggagcgcgaggtcaacaccttcatcggcagcaaggacgacggcaataccttccccggcgcatcggcaccgttcgggctgatccaggtcagcccgatcggcagccactattccggctggcgctacgacgacgagaagatccgcggtttcggccactccttcatctctggcgccggttgctgggagcagggcgggcaggtgtcgatcctgccggtcaccggcagcatcggtccgggcggcgatttcgatactgctgacgccaagaacttcaaccacaagacctatgccgcttcgtacacgcatgacggcgagatcggccaggccggctattacaaggtgcgcctgaccagctacggcggcatcgatgccgaggccaccgcgcgtacacgtgccgcggccgagcgctacaccttcagccagcgccagggcgagggccacgtgctggtcaatgttggccaagccaatgagcgccattcggtgatcggcagcgtggtcgatgtggtcggcgaccgcgtggtcgagggcaagctggtgaccaagagtttctgcggcggccatcagtacaccacctggttccgcatcgagttcgaccgcccgttcaaggcgcatggcacctggggcgagggcggcggcctgccgggtgcgcgccacagcatggaaggcgaacagaagccgaatggtgcctggctcagcttcgacctcgccaagggccagtcggtaacggcgatcagcgcgatatcgcatgtggatgccgaaggcgcgcgtaccaacctgcgcgcggaaggcatgcagggcggcgcgctgctcggtttcgatcggatgcgggcgctgtcccagcagtcgtggcgcgagcagctgggccgggtgcgcgtgcagggcggcaccgccgacgaccgcgccgtgttctacagcgcggtctaccacgcgctgctgcagccgatgaccggcaacgacgccgacggccgctaccgcggctatgacgatggcatccaccgtgccgatggctggacctactacgagtacttctcgctgtgggatacctaccgcgcgcagaaccagtggctggcactgacccgcccggacgtggcgcgcgacatcggccgtaccctgctggcgatcgacgagcagggcggctggctgccgcgctggggctatgccaacttcgagaccaacatcatgaccggcgatccggtcaccccgttcatggtcgacctgtggcgcttcggtgcgctcaagggccgtgaatcgcaggcctgggatgcgctgcgccgcaatgccttcggcacgccgccgctgaactcacgcatggccggccgttccggcaacccgacctacctggacaagggctatgtggtctacgaccgcgcgttcccgtccaagggcatggacgtcgatccgcaccacggcggttcggctaccttggaatacgcactggccgactgtgcgctttcgcagatggccgatggcctcggccatgcgcaggacgcggcgacgctgcgtgagcgcggccgcaactggcgcaaggtgtgggacccgcaggtgcgcgacgccgagaccggcttcaccggtttcccgcgcccgcgcaccgaggatggccagtggtacaccccggccgatggccactacagtccgcgttcgcaccacggtttccatgagggcacggcgtggcagtaccagtggctggcgcagcaggacgtgccggggctggtcgaagcgatgcagggccgcgaacaggccggccgccgcctcgacgcgttcttcgccatggacgcgctgcaggccgatccgctcaatgccgcccgcaaggagtgggtggtcgggccgtacagctactacaaccagttccgctacaacccgaacaacgagcctgacctgcactcgccgtggctgtacacgctgatcggccagccgtggaagaccgcggccgtggtgcgtgccgcgcagcagctgttcaccaatgcgcccaatggcgtgaccggcaacgacgacctcggcacgatgtcggcctggtatctcttcagcgccatcggcgtgtatccggcggtgccgggcagcggccagttcctgctgcacaccccgcgcttcagcaaggtggaactggacatgggcaatggccggacgctgcgcatcgacgcgccgggtgccgatggccgccgcctgcagtacgttcagggcgtgcaggtcgatggccaggcgcatgcgccggtctggctggactggaaccagctgcagcagggcccgcgcctgcagttcgcgcttgacgcgaaggcgccggagcagggctggggtacggcggtgaaggacctgccggtgtcctggtgcgcggcaccgggcagccagctgcgctga

SEQ ID NO: 497782 - DNA, 1227 bp, Stenotrophomonas maltophilia
atgagcaccttgcccgatttccgttcgcccgcgttcctgcgcgcgcacatcgccgataccatggcgttctaccatccgcgctgcatcgatccggacggcggcttcttccactacttccgggatgacggcagcgtctacgatgccagccaccgccacctggtgagcagcacgcgcttcgtcttcaactacgcgatggcctaccgcgaattcggcaatgccgagtaccgcgaggcggtcgagcacggcgtgcgctacctgcgggacgtgcaccgcaacccggccaccggtggctacgcctggaccctgcgtgatggcaaggtcgaggacgacatgaaccactgctacggcgtggcgttcgtgctgctggcctacagttgcgcgctgaaggccggtatcgaacaggcgcgtgtgtggatggacgaaacctggaagctgctggaagcgcgcttctgggagccacagcacggcctgtacaaggacgaggccgatggccagtggaacttcaccggctatcgcggccagaacgccaacatgcacatgtgcgaggcgatgctggcggcgttcgaggccagtggcgagcagcgctatgtccagcgtgcgctacagctggccgacaacatgacccgccgccaggcggccaaggccggcgggctggtctgggagcactacgatgagaactgggagatcgactgggactacaacctggacgaccccaagcacctgttccgcccatggggcttccagcccggccaccagaccgaatgggccaagctgttgctgatcctcgatcgccacgtgcaggccgactggctggtgccgaccgcgcagcacctgttcgatgtggccgtggcgcgcagctgggacgaagcgcgcggtggtttgtactacggtttcgcaccggaaacgcgccgacagccgggcatggacggtgcgccgatcggtggcgacagcttcgtctgcgacgacgacaagtatttctgggtgcaggccgaaacgctggccaccgccgcactgatggccaagcgcaccggtgatgaccgctactggcagtggtacgagcgcatctgggcgtactcgtgggagcatttcgtcgaccaccagtacggtgcctggttccgcatccttgatgcggacaaccgcaagtacagcgacgagaagagcccggccggcaaggtggattaccacaccatgggcgcgtgctacgaagtgttgaacgtggtgcgctga

SEQ ID NO: 497783 - DNA, 2619 bp, Stenotrophomonas maltophilia
gtgcatcgcctttccctcgttgtccgtctgctcctgctgctgatcgcagcctccgccttcccggcaactgcagccccgctgcaggcacagtgggaattccgcatgctgcccggtgatgcgcagggtgcagcccacccgggcctgcagcaatggcgtgcggcgaaggtgccgggcagcgtgcacaccgacctgctcgcccacgcgctgatccgcgatccgtacgtcggtgcgcctgaggcagagctgcaatggatcgggctggctgcctgggaataccgcgcccgcttcgacgtggatgcggcgacactggccaagcccaatgccgagctgcgcttcgacgggctggatacctatgccgaagtcagcctcaacggcaggccgctgctgagcgcggacaacgcgcaccgcacctggcgtgcgcgcgtggacgggcgcctgcgcgcgaatggcaatgaactgcagatcgtgttccgttcaccaatccgcacactgcttcccggtgtacaggcgatgccgcacaagatcgccggcaactatccttcgccctatggcgatgagcccaaggacgcgatggtcggcaacttcgcgcgcaagccggcctatcacttcggctgggactggggcccgcgctatgtcaccgccggcgtgtggcgcggggtcgacctgcaggcctgggatgcgcaccgcctgaccgatcttgccgtgcgtaccgatgcattgagcgcggagcaggcgaagctggccgtgctgctggagatggagcagggcgcggcggccggttctgcggtggtccatgtcgatgtgcgcgatccgcagggtcgcagcgtggcccaggtgcagcgcacggtgctgctgaagcccggccagaacgccgtcgaagtaccggtcgaactggtcaagccgcagcgctggtggccggccggccacggtgcacaggaccgctacaccgtgcaggtccgcctggatgatggtgtcgatgcagcgctggtgcgcgagcagcgtatcggcctgcgcacggttgaactgcgccgcgaggaagacggcaagggcgggcagggcttcgctttcgtcatcaacggcgtggagatcttcgcaaagggcgccaacgtcattccgttcgatgccttccccgcacgggtcgacgccgcgcgcctgcgccaggtgctgaccgccgcacgcgacgccaacatgaacatgctgcgcaactgggggggcggctactacgaggacgatgccttcttcgacatcgccgacgaactgggcctgctggtctggcaggacttcatgttcggtggtggcatgcagccgggctacgatccggccttccgtgccagcgtggtggccgaggcacgcgacaatgtgcgccggctgcgccatcaccccagcatcgtgctgtggtgtggcaacaacgaggaagaaaccgcctggaaggactggggccacggccgcgacctgaaggcggccgacccggcgtttgccgagaaggtctggcagggctatgtcgacctgttcggcaatgacctgcgccaggtagtgggtgaggaggggctgggcgtgccgtactggtccagctcgcccagtaacgacctggacgaaaaggcgaacgactcgacccgtggcgacaagcactactggcaggtctggggcaatccggcgctgccggtgcaggcttacctgcgcgagacgccgcgcttcatgtccgagtacggcctgcaggcatggccgtcggtggccaccgtggaccagattgccacccgcgccgagcagcgcatcgacagcccggtgatccgcgcgcaccagaaattcatggccggcgagggcaacagccgcctgctgcactacatcgaactgggctacggcacgccgaaggacttcgaggacttcgtctacctcagccaggtgatgcaggccgatggcatcgcgctggccgcgctgcaccatcgcgcctcgcggccgtacacgatgggctcgctgtactggcagctcaacgacgtctggccgggtgcttcatggtccagcgtggactacttcggtcgctggaaggcgctgcactacgccgcgcggcgcttcttcgcgccggtcacgctggcggcattgcgtgatgagggcagtacgcgggtgcgcctgatcaatgatggcgctgccgcagacgcacgttggcggctgcgggtgatggatgtggatggcaaggtgctgcgtcgtcgcgaggacgcggtggcgttgacggcggcgggcgtcacctcgattggtgatttccgcgatgccgagctgctggccggtgccgatccgaagcgcacggtggccgtgttcgagctgctgcagaacggggcggtcagtgcccgccaggtcgtcggattcgtcgaagccaaagaccaggtgttgccgcggcagaagctgaaggccaccttgtccatcgaaggcgatcactatcgtctacgcctggaaagcgcggcttacgtgcgcgcgacgtggatcgatttcggctcgctggatgtgcaggtcgaagacaacctgctggacctgctgccgggcgagacccgggacattgcggtgcgcggcccggtggacctgactgccctgcacgaagcaatgaagctgaagaccctcaacgatcgttga

SEQ ID NO: 497784 - DNA, 375 bp, Stenotrophomonas maltophilia
atgatcgcgcgcgcgatggggatgatgggggcgattggcatcatgcttgccagcagtggctgcacgatggaatgggtgaagatggatgcgggtgcgcggtcattcggccccgcccattcgagttgcagggcgcaggccgacgatcactggccggtcaggaatgaagtggccacgcgcaccgtctacgaagaccgcaaggtgccctgcaggcttgatgaagtctgcgccattgacggcaagtacaacatggtacccatgccgaaagaggagagttacatcgtggacgtcaacgcgtccgaccgcagcagcgagttcaatgcctgcatggccggtgccggctggcagcagcagctcatctggttcaatcgccgctag

SEQ ID NO: 497785 - DNA, 147 bp, Stenotrophomonas maltophilia
gtggcgctgcagggcagagcgatgctgatgccaaagaccgagcgctacaccgtggacgtcaacgtcaacggtaaccatgagtacttcatgggttgcatgggcggcgcaggctggatacagaagaccatctggtttggccgcagatga

SEQ ID NO: 497786 - DNA, 393 bp, Stenotrophomonas maltophilia
atggaacgggacatcgttgaagacctgcatgagcggcagttggcagcgctggaacagcgcctgcggcaggcattgctggatgacgaccacgatgcgctgactgcgctggtatcgccggcattgttcatgatggacgggcagggcgggcgcttgctcgacctgccttggctgggcgactggctggccggaaacctgcaggtgcgcagcctgcagtcgtacgcggtggaaacgctgctgtgcggacgcctggcattgttgtccagcgacgtgcgcttgtcggtgcgcgggcagggccgggagcgcgagctgaaactgcgcctgctgcgggtgtggacctgcagttccggcgaaagcggcgcgcagctgttgtcgatggcggtactggccgcatga

SEQ ID NO: 497787 - DNA, 1041 bp, Stenotrophomonas maltophilia
atgcatcgtacgctccttcccgcgctgctgggcctcgccctggccccggccacccacgccgccacgcccgaaccgaaggccggcgtgcagttccaacacaacgactggtcgctggcctgtgacaacaccggcacctgccgcgccgccggctacagtccggaacaacccggcaatctgctcaacctgatgctggaacgcgtgggcggcccgggtacgaaggtgctcgcgcggctgcgcaacggcgaggatggcgaaagcgcgacgccgaccggggcgctgcgcctgcgcctgaacggcaaggacctgggcccggtgcgcgacaccggcgacggagatcaagtactgctgcagcagggacagaccgatgcgctggtcgccgcgctgccgcgccacgcacgcatcgacatcatcgacggcaagggcaaggcgtggccgatctccgacagcggtgcagcggccgtactgctgaagatggacgaggcccagggccggctgggcacacccggtgcgctggtgcggcgtggcgacaagcccgaagcgagcgtgcctgcggcgttgccggtgccagtgatcatgcgcggcacgctgatggcaccgcgcgcctcggacgcggcactggcgaacgcaccgggcctgcgcaaggcactgatcgccagcctgccgaagccggatgagtgcggccgcctgagcgagggtgggacagacgagatcgagatccagcgactggacgcccagcatgtactggcaagcaccagctgcttcatgggtgcctacaacttcagcagcggctactgggtagtgcaggacaaggcgccgtaccaggcgaagttcgtgacctccaacgcggaggactttgatcgcgatgacgcgacgctgcgcgggcgcttccgtgggcgcggcatcggtgactgcttctccggccacgactgggcctgggatggtgcgcgattcgtgaagagcggcgagttcaccaccgggcagtgccgcggcgtggcgggagggcattggcagctgccgaccgtggtcagcacggtgaggtga

SEQ ID NO: 497788 - DNA, 987 bp, Stenotrophomonas maltophilia
atgttccagacccactggcacctgtggctgcagcagaccttcgacggcggctggatgctggcgctgatgcagttcatcagcctgctcggctacgaaatggcctacaccgcgctgatcctgctctgcgcgttcggcgcacgattgcgcgccggcctgtgcgtgatgctggcggtactgatgatggcctgcgccacccacgcgatcaagcagggtgccgccctgccccgcccatcggacgtggatgcacgcgtgctggacaaaggggtgccgtcgcatccgttcgtggtcgatggcggagggcacacgttctggtccctgcctgattcccgggccaccgcgatgctgcgcgcgcagcccgatgccgactatggcttcaacagtggccacgtcggcgtagccaccgccgccggcgtgggcctgctgctggcgttcggcatccgccgccgctggctgcgctgggcattggcgttcggttggccactgctgatggcggtgtcacggatgtacctgggccggcatttcctggccgacgtgctggccggctggctggtcggcatcggtgttgcgttgctggcgtggcagttgatgccaggcatgcgctcaaaccagcgttggcagctgccggtcctgccggggctgggcgtgctgatggcctgggcggcggtaaccacccgcttcgttccggtgggtgaagccggtcgactgctcgcactgggcctgctggtggcgtggctgcaatggcgtggctggccgaaggacccgcagggtatcgtgcagcggatattgcgcgtgttgggcgtggtgctgatctacctgctggcgcggccgttgatcgactggcttgccggaactgcggcgctgccggaggtaccggcgaccgagctgctgtggcagaccgtgggcacgctgttgatcctcggcggcggcgtggcgctgacgcggtggattccgcgccagcgccttccagcagtcgaagacgtgcggtag

SEQ ID NO: 497789 - DNA, 1203 bp, Stenotrophomonas maltophilia
atgacccgacgctacgacatcgacgccctgcgcgtgttcgccttcgccctgctgatcctctaccacaccgccatggcctacgtggacgactggggctttcacctcaagagcgtgcataccgccgaatggctgcagtggccgatgctgttcgtcaaccgctggcggatgtcgctgctgttcctgatctcgggtatcgccatcgcgctgatgcggccggaaggcaggttgctgcgcttcgccggcctgcgcacctggcggctgctgctgccgctgctgttcggcatgttcgtgatcgtgccgatccaaccctactgcgaaggcgtagccaacggccacgtggcacccggcttcggccacttcctgctgcgctattggcaggtgcggccgtggccggaagggagctttgccggttggcagtacggcatcacctggaaccatctgtggtacctggcgtatctctggaactacacgctggccctggcccttttgatgccgttgctgggaacggcggtggtgcgccgcgcggtggcgttctgcgcagcatcgccgatgctgctgatcggccttccgtccgccctgctgctggcctgggtgatctggctggagccgatctacccgtccaccaatgccctgctcagcgactggtaccagcacgcgaagtacgcaaccgtattcctggccggctacctgctgggtcgtgagccggtgttctggcagcgcgtggtcgccctgcgccgcaccacgctgtggctggcgcttgctgccgttggctggtatctggggttgcgcatcctcggccaggtgctgcccgccgactcaccgctgcggcaatggcccgaaccgttctgggacctgcagggccgggccagccagtcgctgtacgtctggaccgcgctgctgagcatcctcggctggggcaaagtcttcctcgaccgcccgttccgctggctgccgtactgcaccgaggcgatctatccctggtacatgctgcaccagagcctgatcatcgccctgctgttctggctcaagccgttgcaactgggtccttggctggagccgtcgctactgctgggcggcaccgtcggcggctgcatgctgatccacgaactgctgatccgacgctcccgctggctgcggcccctgttcggcctgaaggccgatccgctatcgtcaccggcggtacgcgccgccacggcgcgatga

SEQ ID NO: 497790 - DNA, 1140 bp, Stenotrophomonas maltophilia
atgcagggtgcgagcgttcgcagcagcagggtatcctcgcctgctgatgatccagcatggtcgagaaaccaggcggagtacgcgttgaacatcgtcattgttgacgaccagacgtccgcgcggacgatgctgcgtcacgtcatcgaagacatcgcgccggaactgagcgtgtatgacttcggtgatccgctgaccgcattggcctggtgcgaggcgcacccggtcgacctgctgctgctcgattaccgcatgccggagatggacgggctggagttcgcccgtcgattccggcgcctgcccaagcaccgcgatatcccggtgatcctgatcaccgtggtcggcgacgagccgatccgccaggcggcgctggaagcgggggtcatcgacttcctggtcaagccgatccgcccgcgcgaactgcgcgcgcgctgctacaacctgctgcagctgcgccagcagaccgagaacgtgaagcagcgggcgttgtcgctggagcagcgcctgctggccagcatgcacgaggtcgaggaacgcgaacgcgagaccctgtcgcgattggcgcgggcgatcgagttccgtgatgccggcaccagtgcctatctcgaacgcatggcgcgcgttgcggggctgatcgccgagcagcttggcctgcccgaagacgacgtgcgcctgatcgagatggcggcaccgctgcatgacatgggcaagatcgccattcccgacgcggtgctgctcaagcagggcaagctcaatgacgaggagctggcgatcatgcgccggcacccacgcatcggccacgagctgctcagtggcagccagaaccgtttcatccaggtgggcgcgctcatcgcgctgcgccatcacgagcgctatgacggcagcggctatcccgacggcctggtcggcgaagcgatcccgctggaagcgcggatcgttgctgtcgccgacgtcttcgatgcgctgatctcgccccgtccgtacaaggaagcatggaccatggaagccactctggcttatctgtacgcccagcgtgggcgactgttcgatccgcgttgcgtggatgcgctgatgcgcggccaccagcagttgatggatatctgcgcccagcactcgacggcatcgacgcgaccgggtgggtga

SEQ ID NO: 497791 - DNA, 1419 bp, Stenotrophomonas maltophilia
atgcaggacctgttcgcacgcgtgaggcgtcggctggcgcagcgtccggattcggaacatggccaggcgatcgtgcgggtggtgctgatctcgctgatcctggtctatgttctgttgtccggcgcccgcctgcaccggctggatcagtaccagggcgcgctggcaacggcgttgaccgggctgggcctgtcgctgctgttgttcggctggctgctgtggaagccgcagcgctcggacccgcggcgggtggccgggatgctggccgattacggcctgatcgcgatcggcatgatccagatgggtgagccgctggcgtgggtgtatgcggtggtgatgtgggtcacggtgggcaacggcctgcgcttcgggccgcgttacctgaccgctgtcatcgtgctggcgatgatcagtttcggcactaccgtgctgttgactccctattggcaggccaacctggggctggccatttccctgtggttggggttgctggcagtaccgttgtgctgctcctccctgctgcgccgaaggatgcgacatccaaccatggatacgattcccgccgctggatccgacaagcgctcgctgttggcccgcttcaagcagcgcctgtccgggcgcgaggacagcgagcacgcgcagaacctgatccgcatcatcatcacggcactgttcatcagctatctcggctggcgctcgctgagcggcggcggtgaggcgctgacggcgacgtggctgatcctcgccttcgagctgaccatttccgccggcctgctgaccgcgatcctggtcaatccgggcgtgtcgcatgtgcgccgggtgatcggcatgctgaccgattacacctgcatggcctggatcatgaccatccagggcgagccggccgcaccgctgtatgcggtgatgctgtgggtgacgatcggcaacggcatgcgctacggcagcacctacctgcgcgtggccacggccatgggctgcctggccttcctgtgcacggtgatgctgtcgccgtactggcgcggccacgattatctgggctggggcctgttgctgggcctgggtgcgattccgctgtacttcgattcgctgctgcatgccttgacccgggcggtggccgaggcgcgccaggccaacgaagccaagagccgcttcctggccaacatgagccatgagttccgcacgccgttgaacgggctggccggcatgaccgaagtgctggccaccacccgcctggacgacgaacagcgcgagtgcctgaacaccatccaggcctcgacccgcagcctgctggcgctggtggaagaggtgctggacatctccgcgatcgaagctggcaaggtgcgcgtggagtggcacgagttcgcgctggccgacgtgctgcaggcgatcaacctgatcctgaccccgcagacccgctcctaa

SEQ ID NO: 497792 - DNA, 1290 bp, Stenotrophomonas maltophilia
gtgcaggtggacgacaacgtgccgccgcgcctgctcggggatgccgggcatctgcagcagatcctgctgaacctgatgggcaacgcggtcaagttcaccgacagtggctacgtgcacctgcgcgtgtccagccccgatgcgctgggcagcgagcggatgcgcctgcgattcgagatcgtcgataccggcatcggcgtgccggtggcgttgcgcggacgcctgttcaatgcgttcgagcagggcgatgtcggcctggcccgtcgccatgaaggcaccggtctgggcaccgccattgccaagggcctggtcgagtcgatgggcgggcaggtcggctatgcgccgaacagcccgcgcggcagcgtgttctgggtcgagatcacgctggacgtcgcagacacctcatcagccccggcggttccgtccgaggtggctgaagccggcaatgtcatcgcgttttccaatcccttcctgcgccatcgcgcacgggtgcggagcctgcgggttctggtcgccgacgaccacgaggccaaccgcatggtgctgcagcggctgctggagaaggccggccacaaggtcacctgcgtcaacggcggcgccgaagtgctcgatgcgttggagcaggccagttacgacgcagcgatcgtcgacctgcacatgcccggcatgagcggactggatctgctcaagcagttgcgggtgatgcaggccagcggcatgccttacgttccggtcatggtgctgagcgcagacgtcacccccgagtccatcctgcgttgcgagcaggccggcgcccgcgccttccttgccaagcccgtggtggccacccgcctgctggaagtgctggccgatgtcgccgccaacacccgcgccgagcccggcatccagtcggtgcctgcattgccggtcggcgatggcgtgctcgataccgcggtgctggacgagctggcgtcgctgggcatgggcgatggcttcgaacgcaagttcatcgaccagtgcctggcggacgtcgacgcgagcatgggccagctccagggctgcggcgagcgccaggcctgggaggatttccgcgagcacgcccacgcgctgcgcggcgtggcaagcaacctggggcttgtccaggttgccgcctccagtggcgaaatcatgcgcatggcggactggcagctgaagggtgaatggagctcccgcctcggcaacctggcgaccgctctgcgcaacggcaggaatgcgttggctgcccgaagtgcgggggcaccgcaccgcgacgacagcgagcgcagcccgtcctga

SEQ ID NO: 497793 - DNA, 870 bp, Stenotrophomonas maltophilia
atgtctgcagtacgccccatcattacccgcccctcgcagcaccctaccctgcgtatcaccgaagaacccgagcgggatgtttactggatccatatgcacgccaacctggtcaaccagccaggccggccgtgcttcgcctcgcgcctggtcgatgacatcgtcgactaccagcgcgaactgggcgatcgcctcagcgcctcgcacgctctgtcaccccatgtcgtacttgcctcggacagcgacgtgttcaacctgggcggcgatctcgaactgttctgccgcctgatccgcgaaggcgaccgtgcccgcctgctcgactatgcccagcgctgcgtgcgcggcgtgcatgccttccatgctggcctgggcacccgtgcccacagcatcgccctggtccagggaaacgcactggggggcggcttcgaggccgcactgagctgccacaccatcgtcgccgaggaaggcgtgttgatgggcctgccggaggtgctgttcgacctgttccccggcatgggtgcctactccttcctgtgccagcggatcagtccgcggctggcggagaagatcatgctggaaggcaacctctacaccgccagccagctgaaggaaatgggcctggtcgacatcgtggtgccggtgggcgaaggtgttgccgcagtcgaacaggtgatcaaggaaagccgacgcatcccacacgcctgggcggcgatgcgtgaggtcaacgagatcgccaccatggtgccgctgcatgaaatgatgcggatcaccgagatctgggtagacactgcgatgcagctcggcgagaagtccctgcgcaccatggatcggctggtacgggcgcaggcccggcgcaatggcgacccggcctga

SEQ ID NO: 497794 - DNA, 2754 bp, Stenotrophomonas maltophilia
atgagcgattcgttctccacccgcagccagctgaacgtcggcggcaagacctacgactacttcagcctgcccacgctgggccagcgcttcgatatctcccacctgccctactcgatgaagatcctgctggagaatctgctccggcacgaggacggcggcatcaccgtcggcaaggaccacatcgaagccgtggcccgctggaatccggcggccgaaccggataccgagatcgccttcatgccggcgcgcgtggtcctgcaggatttcaccggcgtgccctgcgtggtcgacctggccgcgatgcgcgatgcggtggtcaagctcggcggctcgccggagcagatcaacccgcagattccctccgaactggtcatcgaccactcggtgcaggtcgatgtgttcggcaagccggacgcactggacctcaacggcaagatcgaattccagcgcaaccaggaacgctacggcttcctgcgctggggccagaaggccttcgacaacttcaaggtggtgccgccgaacaccggcatcgtccaccaggtgaacctggagaacctcgcccgcgtggtgatgaccgcggacaaggatggcaaggccgtggcctaccccgataccgtgttcggtaccgacagccacaccacgatgatcaacggcatcggcgtgctgggctggggcgttggcggcatcgaagcggaggccgccatgctcggccagccatcgtcgatgctgatcccgcaggtggtcggcttcaagctgaccggcaagctgcccgagggtgccaccgccaccgacctggtgctgaccgtcacccagatgctgcgcaagctgggcgtcgtcggcaagttcgtcgagttctacggtgacggcctgcagcacctgccgctggccgaccgcgccaccatcggcaacatggccccggaatacggcgccacctgtggcatcttcccgatcgacgccgagtcgctgaactacctgcgcctgtccggccgcagcgaagagcagatcaacctggtcgaggcctacgccaaggcgcagggcctgtggcacgagccgggcagcccgcacgcccagtacagcaccacgctggaactggacatgggcacggtgaagccgtcgctggccggcccgaagcgcccgcaggaccgcgtgcttctggaagacgtgcagaagaactaccgtgaagccctggtcggcatgaccgccaaccgtgacaagcgcagcgacgacgtctcctcgttcgtcaacgaaggcggcggcgccgcggtcggcaacgagcagctggccaagggcttcgccgacatcgagatcgaaggccgcaaggtccgcctgaaggacggcgcggtggtcatcgctgccatcacttcgtgtaccaatacctccaacccggcggtgatgatcggcgccggcctgctggcccgcaatgcggccgccaagggcctgaaccgccagccgtgggtgaagacctcgctcgggccgggctcgcgtgtcgtcaccgactacctggaaaaggccggtgtgctgaaggagctggaaaagatcggcttctacgtggtcggctacggctgcaccacctgcatcggcaactccggcccgctgccgaccgaagtcagcgccggcatcgccaccggcgacctggtggtcacctcggtgctgtcgggcaatcgcaacttcgagggccgcgtgcaccccgaagtgaagatgaactacctggtcagcccgccgctggtggtggcctacgccatcgccggcaccaccgacatcgacctgaccacccagccgctgggtaccggcagcgatggccagccggtgttcctgcgcgacatctggccgagcaacaaggaaatcggcgacgtcatcgccgccaccatcgggccggagatgttcaagcagaactacgccgacgtgttcaagggtgatacccgctggaacaccatcgcctcgccggacggcaacctgtacgcgtggagcgatgcctccacctacatcaagaacccgccctacttcgatggcatgaccatgcagaccggcagcatcgacgacgtgcatggtgcgcgcgtgatgggcctgttcggcgattcgatcaccaccgaccacatctccccggccggcaacatcaagaaggactcgcccgcgggccgcttcctgcaggaacgtggcgtgcagccggccgacttcaacagctacggcagccgccgcggcaatgatgacgtgatggtgcgcggcaccttcgccaacatccgcatcaagaacctgatgttcggtggcgaggaaggcggcaacaccctgtactacccggccggtggcggccagccggaaaagctggcgatctacgatgcggccatgaagtacaaggccgacaaggtgccgctggtggtgctggccggcaaggaatacggtaccggctcgtcgcgtgactgggctgcaaagggcaccctgctgttgggggtgaaggcggtcatcgccgagagcttcgagcgcatccaccgctccaacctggtcggcatgggcgtgctgccgctgcagttccgcaatggcgagaacgcgcagagcctgggcctggacggctcggaagtgatcgacatcaccggcctgcaggacggtgccagcaagcgcgccacggtcaccgcgaccaaggccgacggcaccaagaagagcttcgaggtttcggtgatgctgctgaccccgaaggaagtcgagtacttccgtcatggcggcctgctgcagtacgtgctgcgccagttggccagcaagtaa

SEQ ID NO: 497795 - DNA, 372 bp, Stenotrophomonas maltophilia
atgcgcgccttgacccttgccctgatgctggctgccccgctggccctttcgacgacggcagcccacgccaatccgttcggcgcctacaccaccggcgtcgagatcacccaacagcagatggacaccctggaagtcggcaagaccagccaggaccaggtccgtgagaagttcggcgcacccggccgccgcgaacagctgggcgacacgcaggtctggtactacgactacgtgaagatcaagaccttcggcaagaacatccaggaagcgaccgtcctggaattcaacaagcagggtgtgctgacggccaagtccaagagcaacgctgttggcaagaccggcaatccgctgctggatgccgccaacggcaagtaa

SEQ ID NO: 497796 - DNA, 945 bp, Stenotrophomonas maltophilia
gtggcattacgcccaacctgcctcaccgccgcgatcgcggccaccctgctgctggcgccgtcggcctacgccaacgacgaagcacccacacccacgcctgccgtggattccgcagtcaccagcgggtcaacgctcgatccagcaacgggtgcggcgaccgcgccagacgcggcgcacgcccccaccgcggccgatccgggcatcgggaatgtcacagccgccgtggcacctcctgttgactacagcagcctgcagcacatcaaggtcacttccggactgggtgcaggccccaacggcaatcgcgtgggcgatcacgtgctgcgcctggtgatgcgtgccgacaccgctgccgtcaccgcggccaaggtcggcctgtctgctctggcgttcgtcactggcgtgggtgacatcggcaccagcaacagcttcagcaagaacaacgtccgtggcgaggacatcaactctgtgcccagcccggccttcggcgcattgcccggcatgatccgcgagcagctggcactctatttcgcggcccaccccggcgccattcccagcgacgagcgcaccgtggaagccagcgccggccagtggtcgctggtgtaccagaagctcagcgatgcagagaccccctacgagctgcgccacgatgtaaccatcggcttcccggtggtgcgcaagctgttccgcagcgccagtggcggccagggcgtgcactgccgggacgaagcacggattgccccgctgcaggaatggcaggcggacgactatgcgaaggccaaggcggcgtcgcgtgagttcgccgaggcctgcatcgcgcgtttcgtggctgagctgccccgcctgttccccgaccatggcgctctgccgcagcctgcggtggaagccgagcttccggcggaaacgccggccgtgaccgaggaagcggcggccgttacccaggcctga

SEQ ID NO: 497797 - DNA, 1587 bp, Stenotrophomonas maltophilia
atggccctgcgtctcttccgttaccaaccgtcactgctggcggccgctctgctggctccgctggcagctaccgctgccggcgtgccggcaccgccgcaggccaccccgggccttcccgccgcccccgtcgcgaagggcaccgcctggaccgatcgcgtccacatccagagtggtccggataccgcatcgaagcgcctccacgcacccgacgtggcgttgcgcatcgtcacccccgatgacagcgagtcgctcacgccaaagggcctcgcactgctcttcagcggcaatgagccggactacttccggcgcaacaccctgcccggcagcatcgtcgagagccaggccagccccgccaccacgctgatgcccaacgtagccagggcgctggtgggtggctacttcagctatgcgcctgacgcgctgcccaaccagagcagcaccctgcgtttcagtgcagacacctgggcgctggtgcaccagggcaacacgcggaaggatcccctttaccgcctcaaccacgtcagcaccatcgagcaacgccgtgccgatggcaccctggctgaaatcatcagatgcagtgacagcgacgaccgggcgaccctgggcgagtggcaggccaatgactacgccaggctcaagattgccgcccaggtgatcacgatgaagtgcaccgagcagctcatcaagcgaattccggcgatgtaccctcgcccgcttgctgctgaagatctcacggcctacgcaggcggtgccgtgccgccggcacgggtgcgcatctatgccagcctggggcggaccaccaccctgtacaccgacgccgcctgccgcgaggactaccgcgacaggatcgacgtcaagtacaacaacgccggtgacaagggcgtgctcggcatccccgccacggaaaccctgcgcagcaaggagaacgagcggttctccatgctcagctaccaggagtacgaagtcgccggcggcaagccgctgatcgtcgaagcgcgcttcgacgcatcaagccgcatgtactgcgacgggcagttgtcgggtcagttcgtggccaggcccggacaggactacgaagtggaaatggaagtggccgacaagatgtgccgcctgcatctgcgccaggtacacgccgatggcagcacgacgccacaggtcgcacgcaagacccccagctcctgtgagggcacgcgtgcgccggtgcgcattgaaccgcggcaggacatgcaggtcctgctgttcagcccaggccagctgcagatccaggatgcccgtcagggcagcgcaccggaacggttgaccgacgacgcgggcagcaccgaggcactgcggaagatgctgcagcaggccagcagcaatcccggcacacgcctgtgcgtggtggtaccggctaccgattacagcagcgcccttcacgatgccgtgcgcgaacgcgtactggacgcaccgcaggtattgcccagcctgtgggaagaggcggccacggtgaacagtcgccgcagtgccgccgccgatgctccggtcgacatcgccgctgcgatcgcccattgcaatgcgttcccgatcagggagttcgcgccgcgctga

SEQ ID NO: 497798 - DNA, 300 bp, Stenotrophomonas maltophilia
atgaacaacgtgatgggaatcgccctcggcgggatgcgtgcggcccagcagggcgtgcaggtggccgcgcacaacgtggccaacctggcgactcctgatgcccaacgcctgcagctgcaacgcagtacggtggagcagggcggggtgcaggccgcggtgacccctaccggcgccgatgtcagtgcaccactgggtgatctgctggcagcgaaagccgaggtggtggctttcgcttccaacgccgcggtgatccgacgccaggaccagatgctgggctcgctgctggatcgcgaggcctga

SEQ ID NO: 497799 - DNA, 630 bp, Stenotrophomonas maltophilia
atgtgcaatgccgcgccagcgcgtgcggcctcgccaaggggtatggctgattgtcccgaaatcaaggggttggtcggcagggcttgcagccctgcacctgcagaggccgatgcaacagcaacagcaacatcaacagcagcagcagcagcagcagcagcgggctatccgtgggatggcggggcggtgtgggttggcaggacacgccgtgaacccatccatgggggctcgatggcgccatccatggcgccaacggtcctgccaacccacaccgccccgcctctgacaggttcacgcggctgttggcaggtgtcgaccttggtcgacacatctgtcagatatcgatacatcaaatggggtcagatccgttttccgcaggaaaacggatctgaccccaagagacgttccggcagatcgcaggaaactgtcgaaggcggggtggggcaggttgtgggggtgtccgcggcatggatgccgcggccaagcccccatggacgggtttacggcgtcccccacaacctgccccaccccgcctacccacaggaaaccagcttttgccgttgctctggctgttgcttcggcctctgcgggttccgggcgccgcccggacgactacaatcccgctcatgctga

SEQ ID NO: 497800 - DNA, 2583 bp, Stenotrophomonas maltophilia
gtgcatatcaagactccgttggccgttgccatcaccctgaccctggcgatgggggctgctgcaccactgcaggccgccgggcagcaggcggttgccgccaccggtgcagtggccgccgatgcggtcgacctggaccgcattgaagtgcgcgcccagcttgaatcgcagatccgcgcggtggacctcaagcgcagcagcaacgccatcgaggatgcggtgtcgtccgacgcgctgggccagtacccggacaagaacgtggccgagtcgctgcaacgcctgccgggcatcagcgtgacgcgcgaccagggcgagggccgctacgtggtcgtgcgcggactggatgccaacctcaacagcgtcagcgtcgacggcatcgccatcggcacaccggacaactccagccgcgccgcaccgatggacgtgatcccgtccgattcgaccgagcgcctgcgcgtggtcaaatcaccgaccccggacatgccgggcgacgccattggcggcgcgatcctggtcgagaccgcctcggcgttcgaccgcgagggccgcagcctgcgtggcaagatcgaaggcagccaccagcagctttcgggcgagaccagcccgaaggccgctttcaactacagcgaagtgttcaacgacaccttcggcatcgccgccggcgtgaactaccagaagcggacgttcgaatcggacaacagcgaagtggagtacggtgatgtcagcgggaacaaggatccgaccaccacccgcccgggcgaaatcaccgcgctgaacctgcagaaccgcaagtacgagatcgagcgcaagcgcatcggcgccaacctcaatttcgactggcgcccgaacgaggacagccgttactacctgcgcacgctgtacagccagttcgacgatgccgaaacccgccagcgcgtgatcttcaacttcaacagcgccgacatgatcgccaccggcaccgaccagtatcgacttgccggcatgccgaaggattcgatcgacaagcgcatgcgctaccggaccaaggaagagaacaccttcgccgccagcctgggtggcgagaacaagctgaccgacgcggtactggactacaagatcggctatacccgcaccgaagaacgcgtggacgacgagatcgaatcgcgcttcaagctcaacggcaaggccttcaatggcacgctggaccagcgcagtcgcctgcccgcctacaccttcgacaacgaccagtggctggacaacgccaactacaagttcgaccgtgtggtggccaagccgaagaaggtggacgacgaggagcgcagcgcgcaggtcaatatccgcttcgacggcgacaacagcagctacaagttcggcctgctcgggcgctggcgcgaccgtgacgtgaatgtcgatgaggcgtcgctgcgcgtgggtccggcgatcaagctcagtgactggacgaccggctcgccggaacatcgccacggcccgatggggcagggcatggactcatcggcgatgcgcagctactggtcgcagcacggtggcgaatacagcgcgcgtccgcaggatgtcggtggcaacgccgcgacgtctctggaaggcgactacaccgcgcgcgaagacgtgttcgccagctatgcgatgggcacctgggacatcggtgcgctgcgcgtgatcggcggcgtgcgtgtggagaacacccgcttcagcgccacaggcaatcgcgtggacgtggccaaggacgggcgctcctacaccgcgacccgggtcaccgccagcaagagctacaacaacgtactgccgggcctgcacctgcgttacgacgccagcgacgactgggtgttccgcttcgccgccaacaagacggtggcgcgcccgggcttcggcgatgcctcgccgcgcatcggcctggcccgcaacgacaatgaagtgcgcctgggcaacccggagctggatccgtacgagtcgaccaacatcgacctgtcggtggagaagtacatcggcgaaagcggcatcctctcgctgggcgtgttccacaagtcgatcgacggctacatcgtgcaggtccgccaggccggcgccgacggcatctacgacggcctgccggtggtgacctcggtcaatggcgacaaggccaaggtgcgtggcgccgagttcaactggcagcagcagctgtcgttcctcccggctggctgggatggcctgctggtgggtgccagcggcacctggctggacactgatttcgacccgggcctggccaagcgcgccggtgaggacttcaccctgccgcgcgcctcgaagaacgtgtacagcgcgcacatcggctatgagaagtacggcctgagcacccgcgtggcagccgtacaccgcagcgagtacctggatacccttggtgccggccgtgccttcgacatctacgtagcgccgaacacccagctcgacttctcgcttgactacaggttcactccgcgcgtgagcatgtatttcgaggcacagaacctgctggacaagccgctggaactgtaccagggcacgcgctcgcgcaccctgcagatggaagaatatggccgcacctacgcactgggcctgaaggtggcactgtga

SEQ ID NO: 497801 - DNA, 585 bp, Stenotrophomonas maltophilia
atggatgatctgcacgcctcattcgcccgcttcgggccgctgcatgcgcagcacgagcgtgactggcagggcccgttcccgctgcccacggcactggcgtcgttctacgcgcaggtcgggccgctgggcgaagagatcaatgccagggttggccgcgccggcatcaccgttcccggccttgatgtctggataccgccactgcagcgcctgtggagccagcaggccggctatcgatggcatggcgtcagcggcgaacggatcaacgactggccatcgaactggctggtgattgccgatcgcggcgctgatccgttcatcctcgacctggacgacggccgtgtgctgttcagccatcacggcgccggcctgctggatgccggcgagatcactgccgatgtgccaaccttgatggcggctctggctgctgcaggcacggtgtacctcgatgccggcgatgacctctacaacgacgatgacgatggcggcatccgtcctgaacaccaggaggcagccgtacaggcggtggcccgggtactgggcgaccgcctgcaggccgagtcgttcatcgagacgttgctggactga

SEQ ID NO: 497802 - DNA, 264 bp, Stenotrophomonas maltophilia
atgagcgacgacaaacgtgatacccagcgcatgctgtttggtgatccgggaccgcctggcgcagggctgtcggtagcggtcgtagtgctgatggtgttggctaccatggcggctgcgatcggcttcatgcgcctgccggaccagatgctggggctgggcctgatcggcatctccgtgtttctggcggtcggtgcccgcatctgccaggcacgcaaccagcatcaggcgctgtaccggctgatgtcgcgacagccgccgccgtag

SEQ ID NO: 497803 - DNA, 243 bp, Stenotrophomonas maltophilia
atgaaactgcacctggcctcgatggccgcactgatgtttgccgtgggagctctctccacgccgtcccaggccaccgccggcggtggtggcggtggtccggagaacacgaactgcgtccgggtcaagatggggccctattaccatcaacgttgcgaagtgacgtacttcgacgaggacggcactccctacatccgggtgtactggattgaccagaatggccagtggtacctgcctgccgactga

SEQ ID NO: 497804 - DNA, 234 bp, Stenotrophomonas maltophilia
atgaaactgcaactggccgcgatggccgcgttggtggtggcaactgcaaccctggctccggtggcggacgccaacacaggggtcccgagagagaatgtttcctgtgtgccagtgaatgtggatcgcaaccgcgtccaccaccactgcacggaaacctacaccgatgaattcggcaacgtctacaccgccgaatactggattgacgagtacggcaacccttacctgcgcgactga

SEQ ID NO: 497805 - DNA, 705 bp, Stenotrophomonas maltophilia
atgagcgaactggtgcaggcgttgctggaactggaacgcgcccgctcactgagtgcggtgggcgccgtactacgcagcatttctgcaccgctcggctacgaccgcgtgctggtgttcgccaccggcacggggttggagcgcggtacacagcgcgtgtactggatcgagggcgactggttcggcgacggcggcagtaccgacctcgcgcgctacctgcacgcctgcccggtcaatcggcacgtactggacagtgacgcgccgttcttctggagcaagcgccagggtgttcgcggcgaacgctatcaggtggtgaagcagccacgtggtgaaggcctgcacggtctgcaggtgccggtgttcggcaccaccggtctggaaggcgcgatcagttttgccgggacagcgatcgatgcatcggccagcgcgcgcctgcagctggaagctgctgcagctgcagcattccgtgccgctcgccatctggccgaatcgcctgccgagctttcgggaagcgcactgagcaaccgcgagcgcgaagtgctgcgctgggtcgccgctggccgtcgccaagctgagatcgcggccacgcttgggctttccacgcgcaccgtggagaaccacctgcgccacgcgcggcaacggctgggtgtggcaaccaccgcgcaggcagtgcgtgctgccaatcgacgcggcgagatcgaggactga

SEQ ID NO: 497806 - DNA, 2022 bp, Stenotrophomonas maltophilia
atggcaaccacgggcttgggcttcatcggccgcacgaccctcatcatcactgtgctgctcaccctgggcggctgcgccacgttgcgccagttcgggccgtcggtgcaggtggcctcggtcacgcccggccagtacatcgcgctcaagcgcggtgacatcctcacttccggcaagctcagcgcggcgaccacggagaccttgcgggtggccggcctcgatgaaggcgtatgcgccaaaccgggcctgccctgcatcgaggcgatggaaagcagcatcgtggtgcgcgaggaggacaaacgctccagcctggccgagttgtggctgcagtatgcgatgaccctgccggcgccgaagcgtgagtactcggcatccggccgcgccaagagcgcgatcaccgagctggatgccgatttccaaccgcgcctggatgcgtggatgcaggtcgcgcgccaggcctatgcctatctgttcttcaccgagcgcactgccaaccagcgcggcttcgaagatcgccagacccaggtgcgcgactactacaacctggccgtgcaggaagcctcggtacagctgtacgacgcctatgccacgggccgcgtgcacggccaggccagccacttccagctgggccgctggaccttcgtactggccccttcaggcgaagcatcaccgctggatacgcgtacccctaccgaactggtaccggcggcctcgctgtcgttcactggcacgctgcgcagcgtgcatcgccgcgatggcttcggtgccgaactggtggcggtgatgaacgatccggctggcagcatggccaccccgccttcggcagcgacgcccgccgcgcaggcaagcacatcggccgcgcaaagctggagcgagatgccctccccttcaatgacggtgctgctgcgcttctcgggaaagaacctgtgggaagtgctgcacgacgacgagcctgagctggagatccacgatccctaccaggtcacggaagtcaccctgcatggccaacaggttccgctggccgcgaacttcaccgccggctatgcgttgtggctggcccgttccaacttcagccaccagtcgctgcgctcgctgttcggtggcaagggcggcatcgacacgccgcacctgtacatgatgcagccctacgatccgaaccgccgcgtgctgctgatgatccatggcctggccagcagcccggaagcctgggtgaacgtcgccaacgaactgatgcgcgacgacgagatccgccaggacttccaggtctggcagttctactacccgaccaacatgcccatcgcgatgagccacgatgcgatgcgtcatacactgtccgaagtgctcaagcatttcgaccccagcggcaaggcgcaggcttcgcatgacatggtgctggtcgggcacagcatgggtggcgtgatcgcgcggctgatgatctcctcttccggcgatcatctggtcgacaccctgctggagactgcgcagatgacgccggcacagcgtgaactgctgcgtaccaagggcgcaccggtgctgactttcctgccggaaccggaagtatcgcgcgtggtattcatcgccacgccacaccgcggcaccgacgtggcgggcacccgcctgggccgctggatcggtcgcctggtgcggttgccgctgaccgtgctggaagacgtcgccaccatcgccaacgacggccagatcgaccgcaatgatggcaagcacggttaccagatgaacagcatccagaatctggacaaggacgatcccttcgtccgcgcggtggccgacctgccgatgtcgccgaaggtgcactaccactcgatcatcgcgcgcgccaaggccgatgggccgctggaaaaaaccgacgacgggctggtgccctactggagctcgcacctgccgcacgcggattcggagaaggtaatcgtatccgggcacagcgtgcaggaagccacgccggccatcgtcgaactgcggcggatcctgcatgaagacatgcagcagcattcgcccatggtgaagtag

SEQ ID NO: 497807 - DNA, 462 bp, Stenotrophomonas maltophilia
atgacgtggcttgagacccggatcccgccgccgctggtgatgctgctgtgcgcggggatcggctggcttgggagccgactgtggccggaggcggtcttgccactgccgatgcgggcgctgatgtcaggcggggtgattgggatcggtgtggcgctgaacctgctgccgaagcttgcgttccagcgggcgcgcaccacggtcaatccgctgcgcccttcggcatcaagcgcgctggtcacgcgcggcatgtaccgttacacgcgcaatccgatgtatctaggccaggcaacgatcctcactggcgcaatgttgtacctgcagaacacgatcgcgttgctggctgtgccgttgttcgtgctctacatcacctggttgcagatcatgccggaagagcgggcgttgctggcccgcttccccgacgtgtatccgatgttccgccaacgtgtgcggcgttggctgtag

SEQ ID NO: 497808 - DNA, 798 bp, Stenotrophomonas maltophilia
atggcctatcgcaaaaaggacattgccggcgatgtcgacccggctgcgccgtggcgtgatgtgccactgcatcgtccggtcacctaccgggttacccagtacccggcaggcacccatatcgcaggccacaagcaccagcgccaccagctggtctatgccatctcggggctgatggtggtgcgctcggaagtcggtcgctgggtcgtgccctccacccgtgcgatctggatgccggcgggcatggtgcacgcggtggactgcattgccgccgtgcacatgcgcagcctgtacatcgatccgtcgttcgccccgcagttgccggccgaaccgttcgcggtacaggtggcaccgctgctgcgcgaactgctgcaggcagccaccctgatcaagggcgagcacatcgaagacagccgcgatggccgcgtggtacgcctgctgctggacgaactgcatcgcatggacgtgctcccgctgcacctgccctcgcccaccgacccgcgcctgcagcggatctgccagcacatccagaagcaccccggcgacgacgccacgctgcaggactgggcacaggcgctggaagtggacgtgaaaaccatccagcgccacttcgcccacgagctgggcatgaccttcggccagtggcgacagcaggcgcgactgctggccgcattggagcggctggcggtcggcgacaaggtcatcgatgtcgcgctggcgatgggctacgacagccccagcgcgttcaccagcatgttcaagcgccagctggcgcagacgccggcggcgtttttccgctga

SEQ ID NO: 497809 - DNA, 612 bp, Stenotrophomonas maltophilia
atgaacttcttgcacaactcggccatcgtgggcgccttgcgcgcctcggccttggcgccgccggggtcgccgccccggcgaacctcggccagccagtcctgcgccatgacgcgggcctgctccacggtcagttccccgaacaggcccagcgagggcttgcggggctggccggagttcgtgcggtactggagcatgaacacccggcggcccgtcggggtaatcttgcacaggaagccaggcaccacggtatcccgcagttcaatatccttggcctggggctgggccgcctccacggcggtcttggtgagcttgatctttgccatgatgactccttggaacgacccggattccaagagccagataggagcggcgcgagggaaaaccgggtcaagtttcagaaagcaccggcatatgatggacgcgcgtaagctattgataaacctgctgtatcgagctacggcgcagtccagcgaagtaccgggctggagtcatcgtcaaacaaaaaaccccgcttgcgcggggttctctgtgtgctgcgtgcagcaggcgtttacgggcgacgggccagggcctcgacgtccttcgccttcggcagcaggtcctgcttgctga

SEQ ID NO: 497810 - DNA, 609 bp, Stenotrophomonas maltophilia
atgctctatcttgcttcccgctccccccgacgcaaccagttgctggcccgactcggacgccccttccaggccctggacctggaggtcgtcgagcagcgcgcgcccgctgaaagcgccgaacagtatgtgtgccgggtcgccgccgacaaggcgcgcgccggcctggcccgggtgctggccgatgatccgcaggcgcgggtgcttggctcggacaccgaagtggtgctggacggcgaggtcttcggcaagccggccgacgccgccggcgcacgcgcgatgctggcgcgcctggccgggcgcacccaccaggtgatgactgcggtggtggtggtcggcgccgacgggctggacagcgaactggtcatttccgaagtgaccttcgccccgatcgccgccgccgacatcgccgcctatgtcgccaccggcgagccgttggacaaggccggggcctacgccatccagggcggggccgagcgctggatcgaacatctttccggcagctactccggcgtcatggggctgccattgctgcataccgatcgtctgctggcgcgctgtggcgtgctggcccccactgccgatgccgccagggaggctgccgatgtctga

SEQ ID NO: 497811 - DNA, 1656 bp, Stenotrophomonas maltophilia
gtgaccttcgtccgctcgctgttgtttgccatgcgcttccagggcgccctgctctgtgccctgcttctgctgccggccatcgccgccgcgcaggactggaactaccgggtccgccccggcgacaccctgtgggatctgggtggcgtgtatctgaaaccctcggtgcgctggcaacagctccagcagcacaaccgaatcgacaatccctaccggctgccgcccggccagctgctgcgtttccccatcagctggctgcgcatcgaaccggcaccggcgcgggtgctctcggtccgcggcaaggtcgaactgtccagtggagacggcagcgccagccgcgccatccaggccggcgagcagctgcatatcggagacaccgtacagaccgagggcgaatccagcgtcacgctggaatttgccgatgcgtcgcgcctgcagctgcgtgagtactcgcgcctgcgcctggaccagctcagccgctatggccacaccggcatggtcgacacccgcctgcgcctgcagcagggccgcgccagcaatcgggtgacgcccgcgcgcggcccggcatcgcgctacatcatcgatgcgcccaccgccaccagcagcgtgcgcggcaccgtcttccgggtcagtgccggcgacggtcgtgatgtcgcggccaccgaggtcctgcagggcaaggtgcaggtcggcaacgcccatggccagcgcatggtccagcccggacaggccacccgcagcgccagcgcagacgccgctccggacacagtctccgtactgctgccggcaccgcagctgcgcaacgatgaactgcgcctggccccgttgccgacgctgctggcatggactccggtcgccggcgccgcgcattaccgcgttgaagtggtggaggcagccacgccggagatcctgctgttcgctgccaccacccccgatacccgcctggccatcggcgatctgccgccgggccagctgcgcatcctgctgcgcgcggtcgatgcgcagggtgtggaaggcatcgacgccagtgccgacttcgaactcagcgaccagcctccaccgccgctgaccctggccccgctgcatggacagacaatcaacagcgaccgcccgcgtttccgctggagccaagcccccggtgcgcgcagcagcgtgctgcagatcgcggctgattccaccttcctacagccactgcaggaacagaccagcaccggcaccgacctgcgcctggcgcagccattgccgccgggtcactacttctggcggatcgcctcccgcagcgccaatgggcaccaggggcgctatggccaggccctgccactgcaactgagcaacgagccggtggatcctgcgctgcaaccgcccgaggccgcgcacggtgagctgaccctgcgttggcaggccggcagcgaaggccagcgctatcgcgtgcaggtcgaccgccgcggcgacttcaaggcacccctggtcgacgaaaccgtggccgaaccgcaggtcagcttcaagcgtccgtggcgcggcaccctgcatgtgcgcgtgcagtacatcgacgatgacggccatgctggcgagttctcgcctgcccagaagatcgccctgccgtgtcgcctctgctatggcaccggcggcggtgccctgctgctgtggctgctgttgtga

SEQ ID NO: 497812 - DNA, 1317 bp, Stenotrophomonas maltophilia
gtgttgaagattctgcgcggactgggctggaccctggcgggcctgctgctgttgaccatcgtggtgtggtgcgcctcacgcatgtggccggtgccggaatcgcggttgcaggcgcagcaacgactggaagcgcggctgccggcgagcgggcgcaacggttatgccctgttgtggacgctgccgttcgacgatctggatgcccgccagcgcgagcaggcgttggccgaggacgtgcgccgttgggaggccgacctgctgggcagcagcggcggccagacacacctggtggccaaccatgccgagctgcgctcgcggcccggtgccagttgcgggccggccgcccgcggctgcctcgcccaggtccgcgcggacccgcaacgcttcgtggaggcccatgccgggcaccagcagttgcacgcgcggctggatcagctcgccgaagcagactacttcgtatcgccgttccagccgaagggcgagggcatcctggtgccgatgccgacctacgggctggtggtcgatgccaccagcgcacgcgcgctggcgttcgtacagggtgacatcgacggtgccctgcgcggcagctgccggggagtgcggctgggccggcggctggtgcccggtggcagctatctggtcgaaagcatcatcggcgccagcctggtacaggccaacgcgcagctgctggccgacatgctggtcgaactgcctgccgatcacccgctgccggccgaatgcgaacaggccatgcagccgatgcgggccgacgagcagagcctgtgccgtgcgatgcagggcgagtatgcgatgaaccgggtggcgatcgagacctcggcgcgggaattcggcggcgcgctggtactggaccgcagcagcaccctggcccgtgcggccggcaatctcggttgggcctgtggcgcgacggcgaccgctgcgctggaggcggaccgtccgttgccggcaccggcgccgccgcagcgtgactttggttgcctgtcgaacgtcatgggttgcctgttgaccgacattgccggtccggtctatccggcctattcgtcgcgcacccaggacgccgcggcgatgctgcgcctgctgggtgcacagcgctggctgcggcagcagccgggggatccggtggatgccctgcagcggttgccggcacagttcgcctcgccggtgcgggcgccgcaggtgtctgcggatggccgccatctgcaggtgccgcgccgctcgccgtcccgcagcaacgacgaaagcccgtggctgtcggtgccgctgcaggcggagccagcttcgactgcgttggcgcgcgattga

SEQ ID NO: 497813 - DNA, 1152 bp, Stenotrophomonas maltophilia
atgtaccgccctgccgcccgcatcttcatcgtggtcctggccgctttgatggccgcgccgctctgcgcacaggaccacccgcgcaccgatgcactcccgcccatcggaagcgtcaccccggtggaggtcccctcaccggaacaggtcttcgcgattcctcccgcaatgcgcgcgatgctgcaggcgcaggtgatcgaccgcagttcatcgcgcgagcagcggctgcaggcactggtggaaatgatcttcggccgccaggggctggacctgcagtacgacgcgaacgcgacctacaccgtggacgaagtctggcagcagcgccgcgccaactgcctcgccttcacgctgatgttcgtggcactggcgcgcgaggctggcatccaggcccgcgtccaggaagtcggccaggtcgtgtcctggtaccaggaccaggacgccggcgtggtctacagtgtgggccacgtcaacgcgggcgtggagatcgcggggcgttacgccacggtcgacctcgatcgcaacgtactctacgaccgccacggcccgcagccggtcagccgcgcgcgtgcactggcccatttctacaacaatcgaggtgccgaacgcatggccgaaggagacctcgtcggcgcccgcgcgttcttcgatgcctcggtcgtgcaggatcgcgcgttcccctcggtctggaacaacctgggtgtgctcgacaaccgtgagggcaacaccgatgcggcgcggcaggcactggaccgcgccctgcgcctggacggtcgccaggatgcggcgctgaccaatgccagcgcgctgtatcggcagcttgggctggatgcgcaggccaaggccttggagcgacgcttgaagtcggtgcagcgtgaggacccgttcgcgcagtacatgctgggcacgcaggccgagcaggccggaaagctggccgaagccatccgctattaccggcaggccgtgcgcctgtatgacaccgcgcaccagttccacttcgggctggcgcgcgtgtatttcctgtccgggcagcttgagcgcgccgaccgtgaactgacccgcgcgcagctgctgggtggtgcaccggagcaggcacgctaccaggccaagctcgacagcctggcccgctggcgcgcgcagcagcaggccaggcgctga

SEQ ID NO: 497814 - DNA, 2835 bp, Stenotrophomonas maltophilia
atgatggtgaggtctgtgctggcaaccgcgctggcgatggcgctgacggcctgtggtggaggcggcggaggcggcagcaacgtgcgcgtcgacccgcccccgaccacgccgacacctccaaccacgcctccgccgacgacaccaccgccggccaagccgcaggagccggcctttgacgcgcatctttcagtcaccaacgcgcgtgccgcacaggccgccggcctgaccgggcagggcgtgcgcatcggcatcgtcgattcgggcgtgcagcgcaacgcggtggccttaaatggtcgcgtgctggccaacttcaattacatcgatcccgccaggaacaacctggcggttgatgacgtggtcgggcatggcaccgccgtggccagcctcgccgccggcgcagcagtggggacctggccgggcggtatcgcgccaggcgcccagatcgtctcggcaagaatcatttccgacaagccgccgaccgacgacggcagtggccagggcaatgccttcagtgggccgctgggcgtggcccaggtccaccaggacctgatcagctacaacgtgaaggtgatgaacaactcgtggggcggcctgtactggaccgatctgccgaccaccgcgcaggtagccgccgaataccggccgttcgtgatcaaccacggtggcctggtggtgttcgccgccggcaatgacggccgcagcgagccgagcagcctggccgcgctgcccagccagaagggcgtggcaggcacgcttccggcggccgatctggagcgcggctggctggtggccacggcggtggacccgtttacgccgggcgcgctggccagctattcgaatgcctgcggccaggcggcccgctactgcctggcagcgccgggcagcgcggtctacccggatgccaacggtggcagctactactggaactacggcacctcgttcgccgcgccgctggtctccggtgcggcggcgctggtctggcagcgcttcccctacttcaacaacgatctggtgaggcagaccctgctgggcactgccaaggacatcggtgcgcctggcgtggatccggtgttcggctatggcctgctcgacatcggtcgcgcgatcaacggtcccggccgcttcgactggggcgatgtggttgccaacgttgatgccggctcgaccaactcgatgtggagcaacgacatcaccggcagcggtggcctggtcaagcagggcggaggcaagctggtactggccggcaacaacagctattccggcgccacccgcatcgagcgcggcatcctgacgctgcagaacggtggcgtgatccgttcaaatgtgacgatcctcgcccagcccgacccggactccaccggtctgcagttcaacggtggcacgccgcgggtgatcggcaatgtggtcaacggcggcagcgtgttcctcaccaccggcaacaccaccggcaccatcgagggcaactacacccagcagcccggcgcgcagctgatgatcgcgctcggtgccaacgcacttcaggtcaccggcaacgcaacgatcaatggcggtgtgcgtgtgcacggctttgtctccggctatgtgccgcagaacggaacgcgccaggacctcatccacgccgcgggtggcctgaacggtaccttcagtacccaagccacttccaccggcctgcaggggctgaccctggtggcacccacgtatggctacgacagcaacaacgcctggttgaacgtgaaccaggtcagcgtcaccgccgcagccagtggcctgagcgcctccgcacaggccgcagcgcagcgcctggaaggcgcattcgcagtgctcgacggcaacaccggcctgcagggatcgcccttcggtacggcagccggtgcgctgcagtgggccggaggcggccagcagggcctggccgacagcctgcagagcctgtccggccaggcgcatgcccgcgccgaggctgccaccttcgacagcatcgacatgtcgcggcgtgcgattgccgagcgcttcgatcgtgtacaggccaccccgcgcctgcgcgggagctggcagagcgcgctgggtgaggcggggcagggcagcttcgccggcaacgccgccgacagccggggctggatggccggccaggatctgccgctgggcggcaacggcctgatgggcgtcgccttcggcgagacccgcagcaatggtggcagcagtttcggcggtgatcgcggccgtgaccgccaggcgcaggcgcagttgtacgctggctggagcctggggcgtggctatgcgctggcccagttcggcagtggccagttcacccgcgcgctggatcgccagctgctgctgggtgcgggcgcctacggtgtctcggcgcgttacggcgggcgtttcagcagcgccagcgtggaaggcggatatcgcctgggccgcgcaggcgcttcgttgacgccctacctcggtgccagcaccacgcgtgtcgataccgatgcgttcaatgagctgggcggtttcggcttcggcctgcggggtgatgccacccgcgcgcagcgcagccagatgctggccggcgtccgcggcgagcggggctgggggcgttggaacctgcgcggacacgccgagtggcagcagcggctggacggcggtgacgccgattggcaggccagttttgtcggcgtggatgcctgggcgccgctggcaggctggaatgcgccgcgcggcagcgcgctgatcggcgtcgcgctggaatcgtggtggggccgcaatggccgcttgagcctgggcttcgaccagcgtatcggtggcgagggcgcgcggcaggctgcgttgcgctacagcaccgggttctga

SEQ ID NO: 497815 - DNA, 342 bp, Stenotrophomonas maltophilia
atgagcatcaacaagctgctggtcgcgatgtccctggctctggccctggccgcctgctcgaagcaggaagctgcccaggacgccgctgcttcggccaacgaagccgccaccgaagcccaggctgctgccgaccaggccgccgctgctggcgcccagaccgccgacgctgcccagcaggccgctgacaccgccgccaccgctgctgacgccgccaccgacgccgctgcccagaccgccggtgctgccaccgacgctgctgccggcgctgctgctgacgctgccaaggctgctgaaggcaccgctgagaaggccaaggacgctgctgaagaagccaagaagtaa

SEQ ID NO: 497816 - DNA, 999 bp, Stenotrophomonas maltophilia
atggaaggcaatgacgatctggtggtgctgcgtccggaggggctgtactgcgccgcgggagatttccacatcgatccctggcgcccggtgccgcgcgcggtcatcacccatggccacggcgaccacgcgcgcccgggcatgggcgaataccactgcagcgaaggaagcctgccgatcctgcgctggcggctgggcgatgttggcgtgcaggcgcacgccgagggggtgccgttccgcttgggccgggtgcaggtatcgctgcatccggccggtcatgtgctcggttcgtcgcaggtgcgcatcgacgatggtgaacgggtgtgggtggcgtccggcgactacaagcgccaacccgacccgacctgcacgcccttcgaagtggtgccctgcgatacgttcatcaccgaagcgacgttcgcgctgccgatctatcgctggccggacaccccggcggtcgccgcagagatcgtggcgtggcgccgcgaatgcgaacaacgtggcgaagcggcgatcctgctgtgctatgcactcggcaaggcgcagcgggtgctggccgagttgttgccactggacgaccgccccgcgtggctgcacggcgccatcgccaatggcgtgtcggtctaccggcaggccaacatcccgatgctggagacgctcaccgtcgccgaacaggggcgtcaacccgatgccgccggccagttgatcctggccccaccctcggccgcaggcacgccgtggatgcgccgcttcgggccgcatcaactggggttcgcctcggggtggatgcagctgcgcggcaaccggcgacgccgcaacgtcgaccggggcttcgtcatttccgatcacgctgattggcccgcgctgctgcagaccatcgaacagaccggcgcgcagcgggtcatcgccacccatggcaataccgatgcattgattccgttcctgcgcgagcgcggcgtggcggctgaagcctttcgcaccgacttcgggagcgaggaatga

SEQ ID NO: 497817 - DNA, 642 bp, Stenotrophomonas maltophilia
atgaccgatgaattaccgctgctgcttgctggtgagtccgtggtcctggtgggcgcgcgtgcgctgtactggcccgcgcggcaggcactgctgatcgcagacctccacctgggcaaggccgatgtgttccgtcgcgccggcatcgcgttgcccagcggcggcaccggcgaagacctgcaacgcttgcagcggcttctggacctgcatgcctgccgcgagctgtggatcctgggcgacatcctgcatgggccggcgcatcgcgctgggtggtaccagcaatggctgggatggcgtgaacgcaatgcttcgctggacgtgcatgtcctgcgcggtaatcacgaccgccagctgccgcatgcgcagttgcaggtccagatccacgatgaagtacgactgcggccgttcctgcttcggcatgagccgatgcccgatgcggcgctgcatgtgatcgccgggcatctgcacccgcaggttgccttgaggccactgcgacggcgcttccccgcgttctggctgcgtgaccggatgacggtcctgccggccttctccgcattcactgcaggcatcgtgcctgcccccgcccgcggcgaacagatgatcgcctgcgtggaaagcggactggtggaactgcccgtcgcctga

SEQ ID NO: 497818 - DNA, 729 bp, Stenotrophomonas maltophilia
atgcagatgaccccgcgggccagccggccccgcttcctgcttgtcgaggacgacatcatcagccgcggttttttcaaagcggcgttggaaacgttaccggcggacgtggacaccgcagattcattggccagcgcgctggccagcgccgagcccggcgcgcatgacctgtggctgatcgacgtcaacctgccggacggcaatggcgcgcagctgctgcgtgaactgcgccgttcacaccccgataccccggcattggcgcataccgccgatggcgacacctccatccatgcccgcctgcgcgaagctggcttcagcgacacgctggtcaagccgctgggccgcgaccaattgctgaaggccgtgcgccgggcactggtgaacagcccggcggggatctccgttgtcccggctccggcagcggtcgagctgcaggtgcaggactgggacgagaccgcggcactggccgcgctcaatggccagcgcaaccacttgatcgcgctgcgcgagctgttcctggccgagttgccgggcgtacgcgacgcggtcgagcaggccgtggaccagcacgacgagcgccagctgcgcagccagctgcaccggttgcaggcgagctgtgggtttgtcggcgcggcacggctgggacgggcggtgcggcagctgcatcatgcgcccgagtccgggcaggcccaggatgggttccgcgccgcggtggctgccctgctgcattga

SEQ ID NO: 497819 - DNA, 624 bp, Stenotrophomonas maltophilia
atgttcgatttcgatagagattcatccacgcatggcgtggatctacgacagatcgcaggaaactgtcgaaggcggggtgggtccggttgcgggagtgtccgcggcatggatgccgcggccaagcccccagggacgggtttacggcgtctcccgcaaccggacccaccccgccttcgacagattcctgcgagctgtcggaacggcactctgctctggtgggtgtcgaccttggtcgacacagtagagccacgccatgcgtggatgcgtttcgatttcaattcgaaatatttgattctgattgagattcatccacgcatggcgtggatctacccgccgtcaccgggaatctgtcgggggtggggcggtgtgggttggcaggaccgttggcgccatggatggcgccatcgagcccccagggatgggtttacggcgtgtcctgccaacccacaccgccccgcccaacaagcagaaagccagagccgctctggctctggcctttggtgttgccctggcttgaagcttcggcaggtgcagggcgcagccctgccgaaaaaccctcaatgcagcagggcagccaccgcggcgcggaacccatcctgggcctgcccggactcgggcgcatga

SEQ ID NO: 497820 - DNA, 828 bp, Stenotrophomonas maltophilia
atgcttggcggaacgcaggtccaactcccctacgatctcagcagcgttgatgacgccgacatcatcgtcattcccggttggcgcgagcccagcgagcgcccaccgcaggcactgctcgatgcactggtccgtgcccacgcacgcggcgcgcgcatcgcctcgatctgctccggtgccttcgtgctggcctgggccgggctgctcgatggccgccaggccaccacccactggcgcctcaccgaagcgctggcacgcgagttcccacacatcgatgtgcgggaggatgcgctgtacgtggataccggcagcatcatcacttcggccggctcggccaccggcatggacatgatgctgcatatggtgcgcaaggattacggtgcgcgcgtggccaatctggtggccgaacggctggtactggcgccgtggcgtgatgccgaacgcagccagcgtgtcagccgcgccattccccatggcgagcccacgcgcctagcaaagctgatggaatggatgcgccgcaacctgcgcgagccgcactcgctgggcagcctcgccgagcaggccgcactcagccaacgcaccctgcagcggcagttcctggaggccaccggcctgtcgcccatcgactggctgatccgcgagcgcgtcgcctacgcccgcgagctgctggaaaccaccgatcggccgctgcagtggattgccgagcaggctggatttggttcgcaggaatcgttccgtcggcacttccggggccaggtcgatgcgagccctaccgagtaccgcagccagcatcgcggcggtgttggcgcggatcggctggtgggctgctga

SEQ ID NO: 497821 - DNA, 405 bp, Stenotrophomonas maltophilia
atgtcggctgggctttccgatgaaaccctccgccagatcgtctcgggctctgccgcgttcaatcgccgggtggacgttaccggagcgctgctcgtcgacgggcagcggtttttccagtacatcgaaggcccgcccgacggcctgaaggcggtcaggcgccgcatccaggacagtcgttcgcacgccgccgtcaccccggtactggacatggcaatcggcgcacgcgccgtaccctactgggcgatgacccgcatcgagaccgggcagatcgtcgtgtccgggctggtcaatgcgcgatgggacgaatttggccattccgttccaggcatggatcagctcgttggcctgctgcgtccgcatttcccacgcatcggcaccgtcgagccgccacgcgcccccgcctga

SEQ ID NO: 497822 - DNA, 480 bp, Stenotrophomonas maltophilia
atgacgaacatgccaacccagctcacgaccgacttcgatgcgatgctcgacggtggtgacattgccgaggcgcggcggctgttggccccgcagcttgcacgcggctgtgctgaagcgttgttcctctcttcttcgatgcctgtgggggaggacgacgcacatgccgaggcggacagcttcgcgaccctcaagcaggccgcagagaagggttatatcccggcaatccatgcgatagggctgtgcctgctgaccggtgaccgcgtcgagcaggacgtcatgcgtgcggccgcgcattttgagcgggcatcggaggccggctatccgtcggccatgtacgagtttggcctggcgttgttccatggcatgggtgttgccagggacgtgccgcatgcggtgtacctgatccgcgcttcggcgcagtcggggaatgagtacgccagggaattcctgctgacgtactcgttggacgtgggcacgtag

SEQ ID NO: 497823 - DNA, 1377 bp, Stenotrophomonas maltophilia
atgaacccctgcaccgccctgctgcctgccgccctgaccgcactgctcgcccccgcaaccagcgtggccgcaccgaccgcgcaggcggccacgccgctcaccaccggcagcgtgcggctggatattgccagcggccgcgtcgaaggcaatgtctgcgtgtccaacctcccagccgaatcaaggggcgcgttcgtactcaacgccggcctgaacgtcgcgcgggtcaccgacggtgacggcaagccggtagggttcgatggctggtacgacccgggcgtggatggcgaggcgcgcgtctacaccctggccgagcccaccgccacgctctgcgtgcagtacgtgggcgcgttcccgctgtacccgaagcacgatgccatgggcgacttcaagggcatgatggccttcaacggcgacagcgcccgcttcaccgaacagtccgcatggctgccgcaggcattcgaccccaaggcccgcgtgcgcagcaacgaaagccgctacgacctgcaggtggactgcgccggctgccgctttctgtatctcaacggcagcccggccatcgaaggcgcgcaggggcgattccgcagcgacaacgcacggccgatcctgctgttcggcggcggcggcccgatcacccgcaccgcgcaggtcacgatccttaacgagaccctgccctcggccaaggtccaggcactgtccagcacactgcagaaggtagccgacgtgcacagccgctacatgggcatgccgctggccgaccgccccactttcctgcgcatggtcacgctcaaccagatcgagcgcgaccgcgaaggcagcgagtggggctttgccacctggcccaccatcgccatgagcggcagcatcggcaatgtggccgactccctgctggctggtggcgaacatgctgaacggcgcgtgcagtacatcgcacacgaaatgggccattactacttcggcacgctgaaccgtccgcagggcccctacttctgggttctgctggagtccagcgccgagttcctgtcgatcaaggcgctgcgtgagatcagtggcgatgccgcggccgatcgctacatcgcacgactgcaatcggccgtcgatacgcacgacaagccgctacccccgttcgatgccatcgatggcaactccgatctgggcgagatatatcgctacgtctatgcccctttgctgctgctttcgctggagaagcaggtgggtgaggcaaagatgcaggccttcatgcgtgggctgctggcctctccttcgccgaagggctgggcagagctgcagggcattgcgctgaaagccggcatcgatctcaagacctgggagcattggcgggcaagctgtgtggctggcggcaggcagaggtgccagtag

SEQ ID NO: 497824 - DNA, 924 bp, Stenotrophomonas maltophilia
atgagccgcaagttcgactacctgggcgatgtggaggtgtttctggcggtggtcgagcacggctcgttcaccgccggcgcggtggcgctgtccaccacgccctcggtgctgagccgtgcggtcacccgcttggaagcgcggctgggccggcagctgctgcagcggaccacccgccgcgtgggcctgaccgacgccgggcggctctatctggaacaggtgcgcaccgccttcggcctgctggacgacgccgagcgcgacgtactggcccaggacggcgcgctggccggccgcgtgcgcctgagcgtgcccaccacctatggccactaccggctgccgcccgtgctggcgcgctttgcgcagcagtacccgcaggtgcaggtggaactgaacatcaccaaccgcaacgtggacctggtggccgaaggcttcgacctggccatccgcctgggccagctgccggacagcgggctggtggggcggaagctggaagatgcgcctttggtgctggtggccgcgccggagtacctgcagcgctgcggcacgccgcagacgctggacgacctgcagcagcacctgtgcctgccgttcgtgatgccgcgcaccggacggttggcgccgtggatcttccgcgacgccgggcgcgacgtggactggctgccgcgttcgtccatcgagacctccgacgatgtgctgggcgtggtttcgctggccgaacagggcatcgggatttgccagagttacgagttcatcgtgctggagcggttgcggcgtggggaactggtggaagtgctgccgcagctgcgcgggcggtcgcgcccgttctcggtgatctatgcgccgcatcggcggcagtcggcggcggcgcgggcgatgattgagttgctggtggggaatgcggggcatgctgaggatggcgctggctga

SEQ ID NO: 497825 - DNA, 1740 bp, Stenotrophomonas maltophilia
atgactgaggaaatcgcaaatgccgaggttgtggcggtttaccccaataaggttcgagtagccgttgacgatctgttgaacttccaatcagccggtgaggctcttcgcgttggatcatttcttaaagtatcggacaacgaaaacgtctctcttatttgcatcatcgaaagcttttcaatcgaaatgaaggaggtcaaaggaggcgaaggtggtgactacaggcgtgtctatatgattgacgcctatcctcttgggacccttaaggaaggaaagttcaatcgtggcggcgacgagttggcaattccaccgaagaaggtcgtcccggcaacgaaggtggaaatcgcagccatctatgcagactgctatgcggctgaagaccgcttttgcttttcttcactgacccggcaacgtgatatcgtcgtgcccgttcacggcgaccggttcttcaacaagcatgtcgccgttgtcggtgcttcgggatccggaaaatcgtcaagtgtgtcttctattctgcaaagggctgtatcagccaaagctggcgagtaccagggtcttaataactcacatattcttatattcgatcttcactctgagtacgccgcagcttttccgaatgcaagcgtaattaccgtcgatgatcttgtcctgccgtattggctgctaaacgaagacgagatggaggacatgttcctcgagtcaggcgataacaacaattacaatcaggaggcattgctgaggcaggttgttaccatcgcaaagaaaatcagtaaccccggtgtcgagaaggtaaatttcgacagtccccttccgtacgagatcgatcatgtcgcgaatgcgttcagaaatctaactagagagacaaagaatgctgacaattctttgttgatcaagtttaaggacggctcggaagtcgaattcgaagacgtcgatgcccagatcgaacactactgtaaagagttgcgcgaatttgcaccgacaaaacgtagtgagattaacaaagggccgtatgccgatggctcgatcgataagttcgaacggcgggtcagatcgaagattggaaatgcgcggcttgggttcatctttggccagaaggctaggaaggcttctttggaggatgtgcttagacagttcaccggctacaacgtcggaggtgagtcgaatgtcaccattatcgaccttagcggcatcccctttgaactgctcagcataaccgtttcgctcatctcccgtctgatgttcgatttttgctactacgcacggcgcgttgaaaccaaaaccgaacagccattcctgatggtctatgaggaggcgcacaagtatgcgccgaagagtggacttgcgcgctataaagcttcactgggtgcgatcgaacgcatagccaaagaaggtcgaaagtacggcatcagcctgcttatttcgagtcagcgaccgtctgaaatttcagaaactatcttttcgcagtgctccaatttcttggcgatgcgtcttactaatcccgatgatcagggctatgtccgccgactactgccggatacgcttggcaacctaacagagggtatgcccgcactggagcaaggggaagcacttctgattggtgatgccgtgatcatgccgtgcgttgtgtatgtagagaaatgtgatcctgagccctcgtctagtgatgtgaagtaccttacgctctggaaagcagaatggaagaatatcgacttcgaaaagcgtgccgacaactggcgagggtga

SEQ ID NO: 497826 - DNA, 1251 bp, Stenotrophomonas maltophilia
atgctggaggtggacaagaagcgcgaggcgacagcttcgatcagagggtacttttaccaactcgacgctgccttactcgaaatcttgcgcgcgggcctgaacgatgacatcgtcattgagggtgttgaagattttgatcgttacacggatgaaggtgtaatttacggccaggtaaagtactacgcggagcagaacttaacagactcagtgctgcgtgatcctctgtacaagctctttgttcatttccatgggctcgaagaggggcagcgcgcaggtagaaaatacatcctgtacgggcacttttcagaagttaagatcgatattggtgagctttccgtcgagcgatttaagtcggtgatggaataccgcaaggaggtgagggctgctgatgggacgataacgtacgagaagaaatccctgctcaatggatccacagcgccggatgaattgatcgaggcgttctgcaagaatttcagtataaaaattgctgctgaatattctgaacatcgaaacagcgttattgaggccatacggaagagccaaggtgtctcagttcttgaggctgaaggatttcactatccaatagccctcgattacattgcgacactggccacaaaaaaagatcacaacgatcgaaggactacccgtcgtgatctgcaggaagtgctcaagggcgcccaggtcgtccatcatcgttggcttctccgagagaaggaggaggtcgagtacgcgaagcatatgaagcgcctgtacttctcgccgacgaacggcgcgggaatggttcgcgctttcattattcagtgtgataccggaacagacccttcggatatctgcgatcaactcaggtccatcggtaaaaactggagttccgctaagaatcgtcgcatccaaaattccgaccgctacgctccatttatcctgctgcgcggtgcggatgaagaatttattctgcaggtaaagaacgatcttttcgatactggaataattttcgtggacggcttcccgtatcgcggatcgccattccgcattgatcacctccatagcctgcagactcaacagcatcagatcgaaattcgctttgtcgacgacgaagtgcagttgcagacggccctcgatggcatggggcggaagtcgtgccacatctatgacttcttccttgaaagccctgtgaccatggatatgccgggtccaaagagtcggctgtactcgatccccgtcagcagcatctccacaatcaagaaaattatttga

SEQ ID NO: 497827 - DNA, 816 bp, Stenotrophomonas maltophilia
atgcgctctgccaccgaattctggcgtgacccgcgcatgcccttcgtcgaaagccgacgggcgtgcgacagccgcgcctgccatcgcccgcacagccatgacaccttctcgatcggcgccgtcgacgccggcagcagcgtgttcaccggcgccgcgaaagggccgcgtctgctgcagcccggcagtctggtcggcgtgcccgcaggccgcgtgcacgcctgcaaccccctgcccggccagctctggagctaccagatgctgcatctggacccgcgctggatggccgaggtccgcgccgagtatgacgacctgcccgaacccgactggcagcaggaaccgatccggatttccaaccatcgccctcgctaccagcagtactgccagctcaacgagacgctgttctccgacgacccggtcagcgtcaaggaagcggcgctgatcgcgttcgtcggcgatctggaggaacacgatggtgtagccgtcgccggcccgcttgaagatgccgcgttacagcagcgcttgcagccggtgatggacgttctgcgccagcggctcgaacacaccccggccctgcaggagctggcatcgctggcaggcatgagccgctaccagctgatccgcgccttccgacgcgctacgggcctgacaccgcacgcctggcagatcgatcaacgcatccaggaggcccgccggcggctgtgcgaagggcaggcactggccgtggtcgcgcatgcgctgggttttgccgaccagagccatttccagcgggtcttcaaggcccacgccggtgcaaccccgggccaataccggcgctga

SEQ ID NO: 497828 - DNA, 636 bp, Stenotrophomonas maltophilia
atggaacagttcctggtcatcgccaccgtacattttctcgccctgctctcacccggccccgacttcttcctcgttgcacgcaccgcgatcacctcgggctggcgcaccgccagtggtgcctgcgcaggcatcgccgtcggcaatggcgtcttcatcgtggccgctttcaccggaacggccatgctgcgcccaggcagcgcagggttcattgcggtgcagttggcgggctgcgggttcctgctgtacctcggcacgctgttcctgcgccatgcgggttcgacgacgttgcaggcacctgaagctgccgccggatcgccagcgggtggggcccagggatggtggagggcggcagcgctgggtgccctgtctgcgctgctgaacccgaagaatgcgctgttctacgcaacgctggcggcaatgctcaacggtccgcagcccagcgccgcaacgaagttcttctatggcgcgtggatgttcggcatcgtcctgctatgggatctgctggttgccgcgctggttggccacccgtgggtgctgggtcgattcgcgcgtgccctgccctggctggaacgggccgcagggctcctgatgattgcgctggcgctatggatcgccgtgtcgctgtggctgggctga

SEQ ID NO: 497829 - DNA, 750 bp, Stenotrophomonas maltophilia
gtgcagcagttcttcatcgtcgcggtgctgtacggcttcgccctgctcctgcctgcgtcgaatcacgcgaagatcctgcgcaccgcgatgggcgcgggcgggcacgccgccatggccgcatcgttcggtatcgccatcggtacgggcatcatctgcgccacggccttcgttgcggcgggcatgctgggaaaccgcggcctgtggacgctggcgatgcagtgcgcgggctgcctgctgctgctgcgcctggcgggcatgtgcctgcgcgacgccgggctgacctccctctctccgctttccctgcagatgccccggggcctgaaggcccgctcccgttggccgcacgccgaggctggatgcctgttggcgctcgccagcatcaacaactggacgctgcagttcgcggttgcagccctggtcagcggcctcgttgccgacatggatacaaaggccgcttacgtggcctgcctgggcggcgtcgcgctgtcgctcggcctgctgatggcgtggctcggcagccatccgcgctgggcacaggggtgttgccgatcgcttccgtggctggagcatgccgcgggcctggtgatcggcgcggtgtcggtggcgtacctggcaggggtactgggtaccaccctggtctgggcaagcctcacgggacaggcgcagctacccgaatcgatgatcgccgcgccccgcagcgccccatgcgcgttgccgcattgccgcgctcgtcgcaacagttcgccatga

SEQ ID NO: 497830 - DNA, 786 bp, Stenotrophomonas maltophilia
atgccgcggcctgaccgcctctggctggttctgctcgcaggcacgctggccctcgcggtcggcggctgcaaatcccatcccaaggccaagcttggcccgagcgaggcgccggtctactccgtccgtgatccggaaggggtgcggcagcaggtgcgctggcaggagttgctgaccctggccggccgcgacatccagggcggcaatctcgatgctgccgagcgcaaggcgcgcgaagcccagaagctggtgccgacggcccccgacggcctggtcctgcttgcgggcatcgacgagcgtcgcggtcgcagccagcaggccggcgagaacttccgcaaggctgccgagctggcgccgcaacgtggcgacgtgctcaacaactatggtgcctggctgtgccaacagggccaggcggccgaatcgctggtgtggttcgatcgtgcccagcgggcgccgggcaatcccgccgtcgccgaagcgcagtccaatgccggcagctgtgcgctggatgcaggccagttcgagcgtgccgagcgcgacctgcgcgcggcgctgtcggcgctgccgggaaacccggtcgcgctggaggccatggcccagctcagcttccgccagggccgctacatggaggcccgggccttcgccgaacgtaggattgcggctgcacccgcaacgcgttccgtgttacaacttgcgtctcaaatcgaagcgcggctgggtgatcgggcggcatctgaccgctatcttcagcgcattcgacaggaatttccgcaggaagcgggctcctaa

SEQ ID NO: 497831 - DNA, 879 bp, Stenotrophomonas maltophilia
atgaccctgcccagccacctgcagctgccacccggccactggcccagcctgctcgatggcctgtgcgcgcgtttcccgcgcatcggtcgcgcgcgatggcaggaccgcttcgcccgaggccgtgtgcaggatgcgcagggcagggcactggcgccggacatgccctggcaggtggggctggaaatccagtacttccgcgaggttgccgacgagccggtgattcccttcgccgagaccatcctgcatctggatgcgcacctgctggtggccgacaagccgcacttcctgccggtaacgccggccggtgggtatgtgcgcgaaaccctgctgtcgcgcctggtcgcacgcaccggcaacaccgaactggcgccgttgcaccgcctggaccggctgaccgccggcctggtgctgttctcgacccaggcggccacgcgtgatgcctatcagcggctgttccgcgagcggcgcatcgagaagacctatgaggcgctggcaccggcgctgcccgggctggcgtttccgttgcagcgggacagccgtctggtgccgggggagccgttcttccgcatggccgaagtgccgggcgagcccaatgcgcgcagcctgatcgagccgatcgaggccgaagggccggtctggcgctaccggctgaagccggaaaccggtcgcaagcatcagctgcgcgtgcacatggccgcgctgggcgcaccgatcgagggcgacgacctttacccgcagctgaggccgcgccgggatgacacgttcgagtcgcccctgcagctgctggcgcaggggctggccttcgatgacccattgagcggggagccacggcggttcagcagccagcgccgcctgtgccgaatggagcagggcggctag

SEQ ID NO: 497832 - DNA, 534 bp, Stenotrophomonas maltophilia
atggctggaagcgcccgctcaagaagtcctgagccccgtgttccccgcgccgatgaactcggtgtgctgcccggcatcgagcagcgcgccggcgaggtgttgaggggccatgaggcctatccggtgttcgccgggcatggcctggacctgccgacactacaggatggccttgaacgcgggcagctgtgggtggtggatgcggcagacggtggcatcgccggctatctgcttgccggcgaactggcaggtgagttccacgtgctgcagatggatgtggatcctgcacacgcgcggcaaggtcatgggcgcacgttgttgcgccatgcattggtacaggcccgggcgaaaggctatcgctcggccgtgctgaccacgttgtccgacgtgccgtggaatgcggccttctatgccagtgaagggttcgtcgccgcaccggaggcggagtggggtgcagggctgcaggcggtgatggccgaagaggccgcgctggggtttccgatgcatctacgcgtggcgatgcggcaggcatggtag

SEQ ID NO: 497833 - DNA, 393 bp, Stenotrophomonas maltophilia
atgcgtgcctgcgcgatgtgcctgatgctgctcctgcccctgccggcgctggccggtggtggcagcgcacagacgctggaatggcgccgggatggagcgcggctgtcgctgcgctcgaccgaaggccaggtgcatgtggaggccgccagcccggaagtgcgcttcggcgtgcgcagtggcgatcgcatcctccgcgtggacgacacggcggtgcgccgggttgaacatctggccgaggcactgcgccattcccacgcggccagcgcctatctgttgctgcgccgcgacaagcgcgaactgacggtggcggtcaacgccgctgcgtggcgacaggcattggaggtcccgccaccacccgcgccaccacctccgccagccccacccgggcgctga

SEQ ID NO: 497834 - DNA, 1218 bp, Stenotrophomonas maltophilia
atggacatccgccccatcctcagcacgctgcgccggcacaagaccgctgccgccctgatcgtgctggaagtcgcactgacctgcgccatcgtctgcaacgcgctgttcctggtcagccagcgcgtggagaaaatcagcatgcccagcggtatcgccgagagcgaactggtgatgctgcgcgtcagtggcatcggcaagcagaccgacgccatgtcccgcacccgcgaggacctggcatcgctgcgcgcgattcccggcgtcagcaacgtcaccatcatcaaccaggttcccttccgcaacggctcctccagcagcagcatctcgcgggtgatcgaccaggaacggccgaccaccaacgcttcgatgtacaccctgtccgagaacgggctggccacgatgggcatcaatctgatcgccggccgcgatttcctgcccgacgagtaccagaacttcgaagacgtcagcaagggtggcgccaaggaaaaggccatcccggtcatcctcacccaggccaccgccgccaagatggagcccaacggcagcgccctgggcaagacctactacatgggcaagcagtcgctgcatgtggtcggcatcgtcgacacgctcagcacgcccaatggctggaatgacaactggaccaactcgatgctgctgccgatccgggtcagcttcgacaagggtggcacgtacgtgttgcgcacttcgccggaacgccgccaggaggtgctcgatgccggtgccgccgcgctggagcgcaacgaccccaaccgcctgatgcgcgacaagctgacctatgaagaccagcgcaaggacttcttcaagaacgaccgcgcgatggtcggcctgctgatcaccgtcagcatctcgctgctggtggtcactgcgctgggcatcattggcctggccagcttctgggtgcagcagcgcagcaagcagatcggcatccgccgtgcgctgggcgccacccgcgggcagatcctgcgctacttccagaccgagaacttcctgctggcctcgctgggcatcgtgctgggcatgctggcggcgtacgcgatcaacctggctctgatgaacctgtacgagctgccgcgcatgccgctgtactacctgccgctgggtgcgctgctgctgtggatactgggccagattgcggtgttcggtccggcacggcgtgcggcggcggtaccgcctgcggtcgccacgcggggcgcgtga

SEQ ID NO: 497835 - DNA, 1299 bp, Stenotrophomonas maltophilia
atgttcgcctactacgcccgattggcggcgcgcagtttccgccgcaacaaggtcctgaccgcgctgatggtgatcgccatcgcgctcggcatcggcgcctcgatgaccacgttgaccgtattccacgtgctgtccggcgacccgattccgggcaagagtgaccgcctgttctacgtgcagctcgatgccgcgaccggcgcctatgtcgccggcgaggaaccggaaacccagctgacccgcttcgacggtgaagcgctgctgcgcgaggccaagggcgagcgccaggcgctgatgagcggcggcggcggcaccatcgaaccggacaacagcacgctcaagcccttcagcatcgacacccgctggacctcggccgatttcttcccgatgttcgaggtgcccatgcagtacggccgcccctggacgcgcgaggacgatgaaggccgcgcacgcgtggtggtcatctccaaggcgctcaacgacaagctgtaccagggcgccaacagcgtgggccgcgacctgcgcatggaaggccagagttaccgcatcgtcggcgtgatgaaggaatggagcccggagccgcacttctacgacctgaccaccggcagctacggcaagaacgaagacctgctgctgccgatctccacctcgttcgacctgaagctcggcaacaacggcaacatgaactgcttcggcgaaaaccccgacggcaacagctactcgctcaatgcaccctgtgcgtggctgcagtactgggtggaaatggacccggccaaggccggcgactaccgccgctacctggagaactattcgacccagcagcgcgaggccggccgcttcaagcacccaccgaacgtgcgcctgcgcaccgtgatggaatggctggacttcaatggtgcagtgcccagcgacgtgcgcctgcagctgtggctggcgctgggcttcctcggtgtctgcctggtcaacacggtaggcctgctgctggccaagttcctgcgccgcagtggtgagatcggcgtgcgccgtgcactcggtgccagccgtggccagatcttcctgcagtgcctggtggaagccggcgcggtgggcgtggtcggtggcgtgctgggtatcggcctggccctgcttggcctgttcgcggtgcgccagcagccggtggaatacgcaaagctggcccacctggacggcaacatgctgctgctcgcgctgggcctgaccctgttcgccagcctcgccgccggattcctgcccgcctggcgcgcgatgcaggtcaccccggccatccagctcaagtcgcagtaa

SEQ ID NO: 497836 - DNA, 327 bp, Stenotrophomonas maltophilia
atgaacgcacgttccgtccgccgccctgcaactgaacgcgtcatcattgaccgcgccgatccgcgcctgctgcgcagcgtgcgacaggtggccctggccggcctggcgctggtactggtctggccagccgcgcgcggcagcaacgcctggctgggctggctgccgatgtggctggtgggcatgccgctggtggcctggtgggcgctgctgcgcttccctgtgccgcgcctgtcgtggctgcggctggcccgtcgcaccggtggacaggcacatcgtcgcaccgccgggacgccccgccgtcgccgccgcgctacggccacggcctga

SEQ ID NO: 497837 - DNA, 423 bp, Stenotrophomonas maltophilia
atgaaagtacgaaacctgttcaatacgatcgccaagaaggccgcggccgccaccggctcgccgtggaccttcctggctgcagtagcgatcgtggtgatctggggcatcagtggcccggttttcggtttcaacgacacctggcagctggtgatcaacaccggcaccaccatcatcaccttcctgatggtgttcctgatccagcacacgcagaacgcggacaccgccgcgatgcagatcaagctggacgagctgatccgggcgacggccgaagccaacaacgaactgttggatctggaagaactggacgaaacgcgcctggaagagatccgcgccgagtacgagcagatggcgcgcgaagccggcgatgcgctcgcgcgggtgcgcgcctgccatgcagcgcggcgcgacgatgaagcggtgtag

SEQ ID NO: 497838 - DNA, 1014 bp, Stenotrophomonas maltophilia
gtgccgccctacgccggtcctcccgttgcctcccgatccggtgatgccgccagccccctgcggttgctggcctatcttgcattggccatcacactgatcgtccttgacgatcaggcgggttggctggcgcgcctgcgcgagcaggccaacagcctggtgcagcctgtgtgggcactggcgggtctgcccggcaagctcggcaaccaggtcaaggattccgcggccagccacacccagctggtcaccgagaaccgtgaactgcgcaaccagctgctgctggccaacgcgcgcctgacccgactgcagaccgcagcgctggacaacgcccagctgcgcgaactgctgaacgtggccgagcgcagtggcctggacgtgcagctggcgccgatcctggatatcgacctggacccggtgaagcagcgcctggtgctcgacgccggcagccgcgaaggcgtgcatgtcgggcaggcggtgatcgatgccggtggcctgatggggcaggtgatcagcgtcaccggcggtacctccaccgtgctgctgctgaccgaccccgaccacgcggtgccggtcaccgtggcccgcaacggcgtacgcctgatcgtctacggtcgcggcgacacgctggagctgcgcgacatcccgctcagcgccggtgtggaagtgggcgatgagatcgtcacctccggcctcggtggccgcttcccggccggctttccggtcggcaccatcaccggcctgcgcccggacgacacccatgccttcctggtcggcgaactgaagccagccgcccagctggatcgtggccgtgatgtgctgctgctgcgccccggtgcggcgatccacattccgccggaactgcgcctgcagctggaagaaaccactccgggtggcccggccaccggcgccaccgtgcctgcgggagccgcgccagcgacaacgacgccagctccggtcagttccccggtagtgccggccgctggccggcaaccgaccacgccggaggcccagcgatga

SEQ ID NO: 497839 - DNA, 1461 bp, Stenotrophomonas maltophilia
atgcaccgccggcagcctgacgcgccgcgctggtcgcagcgggtggatccgccgtggtcgctgcaggcctggcgcgacggcgcgcgtgatgcgctgctgcggagcgtgcggcccgagcaattggactggctcgaaggcggcgaggcatcgctgctggatgcgccgcctgtgcagcaggcaccggtggcggcacaggcaagcgttcccggcgtcccgcgcgaattcctggaactggccgacacctgcctgtgccatagcgaaccgcagcgcctgtcactgctgtaccggctgctgtggcggatcacccatggcgaacgcacggtgctgaccaatcccgccgatgccgatgtgctgcgtgcgatgacattggcccaggccgtccgccgtgacacgcacaagatgaaggcattcgtgcgcttccgcgaggtgcctggccaacctgatgcgttcatcgcctggttcgagccacagcaccagatcgtcgaccgggtcgcgccgttcttcgcacgccgcttcaccggcatgcgctgggcgatcctcactccttcgcgcagcgtggcgtgggatggacaggcgctgaccttcggccccggcgcacgccgcgaggacgccccggccgaggatgcgcgcgaggccctgtggcagacctattacgccagcatcttcaatccggcccggctcaacacccggatgatgatgcaggagatgccggccagatactggcgccacctgcccgaggcgcagctgctgccgcgcctggtgcgcgatgcgggcgatcgcgtgcaggaaatgcatgaccggcccgcgcaggcaccccagcgcaggattcccatgcgtggggacgctgcggcagcgcgcccagataccgccagcctgcagacgctgcgacagcaggccagcgcctgccgccagtgcccgctgtgggagaccgccacacagacggtgttcggccaggggccggccgatgcgcaggtgatggtgatcggcgagcagcctggcgataccgaggatctgcgcggccagccgttcgccggccctgccggccagttgctggaccgcgcattggccgagctgggaatcgatcgcgccacgctgtacctgaccaacgcggtgaagcacttccaccatgagcggcgtggcaaggtgcggctgcacaagcggccggaaagccgccacatccaggcgtgccggccgtggctgatgggcgagattgcgcgcgtgcgaccgcaactcatcgtctgcctgggcgcaaccgcggcagcctcggtatttggccgtgatttcaatctgtcgcgcgaccgtggacgctggcacacgctggaggaaggcacccgcggctacgccaccgtgcacccggcgtgggtgctgcggcaaggcgatggcgcgcgccgcgaacgggcctatgcactgttccgcgatgatctcgcgcaactgctgcaaaaaggggacggaggggattaa

SEQ ID NO: 497840 - DNA, 1392 bp, Stenotrophomonas maltophilia
atgagtaacgaggccgaccgtttgatacgccgtcaaggcgccaggcccggcctgcacctgctcaacctgtcggcctggatcagggagcagcgtgtactgcaagttgtctaccgccagcttcctccgcgatggcgcaactgggcgtcgtccttgctcgcgtcgcgcgcgagtgcaagcgcccggttcccgcgcactccacgctgggatctgggtctggagcgcgtcgcttacgactctgtcaggatgccggcaaaggcggatggtccgggtctcaacctgttggggtacatgcgtggccaatttggcctggctgaaagcgctcgcctgtatgcacgcgcattgatcgattacggcgcggatgtcgcgctgtacgatattgacctggcgcttccgcatggctgggaagatggcagccttgacgcgtggataggcacggatgcaccgcacgaagtgagcatcatcttcgtcaatcctgactatttgaagccggccctggagcagatcggtgaggcaagactgcgtggccgttatctgatcgcctgctggttctgggagctggagaagattcccgacgagtggcttgatgctttggccttggtagatgaaatcatggtggctagcgaattcgttgaggatgctttccgacgcgtcaccgaaaaacccgtgctgcgcgtcccccttccattaagtgctctacctgacagcggcctgcagcgtcaggacttcggcttggaggaggggaagttcactttcctcgctaccttcgattttaactcttggattgaaaggaaaaacccattcgcggtgctgtcggcctttcgcgccgcgttccctgcagatcgggacgatgtccgcctgctggtgaaatcgagtaatggtttccgccatccggaaaagttccggaagttgctgagtgccggtgagggagatgaccgcatcattatccgcgatgacgtcatcgatcgtgcccatctgaacgccctgcagcgttgctgtgatgcctatgtgtctctccaccgtgcagagggttttggcctcggacttgcggagtgcatggcgcttggcaagcctgtcattgcgacgggctggtctggaaatcttgagttcatggattccgaaagcgcactgctggtggaattccgcaggatacctgtgagggagggggactatccccaccccgacggggctgagtgggcagaggcagacgttggcgccgccgccactgccatgcggaaactcgccgacgatcctgtcgcggcctcgcggctgggtgcgcgagcgcggacggccgtgctcgcgcgcctgtcgcctgaaaatgcggcgcgcatcatcctgaacagagtccgggaaatcaaggcaggaatgaacaaagtaggtgagaaccatgggtga

SEQ ID NO: 497841 - DNA, 795 bp, Stenotrophomonas maltophilia
atgggtgacatgatgcgctcgatatgggcataccgttttttcatcctttcctcgatccgcagtgacctgaagatccggttcctgcgcagcaagcttggcaccatgtggatgatcattcatccgctggcccaggtcctcatttttgcgcttattctttcggaagtgctctccgccaagcttccgggaatcgacaacaagtacgcctacgcgctttacctcatggcgggcaccttgggctggacattgttcgccgagacgatcacgaaatcagtcagcctgttcatcgacaacgcgaacctgatgaagaagatggcattcccgcgcatctgcctgcccatcatcctcgctggcacgatgctggtgcagaatgccttgctgttactcgccatttttctggtctttgcggcgctggggcactttcccgatgcgcatgcgctctggttgccggtactgatcctgatcactctgctcctgtcgctctcgctgggcaccctgcttggtgtgttcaatgtgttcgtgcgcgatatcgggcaggtcgtccctgtcgtgctgcaggcacttttctggttcactcccatcgtctacagcttggagatcctgccggccagcacacaggcctggttccgtctgaatccgctgcacccattgatagcgagctatcagaacgttctcgtctatggtcgcgacccctactggagtgacctggggtggctggcgctggcttcggtcatcatgggcgtggcggcgcttgtggtcttccgcaaggcaaatgcagaaatggtggacatgctatga

SEQ ID NO: 497842 - DNA, 1260 bp, Stenotrophomonas maltophilia
atgagcggcgaaatcttcgtctccggtgtcggcaaggcatatcgtcattggggcagcgagtggaagcgctttgcgaaatggtttggggcgaaccccaaacccgactctgaaacttgggtgcttcgcggcatcgatttcgaggttgcccgcggtgaagcggtaggtatcatcgggcagaacggcgcaggcaagagcacgttgctgaagctggtgaccggcactgcgcgtccgactgagggtgaaatccgcttgactggacgggtggccgccatccttgagctcggcatgggcttcaacccggagctgagtgggcgcgagaacgtccgccatgccgcggggctgctcggtttttcgggggaggacatcgagcggatcgttccggaagtggagaagttcgcggagatcggatcctattttgatgagccagtgcgtgcttattcaagcggtatgcaggtccgtgtcgccttcagtgttgcaaccgcgacccgcccggacattctgatcgtggatgaagcgctgtcggtgggcgatgcttatttcgtccataagtgtttccagcggattcgtgacttccgtgccgctggcaccacgctgttgttcgtctcgcatgacccaacggccgtacaggcgctttgcgaccgcgccatcctgctcgtcgccggcaagaaactgctcgatggagagccccgtgaggtgtttgattactacaatgccctgatcgccgaaaaagaaaacagcaagctgctgaccgtgcgggaagagggtgggccggtgcagacggtctcagggacgggtgaggcaagttttgggtcgatcactctgcgtaattccgctggcgaggccgttgaatacgtgggtgttggagaggcagtgtcactggatgtcgcggttgaaatacatgagccgatcgacaggttggtgtttggttacatgatcagggatcggctcgggcagccgatttatggcaccaacacgcattacacggagcaggtccttggggacctgtcgccgggtcaacgtatccgcttcagcgtatcgttccatctcaacctgggaccgggcagttattccgtttcggtagccttgtcgagcactgaaacccaccttgtgaagaatttccagtggcgtgatctggccacggtttttcaagttgccaacatcacccatcagcatttcgtcggttcagcctggttgccatcacgcattgaatggcaggaagaggctaccgacggtgcaattgaagtgaggaccatggaatga

SEQ ID NO: 497843 - DNA, 1794 bp, Stenotrophomonas maltophilia
atgacgtctccgcacgagatgaaggcaggggctttgatgcaacaggtgcgtcacgagctcgcaatgcgatcggcccagcgcagcggcgatgcgcagcaaggccgggagcaggcgccgcattggtcgccggacaacgcgcagatcgccgataagcatcagtacacgctgcaggaactgctgcaatacgaggatgtggacttcgtcgataatgcttaccgtgcaatgctcggtcgaccggtcgaccaagatgcattggccatgtatacgcagcggctgcgtgatggcagcataaccaagcttgaggtgctgggcgccctgcgctggtctcgcgagggcgagcagcgcggtacccgcatccatcggctgcgccttctgtggacactgcagcgttggaagcgtaagcgtcttgtgggtcctgtcatcgaatgggcccatgcggccatccgcctgccgcgcgcggcccgcaccgagtcgctgaatcacgcccacagcgttcgcgagatccagcggattggtgagcttctgaatgaagtttcgagcctcgccagtagccgctgcactcaactcgagcgtcagttgggggaggtcacgacccaattgcagttggccgagtcccgttccggggtgcgcgatgaggcgcacgacgcgcgccttgcttcgcttgaactgatcgtccaatccgagttcggcccggaagtgctccaagcgacggcggccggagtggaccctgctgaacccgctagcgtccgcaggcccagcatgttggtgaggatgagcctgctggagcagcgactggaggatgacgcggcagaactgcggcagttgagggggcagctggacatggcaaggacattcgctggcgagcacgagcagaggcttgaggcgctgcgggtaactgtcgaggaaagtgctgcggcgaggcgtgatcattacacccggtttgattttgacatcagtgcgatcaatgcacggcagagccgcgatgaggatcgcttggacgcgctggagcagggtgggaggctgcaagctgagcttgcgccctcctccgtcagcacgtccggtgccctgcccggtccggaggcgcagggtactgtgaagccggcatcggacatggatgtgatgtacgccgcgctggaggattcattccgtggttcgcgcgacttggtcaaggagcgcgtccgcccctatctgaatgaggtcgaactcgtctgtggtgccgatccgtcgagcgcgctggtgcttgatatcggctgtggtcgcggggagtggctcgagctggttcgcgacgccggctacccggggcgcgggatagacatgaatggaatgttcgtccagacctgccgctcgatgggattggatgtcgttcacggcgatgcatttgaagtcctgcggaaaatgccaccgggctctgtctcggtaatcacctcgatgcacctcgtcgagcatcttccatttgaaacgatgattgctctgatcgatgaatgccatcgcgttcttcgccctggcggcatgctgattctggaaacccccaatccagagaacctgagcgttggtgctttctccttctacatggatccgacccatcgcaacccgatcccccctgaccttttgttgtggcttacacgctcccgtggcttcgccgacgtgcgaatcgatcgacttacccaggcgcgcgacgtcgtgtttccggagctgctggacgagagtcagccgggctcccagtcgatcaaccggatcctcgaacagttcagggcgccactggactacgcagtgatctcgcggaaaacctcgtaa

SEQ ID NO: 497844 - DNA, 3699 bp, Stenotrophomonas maltophilia
atgcggatagcattggatttgcaggcatgccagacggcatcccgccatcgcggcatcggtcgctacacgcttgatcttaccggcgcactgttgtccggcggccaaggtgtcgattactccatcggcctcgacggcacgtatccgcgcgaagcgaatgaagtgatggctgccctggatgggcgtctgtcgcgagacaagtggtcgcgctactactacgccggtccgacgcagccgcatgggcatcctgccgactgtctccggcctgctgcggaggtgctctgcatgaaccactatgccggtctcgcgccggacatcgtgcatgcgaacagcctgttcgaggggttcgtggaacatgcaggcggggtggcgggcctggcccaggtgccaggcgcgatcagctcggtgacggtctacgacttcattccgctggtcttttccgagcaatacctggacaacgccagttatcgctcatggtatcaagcccgccttcaggccctgcagcggttcgacgtcatgctctgcatttcagaggctacgcgccgggatgcgatgcgtctgctgggtatccccgccgaacggcttgcggtaatccatgctggtgttggcagcgagttcactgccaaggcgttgggggctgcggaacgtgagaacctgctcaagcgcttcggaatcagtggccgttttgtgatctacacgggcaacggcgacttccgcaagaacctgatcggcgccgtcgatgcgttcgcgaggattgcgccatccgagcgcaacggcgtgcagttggttcttaaccaagtcggtgacgaacaggcgttgcgtgccttcgcacagcatgcgggtctgtcggcgaatgatctggtcatcaccggcaaggtcagtgatgcggatctggttggcttgttcaggtcgtgcgaggcgttcttcttcccgtcgttgtatgaagggtttggcttgcctgtacttgaggccatggcgtgtggtgcgccgaccatctgtgccgacaactcgagcctgggcgaagtaatggcgcgcaaggacgcaacattcgatgcgtccgatgctgagggggcggcgcgcctgctgggtcgcgcactgaatgaccagcaataccgtggtgagctgcgtgagttcggcatcaagagggccgcggagtacacatgggatcgttctgccgcgctgtgcgaacaggcgtggcgtgaggcaatggagcggaaggcaaaggcgctgcgcgggccgcgcatggggcagggagtccgccagcgtattgccatggttacgccgctgcccccgcagaagagtggtatcgcggactacgttgccgagctgctgaccccgctgtcccgttatgtcgacattgatctctacaccgatgcggatcttgccgaaaccggtgatcttcgtttcagatacaggatccatcactggcgcgatcttgagcgcagtgcgggacgctacgcacatattgtctaccagttcggaaactcgcccttccatatgcacatggtggagctgctgcggaagcatcctgggctggttgtcctccatgatgtctatctcagctccatgttctggtacatggagagccatggcggatatcccgatgcgttcaggaaggcgctgctgacgtcccatggcagatccgccctggaggtcctgagggcgcaggggccgctcgaggcaagaatgcagttccctgcatcgctcggggtcatcgagggcgccgctggcattctcgttcattccgcacattcggccgaggtcgttgattcgttctacccaggcgcctcccgggcgatgatcacgcgcgcgccgatgccgttgcgcctcccggaagacgtcggccaggaaggaaagtcgctcgcacgaacggagcttggaatcacgcctgccgaacagatgattgtcagcttcggtttcatggccgacaccaagctgaatcatcttttgctcgatgcggtcgcctgcctgcccgcggagcgccgggccgatgtgcgccttgtctttgtcggtgggggcgacggtggcgagtacggagagcgcatccagcggaggatccagcagctgggcaatgacgtccgcgtagaaatcaccgggttcgtcgccgaggacacctatcgacgctatctggtcgcggccgatgttgccgtccagctcagggcggaaagccgtggggagacctccaaggctgtatacgattgtatggcgtatggtgtccccaccatcgtcaacgactacgctgggttccgtgagctctccccgttgggggtgcgaaaagtgtctgcccagccaagcatcagcgagcttgctgatgccttgtccttgctgctgtcaagtgaagcagcctgcaggtcgttgggaaccggcgcccgtggggaaatccgccgtcatcatgatcctgatctgaccgccagaacgtacatggatgcgctctggtcgtcggggcagacagtcaaggtgcgaaacggcagtctgttggccaattgtctggcggacgtgttcgaagaggcctctccaacagaccgtgagtatcacgcgcttgaaacgtcggtagccagcacgttgcaggcgcgaggcactccgcgtctgttcctggaccttagtgaagtcgtccactccgactacggcactggtgtacaccgcgtggtgcgcaatctggcccgcgaatgcctgcttggcgaacaagccacccggttcgtagtgcaccctgtagcgcatgtggctgatggcacgatggtgtcggctgaatcattcacccgtgacgtgctcggcgtgcccgacgcaggccgcagcccagtgtcagatatgcgggcaggtgacgtcctgttcctgcttgactcggcgtgggacaagactgagcgctttgaacactcgatcgcaaatgcgcatcgtgcaggggggcgcgtgggagcaatggtctatgacctcattcccctgcgccatccgcagcactgcgtggatttcatgccggcggtgttcgagcagtggttgcgctacgtcgttctcaactgcgacgtgcttgtctgcatctcccgtgccgtggcagatgacctgcaggcgtggatccgggaagtcgcgcccgagcagcgcagtggccagcgcatcgggcacgtccacctgggcagcgatctggtcgagcagggggctaaagctgagccttcgcgggtagtccgcaacgcgtttgcgaaacctgccgtcctgatggtcggcacggtggagccgcgaaaaggtcacggacttgcccttgacgccttcgagctggcgtggaagcgcggctccagcatggtgctggtgatcatcggcaagaaaggctggaacgtggaggccttggcgtccaggttgcgtgaccatcccgaggcgggcaagcgcctgctttggcttgagaaagtgagcgatgccgacctcgagcatgcttacgcctctgccgtggcgctgctgcaggcatcgtccgctgaaggctttggcttgccgattgtcgaggcagcccggcacggcgtgcccctgctgctcagtgatattccggtgttccgcgaagtggccagggagcatgcagcgtatttcacgctggatggtcctgagtcactggcaaggctgctcgtttcatcgcttccgccggcggccccagtcgaccttggcctgacgtggtccgaatcggcgtccaaattcatgcggctgctgcttaacgggggatgggactactga

SEQ ID NO: 497845 - DNA, 1041 bp, Stenotrophomonas maltophilia
atgagcatcaggaaggcaatcatcacgggcgttaccggtcaggacggtgcttacctgacccagttgctgcttgagaagggctataaagtctatggaacgtatcggcgtacgagttcggtaaacttctggcggctggatgaggtgggtgtcaccaaccaccccgatcttgaactagtcgagtatgacctgacggatcttggcgcatccttgtcaatggtgcagcggatccagccggacgagatctacaaccttgccgcacagagtttcgttggtgtcagctttgatcagccgagcaccacggcccagattaccggggttggcgcgctcaatttgcttgaggcgatccgcctcgtcaatccgaagatccgtttctatcaggcctcgacgtcggaaatgttcggcaaggtgcaggccgttccgcagatcgaagagactcctttctatcccaggagtccctacggtgtagcaaagctctacgcccattggatcaccgtcaactatcgtgaaagctacgatattttcgcttccagcggcatcctcttcaatcatgagagtccgttgcgcggccgtgagttcgtcacgcgcaagattaccgactcggtagccaagatcaaactggggcagctggacgtgctggagcttggaaatctggacgcgaagcgcgactggggttttgccaaggaatacgtcgagggcatgtggcgcatgctgcaggccgatgagcctgacacgtttgtcctcgcaaccaatcggaccgaaaccgtgcgtgatttcgtccgcatggctttcaagggggcaggcatcgacgtggagttcaagggacaggacatcgacgaagttgcagtggatgcatcgacgggcaagaccgtgatgcggatcaacccgaaattccaccgccctgctgaagtcgatctcctgatcggcaatccggagaaggccgagcgcattctcggctggaagccgcagacgacgcttgaacagctttgccagatgatggttgaggcggatctcaagaggaacgagcgtggattctcgttctga

SEQ ID NO: 497846 - DNA, 855 bp, Stenotrophomonas maltophilia
atggttgcggagctgcgcgcccaaggctgtcaggtaattggccaggggtcacgacgtggccctgatgacctgggggagttcgtagaggctgatctcagggacgaggctgcattgaccgcagctgtcagcgccgcccgtgctgacatggtggtgcaccttgctgccgtcgcctttgttgcgcacggcaatgcagaggatttctacaacgtcaatctgctgggtacgcgaaatctgctgtctgcgctggaacgttgtgaacatccgatagagaaggtcctgctggcaagcagcgcaaatatctatggcaatcgttcttcaggaacgttggacgagagcgcacccccctcacctgcgaacgactatgccgtcagcaagttggccatggagcatgtcgcggggctctggcgggaaaggttgcctattgtcatcacgcggcccttcaactacaccggtgtcggccagggggggcagttcctggtgccgaagatcgtttcccacttcgctcgccgggctccagtgatggaacttggcaacatcgaggtatcgcgcgatttcggcgacgtgcgggcggtggcgcgtgcctatcggcaacttctgcagtcgtctgatgcagtcggtcaggtcgtgaatatctgtaccggggttggccatacgctggcacatattgtcgagctttgcagtgcgctgagcgggcactcgctggaggtgcggatcaatccggcatttgttcgtgcaaacgacgtgaaggtcttggtcggggacaaccagcggctgctgcgcctgattggcggctgggacacgcccccactggagcagacgttggaatggatgctggcggcagcagccgctgagtaa

SEQ ID NO: 497847 - DNA, 951 bp, Stenotrophomonas maltophilia
atggctcacgatcaaaaacgcgtactggtaaccggcggcgccggttttctgggatctcacctctgtgatcgcttgattgacgcagggcatgatgtgctctgtgtggataatttctacaccggcagcaaggccaacgtcgacggcctgctgaagcatccgcgatttgagcttatgcggcatgatgtgaccttcccgctgtatgtcgaggtggaccgtatcttcaaccttgcatgtccggcatctcctgtgcattaccagcacgatccggttcagacgaccaagacgagcgtgcacggtgcgatcaatatgctgggtctcgccaagcgggtgggcgcacgcattcttcaagccagcaccagcgaggtctacggcgatccggagattcatccgcaggtggaaggttactggggacgagtgaacccgattggaatccgcagctgctacgacgagggcaagcgctgtgccgagacgttgttcttcgactactggcgccagcatcagctggaaatcaaggtcatgcgtatcttcaatacatacggcccgcggatgcatccgaatgatggcagggtggtgagtaatttcatcgtccaggcgctgaagggcgagccgattacgatctacggtgatggtacgcagacccgcagcttctgctatgtcgatgaccttgtcgagggtatgttgcggttgatggatagtccggctgatttcaccggcccggtgaacatcggcaatcccggcgagttcaccatgcttgaacttgcggaaacggtgttgcggctggtcggcggaacctccagcatcgagtatcgcccgctgccctccgatgacccgaagcagcgccagccggatatccgcttggccaaggcgaccttcgactgggagcccaaggtcggcctcgaggatggcctcaaggaaactatcgcctacttccgccatcgtttgcaggggtga

SEQ ID NO: 497848 - DNA, 942 bp, Stenotrophomonas maltophilia
atgatgcggaccgtcgtggtgatgcccgtgtacgaagatgtggaagcatcttcgatactgtttcggaacctggcagccagccaagggttggatgcctacgtcgtggccgttgatgatggttcagttcgacgcccactggatgtgtcagccattcaggcggctggtttggaaggcgtagtcatacgcctgcgtcgcaacgtcgggcaccagcgcgcgattgcgattggcctcagctacgtcgccgagacattcggcgacgacgtgatcgtggtggccatggattctgatggcgaggatacaccggaaagtatttcccagcttgttgagggacttgcgtccgatgaggttgacgtcgtcgtggccacgcgcagaagtcgtgtggagtcgctcaagttcaaggcgttctatgtcgtctacaagtggctgttctcgctgctcagtggtcggcagatcagcttcggcaatttcatggcagcgaaaatgccggcagtccgtcgtctggcttccatgcaggagacgtggactcatgtagctgcatcagtgctgagttccaagctgcgcatccagacatgcgcgcttgaccgcggctcgcgttatgccggtcgcagcaagatgaacttcgtggggcttgccctgcacggcttccgtgccttgatggtatttgccgaagacgtgctggtgagggtggggattgcgtgcaccctcgtggcagggctttccgtcgtcggcgggataactgcattgctgctcaaggcatccgggtttgcaaccccgggctggttctcgctcgcattcggaatcctgctgcttgtgttcctgcagactgcggcgcttactctgatcatcctgctgctgtcaggcatgctgcgcagcggcggggtgctgggtacgggcagctaccatgaatttgtggaagaagtgcgtcatgcccgccgctgctga

SEQ ID NO: 497849 - DNA, 399 bp, Stenotrophomonas maltophilia
atgcccgccgctgctgacggcgtgcttggcgggcaggtagtgcgctatctgataaatggcgtcgttgcaaccgccgtccattatggtgtgctgcagttcaacattgaagtgctccacgttcagttggcgagtgtggccaacgccattgcagcggtattcggcattacggtctcattcatcggcagccgttacttcgtgttccggggccagcagtcgagcgtcgtcaggcagggtgcgcacttcgtcctggtctacgtgctcatcgcacttctgcacgccgctgtcatgtatgtctgggccgattacctgggcatggactacaggatcggctttctgctggccaccggcatgcagatggtgctgagcttcctcgccaataaattcctggtattcaaatga

SEQ ID NO: 497850 - DNA, 600 bp, Stenotrophomonas maltophilia
atgaacaagtacctgcgcgcatttcttgcgaccgcgatcttcatcgttgcattgctgctgatctattacatacacatgcgttacctgagggtcaacgtagtgctgtatgccagcatcctggatgcactggttgcgctcgtagtggtctttgccggtctgcacctgctgaagtggttccgtgatttcagccgactcgaactgatccagttgggggcaatctggcttcttggcggctatctgttcgcgatatccgttcccaccgtgatcgatcgatcgctttcgttctacattctggagaagcttgaccagcgcggcggcggtattcgcgaagatgcatttaggcaggtgttcaccgaagagtatgtccgggagcatcacctggtcgaggtccgcctgaccgaacagctgcagtccgggacgatcgagattcagtccggttgcgtgaagctcactccgcgcggtaagcgtctggctggcttcagccgtttctatcgtcagaacctcctgcctacgcaccgtctgctcatgggtcaatacaccgacgccctgaccgatcccttcagaaacagccgaatgtcgtcagactatcggtgccaataa

SEQ ID NO: 497851 - DNA, 2067 bp, Stenotrophomonas maltophilia
atgtcgatctccgatcctcccgcaagcgcacggccgtacgctactgttgcctcgcgttggttgccgcccctgtttctgttcgccgtggggttgatcctggttccgtgggcgcatacatgccagttgtcctgcgtaccgggtgacatggcagatgctcgattcaacggcgtggtactggagcacttctatcgttggttgatcgggttggatgcgaacctgctcagtccttcgttcttctatccagtccctggagcactcacgttctccgacaaccactggggaacggcctggatctactctgcgtacagggcgctgggttgggatcgttaccaggcattcgacctctggtacctgacagggttcgtcgcgaactatgtggtgtgcaacgttgtcttccgtcggatgcacttttcgcccttggctagtgcggttggggcgttcgccttcacctttgccatgccggtccttgcccggcacggccacgctcagttgacttaccgcttcctgatgccggttgcgctgttgttgtggcagcgtttttctgccgacggacgctggcgctggatcgccgggctggccgttgcagtggtcgcccagttctacatctcgatctatctgggatactttaccctgctgctgcttgtggcgtggtgcttcgcccaatgggcgatcgaaggcgtgggtccgcgtcggtggatggctcaatggctgcaatggaagcagccatccgttcgccgtgagctggtcctggtggggattaccctcatggctgcggctgcagcgatgatcgtgctgatgtatccctaccttcattattcgaagttgtatggattcggccgtggggttgacgaagttctgtcattgcttccaaggccgcagagctacctcttggcggacttttccgcgctctggcatgttccaagcagctggatcgggcacgacgttccgatgcgccacgagcagcagatattctttggtgtgggcatactgggattggcagcgctgggcctgctgcgatccaagtcaggtgtgcgctgggttgccgtttcgtctgtcctgatactggtgcttctcacgctggcggttggcggccgttcgttgtatctgctgctggctgagctgccgggaatcggctcgatccgggccatggcccggatcggccttgtgctggtgctgccgctatcactgctggtggcactggggatcgagtccgtccgtaccagcgcactgccgtggaagatcgtcgctgggttgttcgcgctggtgatggtggtagaagccgcaacgctgcgcaccgacaagttcggcagggagcaggcgatcgaacgcatcgaggcactccgccaccaacttccccttacgctgccggagcatgccatcctgttcaacccggctggaccggaggtcaacccctccgtttccgagctggatggtgtcattctggcgcaggaactcggtaggcccaccctgaatggctattccggcaacatcgcaccgggataccaggcgcgagacggtatcgcgccctgcgtccaagccctgtatcgcattaccgctggcaccagcaacggggcagtagccgcggcggataaggtggctttgggtgtattggagaatatcgtcgtgattgatccgctgtcctgcacagtgcacgccggtgaggtactggatctggccaatgctgcaggcgtgtccattcaggttacgtccatgcgcaaacatgcttcgggcggttatctggtatcagcacgggtaaccaacaataccgcggtggctttgaatacccaggctgggcttccccagccgctgcggctttcctggcaacttttccacaacggcgctgccctggatccgggggcgtggtcttcgcgtgttgaacttggcggctctgggatcctcgcgccaggggaggtgcgtgacgtatcgttcctgataccagaggccgctgcggggcagcagatcgggatcagtgcagtgcttgagggccgagcgtggttgcatgatcacggtctcgttcccaccacggttcctgttggtgacaatgaacgctccatgccagttcactga

SEQ ID NO: 497852 - DNA, 1167 bp, Stenotrophomonas maltophilia
atgaaaattgcaatcgccggtaccggttatgttggcctttccaacggtgtgctgctcgccaagcaccacgaggtggtcgccctcgacctgatcgcagaaaaggtcgagaagctcaaccggggagagtcacctattgtggacgcggatatcgagaaggcgcttgccggtaggcaactcaacttccgggccacgctcgatccgcgtgacgcgtacgaaggggctgcgttcgtgatcatcgcgacgccgaccgactatgacccggtcaccaactacttcaatacgcgttcgatcgagtccgtcatcgcgcaggtcctggagatcaatccggcggcgacgatgatcatcaaatcgacgattccggtaggcttcaccgcaaaggcgcgcgagcagttcgggacccgcaacatcatcttctcgccggagttcctacgtgagggtcgtgcgttgcacgataatctccatccttcccgtatcattgtgggcgaccacagcgaggcggcgaggagctttgcatcgctgctgcaggagggggcggaaaagaaggacgtggcggtactgtttactgactccaccgaggccgaggcgatcaaactgttcgccaacacctacctggccatgcgcgtttcctacttcaatgagctggatacctacgcacaaacccacgggctggacagccggcagatcatcgaagggatttcgctcgaccctcggatcggcgatggctacaacaacccttcgttcggttatggcggttactgcctgccgaaggataccaagcagttgctggcgaattaccaagccgtaccgcagaacctgatccgggcaatcgttgaatccaatactacccggaaggacttcatcgccgctgatatccttgcgcgcaatccgaaggttgttggcgtctatcgactgattatgaaagccggatcggacaacttcaggtcctcgagcatccaggggatcatgaagcggatcaaggcaaagggcattgaggtgatcgtgcacgagcccgcccttgatgccgacgaattcttcaattcgcgagttgtgaatgacctggtggaattcaaggcgcaggcagacgtgatcatcagcaaccgaatggcagaggcgctcgccgatgtcgccgaaaaggtttacacgcgcgatcttttcggtgacaactga

SEQ ID NO: 497853 - DNA, 1404 bp, Stenotrophomonas maltophilia
atgacccccatcgttcccgtcattctttccggcggctcaggcacccggctgtggccgctgtcgcgcgaagcctacccgaagcagttcctgccgctggttggcgatgacaccatgctgcaggccacctggaagcgcgtcgcttccattgccggcgctgcgcccatcgtggtcgccaaccaggaacaccgcttcatggcggccgagcagctgcgcgagtgcaaggtgctgccgcaggcgctgatactcgagccggtcgggcgcaacaccgccccggccattgccatcgccgcactgcaggcgctggccagcggcgatgatgccctgctgctggtactgccgtccgaccacgtggtccgcaacgaagcggccttccacgcggcggtcaagcaggctgccatcgctgccgaaggcggcaagctggtcactttcggcatcgtgccgacggcaccggagaccggctacggctacatcaaggccgctgccggcgaaggtgtgcgcgcggttgatcgtttcgtcgagaagcccgacctggccactgccgagcagtatgtggcttccggcgagtacttctggaacagcggcatgttcctgttcaaggcctcgcgctacctgaaggagctggagacgctgcagccggcgatcctcgccgcgtgccgcctggcactcgacaaggcagcccgcgacaacgacttcatccgcctggatgccgaggcgtttgccgccagcccgaacgattcgatcgactatgcggtgatggagaagacggctgacgccgccgtcgtcccgctggatgcggaatggaacgacgtgggctcctggtctgcgctgtgggaagtctccgacaaggatgccgacggcaacgcctgccacggcgacgtgatcgcattggactgcaaggacagctacgcctacggcaaccgcctgattgcgatggtgggcctgcaggacgtggtggtcgtggaaaccgatgacgcggtgttcgtgggtcacaaggaccgcgtgcaggacgtcaaggagatcgttggccagatcaagcgtgatggccgcagcgaagccgccgcccaccgcaaggtctaccgcccctggggcgcctacgactccatcgacaatggcgcccgtttccaagtcaagcgcatcacggtcaagccaggcgctaccctgagcctgcagatgcaccaccaccgcgccgagcactggatcgtcgtgagcggtacggcggaagtgacccgcggcgacgaggtcatcctgctgtcggagaaccagagcacctacatcccgctgggcgtgacccatcgcctgaagaatccgggcaagctgccgctggaactgatcgaagtgcagtcgggcagctatcttggcgaggacgatatcgtgcgtttcgaagacagctacggccgcgcgtga

SEQ ID NO: 497854 - DNA, 1359 bp, Stenotrophomonas maltophilia
atgacgctcccgtgtttcaaggcctatgacatccgtggccgcgttccggatgaactggatgaacgccttgcccgccgtatcggcgccggcacagcggcgttgctgggcccgggaccggtggtggttggacacgacatccgcctgagcagccctgccctgctccaggccgccgttgaaggcctcaccgccagcggacgcgatgtcatcgacatcggcatgtgcggcaccgaagaagtctatttccagaccttccaccgcaaggctgccggcggcatcatggtcaccgccagccacaacccgatggactacaacgggatgaagctggtccgcgaggaatccaagccgatcagcggcgataccggcctgttcgatatccgcgacttcgccgcctccgacgcgccgctgggcgacggccagggcacggtcagccaggatgccgacaagtccgcctacatccagcacctgctcggttacgtggacgtggccagcctgaagccgctgaagatcgtcaccaaccccggcaacggcggtgcaggcctggtgatcgacgaactggccccgcatctgccgtttgaattcatccgcatccagcacgaagcggacggcagcttccccaacggcattcccaacccgctgctgccggaaaaccgtgcggcaacgcgtgatgcagtgcgctcccatggcgccgacttcggcatcgcctgggatggtgacttcgaccgctgcttcttcttcgattccgagggcaacttcatcgaaggctattatctggttggtctgctggccacggcactgctggcccgccagccgggcggcaagatcatccacgatccgcgcctgacctggaacaccgtggagatggtcgaacaggctggcggcgtgccgatcatgagcaagaccggccatgccttcatcaaggagcgcatgcgcgccgaagacgcgatctacggcggcgagatgagcgcgcatcactacttccgcgaattcgcctactgcgattccggcatgattccctggctgctgatcgcgcagctggtctccagcaccggcaagtcactgggcgaactggtggctgaccgcatgaaggcattcccgtgcagcggtgaaatcaacttccgcgtggatgacgccaaggccaccgtcgcacgggtgctggcacacttcgatgcgcagcagccgaccctcgaccacaccgatggcgtcagcgccgactttgccgagtggcgcttcaacctgcgcagctccaataccgaaccgctgctgcggctgaacatcgaaacccgcggcaatgaagcactgctgcaggaccgcatccgcgagctgaccgccctgattggcggcacgccagccaatcactga

SEQ ID NO: 497855 - DNA, 558 bp, Stenotrophomonas maltophilia
gtgaaagtgatccagacgcgccttcccggctgtgcggtcatcgaacctcgtgtgttcggtgatgaccgaggcttcttctacgagacgtggaatgccggacgatttgcagagcagggattacccgcccggttcgtgcagagcaacgtgtcttcgtctgcccggggtgtgctccgcggccttcattaccagtggccacgcccacagggcaaactggtaagcgtgttggaaggggaagtgtatgacgtggcggtggacatccgtcgtggctcgccgaccttcggccagtgggaagcggtgatgctgagcgcggagaacaggaggcagttctggattcccgaaggcttcgcccacggtttcgcggtgctctccgaaacggcgctgttccactatctgtgcaccgatgtgtacgtcgcggaagcagatgcgggcatccgctggaatgatgccgacatcgcggttgactggccggtgagcgcgccgacgctctcggccaaggatgagaaggcccccttcctgaaggacatcgccgaagaccgcctgccggtctacaccccatga

SEQ ID NO: 497856 - DNA, 3369 bp, Stenotrophomonas maltophilia
atggaggattgctcttggttggccccggtcccgatgacaatccccattccctacgacgaccaggacctgttccgctggttcgatgaagttacgctcggccgcagcgagcagtgcatcggcggagtctgcaacctgcaacgccacggcgacctgctcatcgccgacgtgcagggttcggcccgccacccatacagcgtcgaaatcgacctgggggccagcacccgcacgcctcgcagccgattgcagggtgactgctcatgcccggtaggccacaactgcaagcatgttgccgccgcactggtggtgtacctgctggacgatgacgtccaggtctctgttggtgctccggccggggaagatgatgaggacgacattgcatccgcattgaacagcccccctcgcccggagctgctggccgaactgtctcgctggcagagcaggcgcagccttccgcccaagccccgcagaaatggcgtcatcttcgatctctcgacatccggccatcggccctatgtggtgatgcgaaaggtggattaccgccccaatggcaccctcagcataggcaagtgggtggatatcaccgccgagatgctgctcaatccgccgggctacctcactccgcccgatatctcggtgatcgcccagctgtgggctgagcgacacgcgaagagcgccgggccgcgtatcgacatcaatgccacgctgcagctcatcatcgacagcggccacggctgggtttcgggccagcgtcatgaacgcgtgcctgcccggcgtggtcctgcgcggcacggcacgctgggctggcgcgtcgagtacgtggaagacaccccgttatcgacaccgtcgctgcaggtggagggcgaagccgaaggcctggtcatgggcagcgccgcaggctacttggatcccatcacaggtgaggtgggcccactgctgctggatgtgaaaaccgaggacgccgatttcttcctgggcctgccccacctgatgcccagcgaagcgcccgtggtggcacagatgctgcagcagatggacccggcgctgccccgccccaacacgcacgatggactccctaccctgcagatcagcaccatgacaccggtgctgcgcctgcacagttttgagttccgtccagcctggctcaaccgtcgcgacccctcgcactggtcggatttcgccacggtcgccttcgagtacgacgaccacgtgcgcttcctggacaacccgagcgtgttcgtccacgacgccaatggcgatctggcgctgttgccgcgtgatcctgccgaggaagcgcgccgtgagcgcgagctgcgcagcttccatcttcatcgcgacatggcgccacgggcagtcctgcacgacgccgggccgcagttcctgctgcgcagctacaactggacccagctgctgctgcaggacgtgccgcagctggaagcgcttggctggagagtggaggtggatgacgatttccgccaccgcatcaccctggtggaggacattgatctcgacatccagcccagcacttcggaagacggctggttcgatctgggcctggacatccaggtcgatggccgcacgctgccgctggctccattgctgcacaccgtgctgcagaaggatccgcgctggctacgcggacagatcgacgctatcgatgacgatgagaacgtgatgctgtcagccagcagcaacacccacgtggccatcaaggcggcgcggctgaagccggtcatcgctctgctggcggatctgttcacgcaacgcgacgcacctttgcgggtgtcggcgcgtgatcgtggccgcctgcgcgcactgcaggacgatgcccgcctgcagttcaagagcaaccaggacacccgtgcactggtgcaacgcctgttgcagacccctgccctggaggaagtcgtccccccggccggcctggccgcctcgctgcgtccgtaccagcgcgaaggcctgacctggctgcagtacctgcgccaacaggatctgggcggcgtgctggccgacgatatgggcctgggcaagaccctgcagaccctctcgcacatcctgctggaaaaggaatccggccgcctgcaacagccggcactggtggtggtacccacctcgctgctgcacaattggcaaagcgaagcggcacgcttcacccccggcctgcgcgtgctggtgctgcatggcaaccagcgtgcgaccgactttgcccgcatcggcgaacacgacctggtgctgaccacctacccgctggtgtggcgcgatgaggaagcgctgcaggcccatgactatcacctgctgatcctcgatgaagcgcagcaggtaaagaatgcgaagtccaaggccgccatcaccctgcgcacgctgcgcgcacggcatcgcctgtgcctgaccggtacgccgctggaaaaccatctgggtgagctatggacccagttcgacttcctgctgccgggtctgctgggtagcgaaaagcagttcaaccagcattggcgacagccgatcgagcgcggtagcgacccgcagcgcgcgcacctgcttgcccagcgcctgcgccccttcatgctgcgccggcgcaaggaccaggtggccgcggagttgccgccgaagaccgagatcacccgcacggtggcgctggaaggcgcacagcgcgatctgtacgaaaccgtgcgtgcatcgatggaagccaaggttcgtgaagccgtggccgcgcagggcctgggacgcagccatatcctggtgctggatgccctgctgaaactgcgccaagtctgctgcgacccgcgcctgcttcccggcgaaaccggcaaacgcagtgcgccctcggccaaactggacctgctgcgcgacatgctgccggagctggtggaagaaggccggcgcatcctgctgttctcgcagttcaccagcatgcttgccttgatcgcgcaggcgctggacgagatgggcctgtcccacgtgcagctgaccggcgacacccaggaccgggccacgcccgtgcagcgcttcatgcagggcgaggtgccaatcttcctgatcagcctgaaggcgggtggcgtgggcctgaatctgaccgcggcagatacggtcatccacttcgatccatggtggaacccggctgccgaacggcaggcaaccgatcgcgcccaccgcatcggccaggagcagccggtgttcgtctaccggttgatcgccgccggcagcatcgaggagcgcatcgccgagctgcagcagcgcaaggcggcactggccgattccattcttgaaggtggcagcgccagcggtccgcgcttcaacgatgaggacctggaagcactgttggcaccgctgccgggggtggtgccgaaggccaggcgggggcggccggccaggtag

SEQ ID NO: 497857 - DNA, 591 bp, Stenotrophomonas maltophilia
atgctgtttccgcctgacctgcccgatgccgatgtccggcacctgcccggctggctgccggccgctgccgccgatacgctgctgccgtccctgcagtcggaactgccgtgggaggtgcaccgcatccgcatgtttggccgctgggtggattcgccacggctgagctgctggatcggtgacccgcaggcgcactaccgctattccggtgccgagttcgtgccacatccgtggccaccgcggctgcaggcgttgcgcgagcagctgcaggggcagggcatcggcaccttcaacagcgtgctggtcaaccgctaccgcagcggtggcgactccatgggctggcacagcgatgatgagcccgaactggggccatccccgctcatcgcctcgctcagcctgggcgcggcgcgccggttcctgctgcggcggcgcgaggatacttcgcgcaaggccgaattcctgctggcacatggcgacctgctgctgatgggcggcagcacccagcgctgctaccagcacgcgctgccgaagatggcgcgcgtgcagggcgagcgcatcaatctgacgttccggtggatcaccccgcggggatga

SEQ ID NO: 497858 - DNA, 642 bp, Stenotrophomonas maltophilia
atgagcccgatgacccttccgcgcctgctgctggccgcatcggccgttgccctgctgggtggctgctccatccttggcagcggcgacaagagcccggtcaccctgtattcgccggcggtgcaggtgaaggtggacccgaactggccgcaggcggactggcagctggtggtgtccaagcccagcgccgcgcgcatggtcgacagcccgcgcatcaacgtgcggccgacgccttcggagctggagatctacaagggcgccagctgggcacaaccggccaccgacatcatggaagacaccctgctgcgtggcttcgaggattccggccgcctgcgtggcgtggcccgcaccgctgccggcatccgcgccgattacaagctggccaccgatgtgcgccgcttcgagtcggactaccagggccaggccacgccgacggtggtgatcgaagtcaacgccaagctgatccacaccaccgaccaacgcgtggtagccgaccgcacgttccgccaggcacagccggtgggcagcaccgacgtacccgcggtggcggccgcgttcgagcgcggcctgcagcagctggcgcaggatgtggtgggctggacgctggtgaacgggcagaacgacgcagcgacgccgaagcgttga

SEQ ID NO: 497859 - DNA, 378 bp, Stenotrophomonas maltophilia
atgcgtgccttgtcctgcctgggatgcctgctgttgttggccagtgccaacgcggtggccgggcccgtctacaaatggaaggattccaagggcgtcacccagtattcggaaacgccgccggccggggtgaagtacgaaacccgggaacaggcccgcagcacgcaaccggccgcagcgcccaccaccgaggccgcaccggttccagagcagtgcagcaccgcccgcgccaatgtaaccctgctggaaggcagcggaccggtgatgcaggacaccgatggcgacggcaaagccgacaccgccctgaccccggaacagcgcaccgcgcagaaggccctggccgaagccgccatcaaggcgtactgcccgcctgagggttag

SEQ ID NO: 497860 - DNA, 507 bp, Stenotrophomonas maltophilia
gtgagcgaggacctgcccgtgttgtggtccccggcccagcaggcctggctgcaggccatgggctacaccgtctaccacgacggccagctggccgccgagctggacgcggccctgcagctgagcgtggccgaggccgaagccgccgcagcaccggtgcgcagcgaagcgccccggccgccgctgcgcgagtccgatgcgtcggccgaacgcgggccggtgcggcacgaacgtgccgtaccgccgtcgcggaccccgcccgtggtggcacccgatacggcgcccgccgccacgcgcccgcaggccagcggtacggcgcggcagccgtcggtacggctgcccgaccggttgcagatcgcattgctgcgggcttccggctgcaacccgaacgacccggccacgcaggccctgatggacagctggccgctggaacaactgcgccgcgatccggcagccaagcgcgcgctgtggccgcagctgcgcgcgttgcgcaagcggggcgcgccgtga

SEQ ID NO: 497861 - DNA, 873 bp, Stenotrophomonas maltophilia
atgagcttccaacgctttctgccgtacatcgcggccgtgctgctttctgccggctgcagccggtccaccgtcgacttcgagatcgacaacccgacggatgcaccgctgaccttgtcggtcgaccagcaggtgcataccctgccgccgcacacctccatgcccctggtcctggagccgggccagtaccgactgcagagcgagaagatcggcagcgtacgcatggttgtctacgccgatgggatcggtgggttgatcaacccggccatggccgagtacgtgatcgtcaccgagcagtacgtcaccagcaagaccaactccggtggcctggcgtcgaagatcgaactgaacgacgtggagatcgagggcccctacgtgaaggcgaccggtttgttcattccgcgccgttgggacgttgggctgatgggggagctgcccgatacggtggtgtccaacagcccggaaacctcgtccgactaccggaccaagctctacaacgtgcccggcttcttcaagtacctggacgccggggaagacctgaaggcggccttcgggccgggcggctaccaggtgccggcggcaacggtggcattcaccccggcccaactgccggcgctcccggcggcctatgaggctcagggcaaaccgatgcgcgacctgtatgcgcgctatctggcggccaccgacgcgggggagcagaggcgcctgaagaaggccagcctgaagctgtggcaggacttcgtaaagacccgtgcgcagttgagcggacagtcggcggtggccgatgatgtgcaggccaatgcgtttgcgtccgccttcttcgacctctggacgcagccggcggtgatcctgccggacccggcgccagccggctga

SEQ ID NO: 497862 - DNA, 1530 bp, Stenotrophomonas maltophilia
atgaagccctcgcccctcgctaccggcatcaccttcgccctggccctggccagcctgcccgccttcgcctcggcagccgacgcccccgcttcgtccgtcaaggatctggatgcggtcaccgtccacgcccagctcgaccaggcccgcaacacgctgtcgccggacatcggcagcagccagtaccggatcaccgccgaggacatccagaagcagccgctgggtgcctccgcgccactcagccaggtactgctgcaggcccctggcgtggtccaggactcctatggcggcgtgcatgtgcgtggcgaccacgccaacctgcagtaccgcatcaacggcgtgctgctgcccgaatcgatctccggcttcggccagaccctggacgcgcgcaccatcaagagcatccgcctgatggacggcgcactgccggcgcagttcggcgagcgcaccgcagcggtggtcgacatcaccacccgcaacggtgccgagctgggcaatggcggcagcgcggggctgaccaccggctcgttcggcaagatcaatccgaacgcctcctggtggggcaaccaggggcgctggagctggttcctgaccggcaactacgaccagcatgaggtcggcctggagaaccccaccaactcgcgcaagccgctgcacgacgatactcaccagggaaaggccttcgccgacctcacctacctggtcaacgacaacacccgcctgagtgtgttcgccggtttcgccaacaaccgcttccagatcccggtcaacccgggccagacgccacagttcggttacctggacaccaccaccttcgactccagccagctggatgagacccagcgcgagaccacccgcttcggcatgctggtgctgcagggcacgctgggcagcaccgcgtaccagctatcggccggacagcgctacagcgacgtggcgttcaacccggacgtggtgggcgacctggtgttcagcggcgtcgcctcgcaggtccagcgcagcaaccgcgccaacaccctgcaggccgacttctcaacgccgttgggcaacgaccacacgctgcgctatggcctgtacggcaattacgagaacgcgcgggcgaacagcaacagctgggtgttcccggttgatgacggcggccagcagtccggcacgacaccgctgttgatccccgaccgcagcgcgttccacgccagtacgctggcactgtacgtacaggacgagtggaagatcggcgacgactggaccgtgaactacggcctgcgtggcgaccgctacaaggccttcggccgccccgaaggccagctcagcccgcgcgtgggcgtggtctggaatgccagcgacagcaccaccgtgcacgccggctattcgcgctacttcacgccaccggccagcgagttgattgccagcagcgacatcgcgctgtacgacggcaccaccaaccgcagcccagcggcggcaacaacacgccgctggccgagcgcagcgactactacgacatcggcgtctcgcagcaactgggcgagcacctga

SEQ ID NO: 497863 - DNA, 1020 bp, Stenotrophomonas maltophilia
atgcgacgcctccatcggaccctgcatgcccccttcgcctggctggcgctgctggtcttggccgtgccgttggtcgcccttgcgcaggacctgcagggcccgggcttcgcctactacgaagccggcgatctcgacgcgccccggcccggtccgcgcgcaccggccatgatgctgatgggcggtggcgaatgggtgccggaggccttccactggtggctgaagcaggctggcaatggccgtgtgctgatcctgcgcgcttctggcagtgatgagctgcaggaccgcctgtaccgcgagatcggcggtaccaccgcagtgcagacgctggtcttcgacagccgccgcggcgccgacgatccggccgtgctgcgcgtggttgccgcagctgatgccatcttcattgccggtggtgaccagtcgcgctacatccgcttctggaagggcactgcgctcaaccgcgcgctgaacgcccacgtgcgcgctggcaagccgattgccggtaccagtgcggggctcgccatcctcggtggctatgcctacggcgcgatggacggcggcagcatcacctctgccggcgccctggcggacccgatgggcagcgcggtgaccatggacagcggcttcctgcagatgccctacctgcagcgcgtggtcaccgacacccacttcgacaagcgcgaccggctcggtcgcctgatcgtgttcgtggcgcgcgccgcacaggacagtggcgaccccgacatcgtcggcatcggcgtcgacgaggacaccgccctgtgcgtggagcctgatggccaggcgcaggtctacagtgctgacggcgagggcaaggtctgggtggtcagccccggccgcgatgccgaccgcctggtcgagggcgagccgctgcgcttccgcgcggtgccggtaacggtggtcgccagcggcagccgcatgcgcctggatgacgtccaggccgaggccgactaccaggccgtggccgacgtcagcgatggcgagcttgagttcacgcttcggtag

SEQ ID NO: 497864 - DNA, 801 bp, Stenotrophomonas maltophilia
gtggcgctgatcaacgtgccgggcaccggcgtgccggaacttgcctacgtccaaccagatcatctgggcacaccgcgcgtggtgattgatccggtgagtgatgtcgcgatctgggagtggaacaacaggagcgaggtgttcggcaaccagattccgagtgccgatcccgatggcgatggtgtggcgttcgagctggcgctgcgattcccgggccagcaggccacggatgcgagtgggttgttctacaactaccagcgggaatacgacccggcggtggggcggtattcgcagagtgatccgattgggttggatgggggaatctcaaccttcagttacgcggatctcactccacaggctaaatcggacccgctcggattggcgacatggactggaaccatgacgtttgcgggcactggcgtagggattgtaggtggtgtgggtggtgcaagactgacccttacgtccgaatgtctcaatggccgtcaggcgtccgtcgaactcggctttgctggggttggcgtcggcactggatctcccatctccgtcaccgtctctaatgtcactctcactggaggcaacctgatgtatgtcgatccaagcgaattgctcggagcttcttccattctttcgttgggagcagcggccggtggggggggctctctgtcaaccctgaggattggcgatgtatcttcatttggaattggggggcaggggggttgggatgcctcggcgagctacctgattgggcgaagcagattcatggggaatggagttacctggagcgagtgcgaatgtcattag

SEQ ID NO: 497865 - DNA, 309 bp, Stenotrophomonas maltophilia
atgtcattagaatcagtttttgaagccctttgcatgctcgctatcgcaacgttgttgatagctttcgtttcgcgaatttttctggtttgggagttaaggagaaattcccctgaactgtgggacacccttggcagacctgcgatcctggagcgagatcatttcttaaccaagtatccgatctgcggatggaagcgggttcataacggcgcatcaggagtgcgcaagttgttcctcttggtgttctggttctcgttccttgtgtatctcatatcgctgattcccctgatcgtgatctggattatgcgctga

SEQ ID NO: 497866 - DNA, 657 bp, Stenotrophomonas maltophilia
atgaacgcggtgaagcagggcgatgccgtgctggaaagctacggttacaaccatcgcggcgagcgcgtgctgcgtactccagccggtggcgcagctcagatcacgctgtacgatgaggccgggcagtggctgggcaactactcggccacgggccaggcgcagttgcaggccatctggttggacaactatccggtggcgctgatcaatgtgccgagtaccggtgttccgcagctggcctacgtgcagccggatcatctgagtacgccgcgcgtggtgatcgatccgatgcgcgatgcggcgatctgggagtggaacaacaagagcgaggtgttcggcaaccagattccgaacgctgatccggatggggatggtggggcgttcgagctggcgctgcgattcccgggccagcaggccacggatgcgagtgggttgttctacaactaccagcgggagtatgacccggcagcgggcgctattcgcagagtgatccgatgggattcgacgggggggtatctaccttctcctatgtatcagctgatccagtgcaggcggttgatccgctcggactgctggccaattgcacttgcgtggacggtggagttcatatcgacatccctattcgcttcagtgctgagggagctactcctgagactttga

SEQ ID NO: 497867 - DNA, 390 bp, Stenotrophomonas maltophilia
atgagctcccgcgctcctccacaacagaacgcgatcggcctgcacgcctcggagaggtacaagatgaaagccaggcggattcttcggtatgggttggcctacgcggtgtcgtgtggagcactctggctgttcctgcactttgtgggcagggcgctttacgccttcgactcacatcaggttttcttctggctgtatgccgtcagccttctgttgctgggaattggcgcacgggttcccgccgctggccgcctgacgttcaggcggcttgccaagggggctggcttggggctgctcgcgggccttctggcccaggtcgtggtacttgtactggaagcctacagattcagcggattcaggccatcgctgctctggcaggtaccggttcgctga

SEQ ID NO: 497868 - DNA, 144 bp, Stenotrophomonas maltophilia
atgtgggtggttgtcgcggcggaatgcggcggtgagggcaaccagcactacgccccagagcggcgtgagcagcacgacgctgatcaccgtcagcgaaccggtacctgccagagcagcgatggcctgaatccgctgaatctgtag

SEQ ID NO: 497869 - DNA, 450 bp, Stenotrophomonas maltophilia
atgaagcgcctgactgccttttgcctcgcggccgcactgacatcctgtgcggcgcatccgaaccgcacgacgaagtgtcagccggcccaattcacttacatcggcaccgagagcatcgacgggctgacctatgggcgcttccaggtcagccacaacgctggtcagccgcttcagctgtgggtggatgagagacgcaggttgaactcaaggaccgctcgcgcagagatgaggcgcacaggcgaagatgcctggcggccttacaacgtgatccttgaggaaatcacaccgggagcgatcggggtgtcgatcgggcaggatgaacagcagagcgttctgttcgatggtgatggcctgttcctgcccggcgcatccagcgcgggcgcgaattactccatcgtggtacaggacgctgccgattgcgaacatcgctcggcaacgttcattccctga

SEQ ID NO: 497870 - DNA, 513 bp, Stenotrophomonas maltophilia
atgtgtcgataccgttctgccgcactgctgatgcgcgcctgtggcgtggtgctggttgcctgcacgccagcgccgcagccgccgcagacagcgggcgaagccgggcctgccgcagcggcgccggcgatcactgccgccgagcccacacctgtggctgcacgcagtgaatgcccccacccggaattcgatacattcctgaagcatttcggcaatgagatcgcgctgcaggaaaaggctactgccgatccgctgctggacagttacatcgatgcagaggccgagccggaaccgcgcaaggtggaaagccggttggcgctggccgatgtggagtggccggtgatgcccgatcctgccgcgttggccgggcagggccgcgaaatgcaggtcagcctcctggccgacgggcagcggcaggtgcagatccgtatgccggacagcagcgaccagcagacctacacctttgcgcagacgccgtgttggacactggtcaagcgtgaggacgagtcgatctga

SEQ ID NO: 497871 - DNA, 1080 bp, Stenotrophomonas maltophilia
atgcgcatgaccgccgctgtgctgggaatgatcctcacggtctccactgccatcgccgagggcagcgagacgcaggcggccggcgagcgccacggcgccaccatggtggccagcgcggctgtacgcgatgcgcagcaccacgacgcgctgcgctacacggtctggtacccagcgctggccggcagccgggaaaccgccctgaccatcggcccgcccgacgcaccgctgttcgaggttggacgcgcagcggtggatgctcccgtcgcgggggctcgcctgccgacgctgctgctgtcgcacggtaacggcggcagcgcacgcatgatgggctggctgggcacggcgctggcgcggaacggttatctggtgatcgcggtcgatcatcccggcaacaacggtgccgacgagatgacgctggccggcagcatgctgagctggctgcgcgcggatgatctgcgcgctgcgctggccgccgtgcaggccgatccgatcctcggcccgcatgtcgatccagaacggctgggcgtggtcggcttctcggccggtggctacaccgcgctgctggcagccggtgcacggcccagcctgcagcgactgctggccttctgcaccgcgcacccggatgacggcgtctgccaaccgcaacaggaggcggccacgcacacgatgcaggcgcgccgggccgctgcggcttcgcccgcgcttgccccctggatcgccgaggctgacgcacagcgcgcgattcccggcgtgcgtgccgtgttcctgctggcacccgccatcgtgcaggcgttcgcgcccgcgcagctgtccgcgttgcggcagccggtatcgatcatgttggggaccgcagacaccgtcgcgccaccggagaccaatggtgaggccgcacaggcgcagattccgcgcgcaacgctgcaacgcctgccggacgtgggtcactacgacttcctggcggcctgtaccgttgtcggcgggcagaggctgcccgagctctgcagcactgcggttcccaggacgaaaacccaccggcaggcggtggatgcagccacgcgattcttcgccgacgcactgcgctag

SEQ ID NO: 497872 - DNA, 387 bp, Stenotrophomonas maltophilia
atgatggaactggtacttgtctacctggtgctgcccgcggcgctgacactggccttgctggtgctgatggcgaagcgcgcgccgcgctggaagggcaatccctggctttaccgcgccggcttcgcgttcctggccgggttgctgtcacccacgttgctgatgggcggtcacggtgggctgcctggcccgaccatcggtggattggtgatggtgctgacgcggttggagtggatcggtgacctgcgcgccagcttcatcggctttggcagcaaggacttcgggttcctgtccgctcccttcctggtggtgttcgccctcacgatgtttgtcccgctgcgaacggcacggccggcgcacttcggcttcgccgacgatagcgacggttag

SEQ ID NO: 497873 - DNA, 2403 bp, Stenotrophomonas maltophilia
gtgtatcgttcgaagctctcgcgttccatcctccttgccctttccatggccagcgcaggaggcgcgatcgcagcggaagccgatgcggtcgatgccgcaggcggcaaccgcgccgcacccacccagctcgacgcgatgctggtcaccggtacccgcgcgtccaaccgcacccagttcgaaacactggcgccggtggacgtgttcaccaaggaagacatcacgtccgtcgaatccaccgacctgaaggacgtgctggcccatctggtgccctcgttcgtggtgcagcgcctgccgatggccgacggccaggtgttcgtgcgcccggcgaccctgcgtggcctgtcgccggaccagaccctgatgctggtcaacggccgccgcttccaccgcagcgcgctgctcggcaaccgtggtgcacaggcggccgaccttgcacagattccgaccagcgcgatcaagcgcatcgaggtgctgcgtgatggcgcgtcggcgcagtacggctcggatgccatcgccggtgtcatcaacatcatcctcgaggatggtccgggcaccgagatcaccgccggctattcgcagtacgcgcggggcgacggtgcttcgcgcgatttcagtgcgcgcaccggctggtcgctgggcgactacggcagcctggtgctgttcgccgaatcgtccaactccgacgccacctcgcgcacgcgccagcgcccggacgcgatcgccttccaggctgcacatccggagctggacgtgcccaatccggtgcagcgctggggccagccggaactggaaagccgccgcgtcggcttcaacgtgaaggccaatgccagcgagacgctggagctctatgccttcggcctgtacagccacagcgatggcgtcagtgatttcaactggcgcaacccggacaccaccaccggcgcgtaccgcaccacctccatcttccccggctggaacctgcgctcgctgtatccggtcggcttcagcccgcagtacggcaacgtccagaacgacctgcagctggtcggtggcctgcgcggcgagatcacgccgaagctgcgctgggatgtcagcgcctcgtatggccgcaacgccatcgactacagcttgaagaactcgatcaacgcctcgctgggtcccgccagcccgaccgcgttcgatctcggccgcctgacccagaccgagaagaacgccaacgccgacttcaactacgaatgggacgtggccgcgctgtccaagccgatcaacgttgcctttggtggcgagttccgccaggagacctaccaggtgcgtgccggtgatccggcttcgtacgccgtgggcccgggcgccgccgctgggctggaagccaactccaacggtgcaccgggcttctcggccagccaggccgggcagtggaaccagcgcagcaaggccgcctacgtggacatggaagtgccgctgggcgaacgctggaacatcggtgcggccagccgttacgaggacttctccagctttggcagcacactggatggcaagctgtcggcgcgctttgcgatcaccccggacgtggccctgcgcggcaccgtgtccagcggcttccgcgcaccgacgccggcgcagctcaacaccaccagcaccacccagggcctggacacgcgcacgctgcagatcttcaccagtggccgcctgtcgcctaacgatccgctggcgcagctgcttggagccaagccgttgaagccggaagaatcgcgcaccgcctcgctgggcctgacctggcgcaccgacctgggcctgtccggctcggtggatgtctaccagatcaagctcaccgatcgcttcagccagtcggccagcttcgccattccagccggcacacccaatccgctgggctacacctcggtgaactacttcaccaacgacttcgacaccaccaccaccggcgtggacgtggtcggcaactacctgcgcgacctcggcgccggccgcatgacgttgaccctggcctacaactacaaccgcacccacgtggacaacggcagcacctcggtggccaccaacgaaacccagcgcgtgctgttcgaagatcgcctgcccgagcacaagggcagtctgaccggcagctgggacatcggtgcttggtcgctgatggcgcgcatgcgctactacggcgcctggaccgattccagcggcaacgcggtgggcgacatctaccaacgcttcggtgagatgagcttcctcgacctggccgtgggctatcgcatcaacgagcaccacagcctgcgcgtgggcgccgacaatgtgttcgatcgctacccggatgaggccacgttccaggccagccgtggcctggtctactcgcgcaacgcgccgtacgacaccgacggtgccaacctgtacgcgcagtaccggctgaccttctga

SEQ ID NO: 497874 - DNA, 906 bp, Stenotrophomonas maltophilia
atgaatatctgctggaaccgcatccgcctggcgctggtcgccctggcctgcgtcggcctgtcgggctgtgactgggtgctgctggattcgaagggcatggtcgggctcgcccagcgcgacctgatcctgatctgcatcggcctgatgctgatcgtggtgataccggccatcgtgctgaccttcgtattcgcctggcgctaccgcgctggtaacaccaaagcgaaatacatgcctgactggtcgcactccaccaaggtggagatcgtggtctggggcgtgccgctgatcatcatcgcggtgctggcggtgatcgtgtggaagtcgacccacgagctggacccgtacaagccgctggacgtggccggtgagccgctgcacgtggacgtgatcgccaccgactggaaatgggtgttcgtgtatccggatctgggcatcgccacggtcaaccagctcaacttcccggccaaccgcccgctggcgttcaacatcacctccaactcgacgatgaataccttcttcatcccgcagctgggtgggcagatctacgcgatggccggcatgcgcacgcagctgcacctgatcgccaacgagcccggccagttccgtggcatgtccggcaactacagcgggcatggcttctcgaacatgaagttcatcgccaccgccagcagcaacgaagacttcgatcgctgggtggccgaggtgcgcagcgcgccggacgcgctcagcttcacgcggttcaaggcgctggccgcaccgtcgaagaacgcaccggtgcagcacttctccagtgttgaaccgctgctgttcaagaaggtcatcgaccagttcatcggcgtcggtgagaacaccgctgctgctaccccggcgggcgctgccggcggtgcccaggtttcccaggagtaa

SEQ ID NO: 497875 - DNA, 411 bp, Stenotrophomonas maltophilia
atgaagaatggacgccagcgtgcacgtgcgcgcgcagaccagaccccgctctcggttgccgccatccgcaaggtggtgctgtcgatgtaccaccgtcgccacgattactggaccgatgcggatatcgccgagctgctgccggcgctagccacattcaatatcaccacggtcaaacagttgcgcttgctgatgaagcggcaccgacgtgcgctgctgcaggaggaaagagtgaagatgcgtagggcgcagacactgcacctgctggctgaggatggtccctgtggcatcgatgtgcacgccaataccagcttctacgccatcggcggcctggtccgcaccagcatggaacacgaattcggcttcgagacgatgctgcctttccacgaggtgcgcgaggacgaacccgcgtag

SEQ ID NO: 497876 - DNA, 387 bp, Stenotrophomonas maltophilia
atgttgctgggtcatcctgttggcatggctcagtacaacccgcgaaccccgttgttcggcatccggggcccaggacggccccggaaggcgccgtccgtgacgcctgcgatcgacctggaggccgagtaccagttctggcacgtctacgagcgcgtggtccgtccgttgcccggtggggggctgcggctggcctggctggtgtgccagaaggtgtaccgggaccggtggcagcacccggaggacagcgacgaggcggcgttgtcgcgggtgctgtttggcgggaacatgacggctgaccgggcgtcggagctggcggagctccatgcgctggtcagccgtcgggtggcgctgctggcgaagcgtgggcgggtggattccgcggcgtga

SEQ ID NO: 497877 - DNA, 759 bp, Stenotrophomonas maltophilia
atgaagattgttgcagcacagatgcgatcagcccctggcgacatcgatggcaatatcgaacggcacgtgcacttcattgaacgggccgtctcgtgtggcggtgcggcggtcttctttccggagatgtcgctgaccggctatgagccgcggttggccgaacagctggcaatgaccccagatgacgcgcgtctggaggtattccagtctctgagcgatcggcaccagattctggtcgcagtcggtgggccatatcgtggcaacgatgggccggagatcggcatgttcgtcttccgcagcggtcaggcaccggctgtctacaccaagcagatgctgcatcccgacgaactaccttatttcaaggcaggaaccacgtccctgtcagtaaccattgggcaggaaattctggtccccgccatctgcttcgagtcgctacagatggaaagtgcactgcgggccaaggacgcgggagcgacggtctacgttgccagtgttgcaaagaacatgatcggtatggagcgggctcaccgccactacgcaacagtcgcgcgggagcttgggatgaacgtgttggtatgcaacggcgtgggccatgccgatggattcgagatgacgggagggtctgcagcctgggacaacagtggtgcactcagatgcagcgccggaactggagacgaggcattggtggtgtatgacctcgcagatcagagcggtagtgccgtgacactcccagcaatgggcacgctcgggagtgcgggctaa

SEQ ID NO: 497878 - DNA, 2700 bp, Stenotrophomonas maltophilia
atggccgacacaccggttttccagggacaccatctgatcgaacagaatgcgttcgaacaaagccagctgctgaagtcgcttgccaggagtggtcatttcacgctccacggttccgacaacatcctcaacctgcccgcgaaccccgcgctggcaacccggttgggtatatcgccgcactcgggcggcccgttgagtgcgtactcggatcaactgaagttcgttctcgacgacctcgcagaaacctacgatggccgagcgctgttggcgaaggattctgcgccggatgtgcgcgctgccgccgccgagcgtatggctgcccgcatccagaacctggagttcacgcttcgcgccggcatcctcaacggcgacctggtcaccaacacgccggagaacatgaccccggccgaagccaacgccaggatccgcaccttcttcgccgatctggacggctaccagcgcacccacgccgcgcagattgcggaactgaagaccctcaacccgaccgagttgcgctggcgcggcgtcacccactccgaagccaacgtgacggcggcgctggatgccatcgaccaatccggcaactccaccctgagcgagcgctgggggggccgcgcatcgttgggcaccgcaatccaggaggccaaccagggcggccgcctgccgctgagcgagcacaccgcggcccgcgtgcgtacggcgttcaacccggagatgccactgaccatcatgcgccctggcccggcaaccaccgctccggaactggccggctctgctgggcgcgctggcgctgcggaaggcgccgccgaagctgccgccgcgcgcggacagatcaccggcgcgcgcgtactcggggccgcgggtgttgccgcactggccgtggacttcgccatcaccggccaccgcgtggccgagttgcacagcgagggcaacaacgccggcgcaaaatccgcggccacccacttcgtggggcgcactgcaggcggcttcggtggcggcttcctgctgggcgcggggtacggattgttcaccggatcgtggaccgggccaggtgcgctggctaccgggctgctgggcggcgtggccggtggcttcggcggtgagtactgggctcagtaccaggacaagaaggcggtttacacccaggtggaccgcagcggcaacgaatggagccgcgatccggaagatgccaagggcacctggagccgcagcgtgcgcacaccgcagcccgacggaagctaccgcgagatcacgatggtcgccggtggccggctgctggatgagctgaactacaaagccgccaacgactcatattcactgggcatggccaacctgcccaggccgcagaaccccttcaagcttgatgcaggcggcgagagcacgccgccgcgcgagccgtttgaaaccaaccgccactacgtgcgcaatccgcacaacggcgaatggaacctctccatccactcgatgattgatggacgcgtcccttttgactacagcgtgcctgtcagcccggaaaagtcgggccaactggaacgggaatcgcagcgcatcattgcccagaacgccttgaacacgccggaggcgcttgccgcccgttaccaggtggcgttcaaccagtacaactggcacgagttcgccaccattgagccggtaccggaggtgatcacaaacgcgctgacccagacgcagcccctgcgcgcttccaacggcgagaagtacacgcaggaccccaacgggcagtggcaaacgccgggttggctgtatggcaccaacccggccgagggcagcatcgtcgaggagctcaatcgtacgcgccagagccagcaggccggcgtacaggagctgacgtccatggccgacatcgcccgggccaaccccacgccaaccgaatacggcctgcgcagccaggtggtggacgcctaccgtagtgccggcattgtgcgcagtgcagaagagattgatgacgccgtagccgccgttgcccaggatcacgcacgcgccgtgcccgacttcggtacgttcatgctgcaggtgcaaaaggatggctcgctggccacactggccgggaaagatgacgaacgcatgcagatcgtctgcgtcaccacgccacaggagattgcccaggcacacgtgcagcgctcgactgcggagcagcagcccgcggatgccctgccgcgcgcgccaacttcacctgagcccgcaccgagtgcatcgccgccacacacctccaggcctgccacgcagcacgacgctgacgtagaccggcaccacggcacggcccttcgcccagatggcagcgggctgctggaacagctgcgctcgtcggtagccatgctggatgagaagaacaacaagccgtgggaccagaacagcgaccgcctgctggccagcgcctaccggcttgcggcagaagccgggttcaagcccagcgacaaagttgacatggcactgaacgaagccaccgaagcccatgctgcgggctccacgctgttcgtgacgcgctcaggaccgggcgcgtcatcggaccccgccgccaaccgggtgcagatgccaacacaggaggccctggcggtcgcaccggagcagcagtatgcagcggccaaccggagcctcggcgctcaggatcgggagcagtcgcagcagctggcacaagcgcaggaacggcagcaggaagagagccggcaggggctgcggttgggttga

SEQ ID NO: 497879 - DNA, 666 bp, Stenotrophomonas maltophilia
atgatggaagcccccgtgaccgaatcgaccgccactgaagtttcagccgaagccgcatctcacaagggcgaattcttcctgatcgacgcaggcttgctgagcaacggcggggtacccggtatagagatcgccaacgaagacaagctgatcgatccggggatgaatgtcatctcgcgtcctgatggaacgccaggccagtatccggagcgcccccaccttgttcatgtacccgagaagggcgcaatgccacgcgatctggaagagctcgctggcatctggattgtgtcggaaccgttgaagcagctgtttgagcagatggacccccaggcgtttgcctttgtggcctgcgacttcagccttgccgacggcagccccgggccccagtactacctgggcaatgtgctgcgcaggctcgacgccctggatgaagcctcgtcccgcgtgagaatcaagctcgaccacaattatcagaccggcgaggacgagaagctttacagcctcgtcggcggcgccagcctggtgttcaaacaggacgttgtgggtgatgcccatatcttccgccaggatcgcatgggcgcaccgcccatctgcgaccgcgcgatgtttgatgcattgaatgccgccaacttctccggcgtacggctgcgcgatgtagccgatctctag

SEQ ID NO: 497880 - DNA, 597 bp, Stenotrophomonas maltophilia
atgaagaaccacggccttgccgctgcggcggtgtgcgcctcgatcatggcggcggtgtggatggggtggcccgagcctgcgggcgatcaggtgtgggcctaccagaagctgcggccggccgattaccgcctgctgcacagtgatgcgcttggcttcgtgaccgcgaaggcccacgagggctttgaactgcacgcgcgccacgccggggcgacgtccttcgagatccggtgcaagggcgtgctggtgatggacgtggagaacgcgccctcgcgcgtgctgatccgcatgcctgccgatgcacggtggcgggcgccggacatcgagcgtctgcgcaccagcttcgagcgttggctggatctgcaccagagccaggggcggttgctggtggaaagtgcggggccttcgtgggttgaggcacggcttgggcgccttgacaggtcggtgcctgatgaccagcgctgcgtgttcagggacccaggccaccctcggctggaatctccctcgtcattccgcctatccagcagaccattgcaggcagtggaaggaatggcagcatcatcctcggcattgttccgaaattccaaaagagccgcgtga

SEQ ID NO: 497881 - DNA, 603 bp, Stenotrophomonas maltophilia
gtgttacgccgcaatcgacttcttctgtctgcgggtctggtcccgcttccgtggttcctgctctggaccagcgttgccaccgtgttcgcaccgggctacaacccgcttgcgcagcacgccagcgagctgctgcaggcgccaacgctcgcaagcatctgcggcaggatcgccgccatcggctccggtgtgggcttcgtggcgtttgccatcggggtatggcgggagtccggtcggcggattgccgtaggcgcgatctgctggatggtctttggcatctccatgctgaccaacgggctctggcccatgggccatccgatgcacggcttctacaccatcggtatcgccaacatcattgcaccggcgatgtcgcacatcgaactgagcgcgtggtcggccaaccgaagggcgtacgccgtgactgctatggtgagcatcgcgggcatcgtctatctctggttgaacgtggtgggcgcggatccggaggggttcagggggctgacacagcggctgttctcgtcgatcaactcgctgtggccattcctggttgcgctgtacctgatgcgcagggattcaagcgcgctgaaggcggagcctgtgcattga

SEQ ID NO: 497882 - DNA, 288 bp, Stenotrophomonas maltophilia
atgggcattggaaacctcaacgaatcttctggcttgattggtgaaaccacgccgaatcttcattgggcgccccatatagccgcccctctgatcatcgtcagcgacaaaaagaatcctatcttcaccatccgcattaaaagtagggtcacgaaaaacatcgcccagcttgtgaactacgtggcgctcagcctcaatgtaagacttgggcaggtaccagatcttgtacccaagcaccttttcgccaccacgcccttctatcagcttatcgacattcatctcgcaacatga

SEQ ID NO: 497883 - DNA, 684 bp, Stenotrophomonas maltophilia
atgaaaagcccgtctttaattgacctcaccctggaggttggggaggtcgctatcgactcccttctcgatgatgggcttgccaaagacatccctttctttggcttaataatgaaggctaatgatgcggttacattaatcagtgccaggatatttgctgcaaagatatacaaatttcttaaggttattggacagacatcaaaagaggagcgggatcgcgtcattgacgatatatcccgaaaaaagggcggtaccgaggcggcgggaacagctatcctcgacctgattgatagacttgattcagagaaaaagccagaattcgttggcaaactattcaatgcatgtgctagaagggatattgccgtcgatgagtaccttcgtctcgcagatatcatatcgaaagtatatttgaaagacattgagctgctctcagatccgcacccgggcggactcgctacatcccagcagaagaatatattcatggccaacggtttgatgatcatggggataaagaatccgtcgcgcggcagtgagtcaggtgcaaatatgttgaaaattgcgtcggacatatacgagaagccgtttgatttgacctataagctcacgcgatcggcggcgcaaatatctctgcactgctttgggctggatcgcttttctgatcgcggcattgaaggtttcgttagctag

SEQ ID NO: 497884 - DNA, 900 bp, Stenotrophomonas maltophilia
atgccccgcgaaaacctcaacgacctgcaggccttcgtccacgttgcccgcgagggcagcttcaccaaggccgccgcccagctgggcgtgtcccagtccgcgctcagccatgccatgcgcggcctggaacagcgcctgggcgtgcgcctgctgacccgcaccacccgcagcgtgtccaccaccgaagccggtgcccgcctgctcgacaccctgggcccgcgcctggccgagatcgaggacggactggccgcgctggccgaataccgtgaacgcccggccggcaccatccgcatcaatgccaccggccatgccgccgagtacatcgcgtggccacggctggcgccgctgctgcagcagtatccggatttgaaggtggaactggccgccgactatgggctggccgacatcgtggccgagcgctacgacatcggcatccgcctcggcgaacgcctggcccgcgacatggtcgccgtgccgatcagcccgccgctgcgcatgcgcgtggtcggtgcacccggctacttccgccagcacgtggtcccacgccatccggacgagctggcagaccacaactgcgtgaccctgcgcctgcccacgcatggcgggctgatgccgtgggatttcggccaggacggcaacgaactgagcgtgcgtgtgagcggccagtggaccttcaacaccatgggcatgacccgcgccgctgcgctggccggcagcggactggcctggctgccggaagaccaggtgcagccgatgctggacgatggccgcctgcagtcggtactggacgactggtgcccgcacttcgatggctactacgcgtactacccgtcgcgccgccacgtcacggtggcgatgcgcacggtgctggatgcgctgcgcgggccgatggctggatga

SEQ ID NO: 497885 - DNA, 2022 bp, Stenotrophomonas maltophilia
atgacccgattcctcccacgccgctggcagcgcctgctgccggtgttgttcgctgccttcctgctgctgggtagcagcggttgcgcgatggttaccgtcaagcaggtcaagtccagcgattcgctggtcaacaagcgtgccgacgtgctcaacacgggcaagctcagcccggccgcgcgcgagacgctcagcgcggcaggcctggacgagtcgcagtgcgaaaaggacttcctggtctgccgcagcacgctgctgatgaccgacgacctcaatgtcgagcagcggttgtcggcgctgtccgaactgtgggtgaaggccgcgctggcgatgacgccgaagaagacggctgccggcgatccgccgatgagcgatgcggcattggatgcctggctggaagcggcgcgctatgcctatgcctacctgttctacagcggccgctcaccgtccgaccgtgccttcgaggaccgccagacgcaggtgcgcgactattacaactacgcggccgagaaggcagcagtggtgctgttcgtgcgcgcacgcgccgctgcgctggccggcgaggattacacgaagccgctcacggtcggcagctggtcgctggcctccaactaccagcagctgaacctgaagagcattcccgcgcagctggtgccggccggcacggtcagcttcgtcggcctgcgcagtacctatcgccgcgatggcttcggtgccgagctggtgatggtgatggacccgccgaagctggttgcaccggtgatcgcacccgaggggcccaaggccgaggcgtcgcaggaggatgaggacgacgcacgccgtggccgccgtcatcgccatgacgattcggtgcccgagttcagcgagatgtcctcgatcaacgtcaccgcactgctgcgcttcgagggcagcaacctggacgatgtgatgcgtacgcgccgggtcgagctggacgcttactcgcccgaagccaccgagcgcatcaccctgcatggcgagcaggtgccgctggccggcaacttcaccgccgcctatggcctgtggctggcgcagagcggtttcgcccggcaatcgctgcgcaccctgttcggcatgagcgagggcatcggcgaaccgcacatctacctgatgcagccgtgggatccgaatcgtcgcatcatcttcatgctgcacggcctggccagcagcccggaagcctgggtgaacctggccaacgagatcatgggcgaccccgagctgcgccagcagttccaggtgtggcaggtctactacccgaccaatgcgccgatcgcgttgaaccgctacgagatcgccaatgcattcaacgacacgctgaagcacttcgatcccaacggcagcacgcgtgcatcgaaggacatggtctacatcggccacagcatgggcggcgtgctggcgcgcctgctggtcagtgactcgggcgacgtactgtggaatgacctgctggccaactacgacctgaagggcgagcgcctgaagcgggtgcagaacaagctggggccgctgctgcatttcaaggcgcagccgaacgtggagcgcgcgatcttcatcgccgcgccacaccagggcaccgacattgccggcaacaaggtcgggcgcctgatcggtcgcctggtgcgcctgccgctgaccatcctcggcaagttcgaggatgtgttcctggcactggcgcaggccgaacagcaggtcgatggcacggccaagccgaagatcccgaacagcatcgacaacctcaaggccagcgatccgttcgtgaaggccgctgcacagctgccgatcgaagcgggcctgaagtaccactcgatcatcgcccagcgcaaaccggaactgccggtggacaaatccgatgacgggctggtgccgtactggagtgcgcacctgccgggtgcattgtccgagaaggtgatcatctccggccacagcgtgcaggagaccccgcaggcggtgctggaagtgcggcgcatcctgcatcgggacatcgatgatgtgggggccggtacgcggtaa

SEQ ID NO: 497886 - DNA, 1380 bp, Stenotrophomonas maltophilia
atgccgcgcccgcttacccgcatcgaatcggtcatccagaccgtccgcacccgcatcagtgcacgggtggatggccccggctcccgcctgccttcggttcgtgcgcaggctgcgacgatgggggtttcggtctccaccgtggtcgaagcctacgagcgcctggcggccgaaggcctgatcagtgcgcgcgcaggctcgggcttctacgtcagtggcccggccgcaccgctggcgctggccgaactggagccgcggctggatcgcgcggtggatccgctgtgggtatcacggcaatcgctggaaacgcccgcgggcgacctcaagccagggtgcggctggatgcccagtgactggctgtatcacgatggcgtgcgccgcggcctgcgccggctggcgcgtgccgatgccatgcaactggtggactacgccgccccgctcgggctgcccgcgttgcgccagctgctgcaaaggcgcagcgccacgcttggcatcgatgcaccggtggagcagatcctgctgaccgaatccggtacgcacgcggtcgatctgctctgccgtttcctgctcaagcccggcgactgcgtgctggtcgatgacccgagctacttcaattaccacgcgctgctgaaggcgcaccaggtgcaggccatcggcgtgccgtacacgcacagcggcccggacctggaggcgttcgcgcaggccctgcaggcacattcgccgcggctgtacatcaccaattccggattgcacaacccgaccggcgcggtgctttccgcgagcaccgcacaccgcctgctgggcctggccgaacgcagcgaactgatcatcatcgaggatgacatcttcgccgacttcgaactgcagccggcaccgcggctggcagcgctcgatgggctgtcacgggtgatccacgtcggcagtttctccaagacgctgtcggcagcctcgcgctgcggctacatcgctgcgcgccacgattggatagaggcattgaccgacctgaagctggcgaccagtttcggcggtggccatctggccgcgcagttgatgcacatcgcgctgaccgacagcggttaccgccgccacatgcagtcgatacgttcgcgcctggccgatgcacgccggcacacgctgcggaagctgcagatgctgggcatcacgccgtggctgcagccggaagccggcctgttcctgtggtgccagctgcccgatggccgcgacgccgccgcactggcacggcaatgcctgcgcgagcgcatcgtgctggcgccgggcaatgccttcagccaatcgcagcgcgcggccgactatgtgcgtttcaacgtttcgcagtgccaggacccgaggatctggcaggtactggcgcgcgcgctgcgttga

SEQ ID NO: 497887 - DNA, 777 bp, Stenotrophomonas maltophilia
atgagcgccgaccccagccccctacccgcccagcgcacccggcagatcctcgaggagctgcgccagcagggccgcgtggtcgccgccgaactggcgcgccgttatgccgtctccgaagattcgatccgccgcgacctgcgcgagctcgccgcccagggcctgtgccagcgcgtctacggcggcgccgtgctgccgccgcccaaggaacggccgctgcgcgagcgcctgacccgcgaccgcggcgacaaggccgagctggccgcccgcgtctgcgcgctgctgcaacccggccaggtggtactgctcgatgccggttcgaccaatctggcgatcgcccagcagctgccggccgctctcgggctgacggtgatcaccaatgccccgcagatcgccaccgccgccagcatgctcgaaggcacttcagtgcagctgatcggcgggcgcctggccagcggtggcggtgcggtcggtgccgaggcgttggcccaggtgcagcgcctgcgtgccgacgtgtacctgcccggcccctgcgcggtggacggcgacaccggtgtgtgggcaatggattcggaagaagccacgctgaagcgcgcgatggtggcctgcagcagccgcgtcatcgtcgccgccaccactgaaaagctcggtgcccgcggcaactggcagatcgccagcctggacgagatcgacgacctggtgctgaccaccaccgcaccgcccgccttggcggctcgcttccacgccgccggtatcgcggtgcaccccacgcctccctga

SEQ ID NO: 497888 - DNA, 1134 bp, Stenotrophomonas maltophilia
atgtcccttgccaaccgcgcgcgtgccgaacagcacgcgacccgcgctgcgttcttcattcccggcttcgccaccgcgttgtgggccaccctggtgccattcgccaaagcgcgcaccgggatcaatgacgccacgctgggactggtgctgctctgcctcggtgccggctcgctgctggcgatgcccttgtccggcgtgctggccgcacgcctcggttgccgccgggttatggtggccagcagcctgctgatctgcctgaccgtgcccggcctggcactggccggttcagcctggacgctgggcgtggtgctgttcgtgttcggtgcggccgtgggcgcgatggactgcacgatgaacgtgcaggccgtcatcgtcgagcgcgaagcacggcgggtgatgatgtctggcttccatgctttcttcagcattggcggcttcctcggcgcggccaccatgaccgtgctgctgtccgcacagttgccgcccttggcatcggtgctgatcggtgtcggcaccatgctgctggtgatgctgttgtcggcgacctactggcacagcgaacgcatgccacacgacacaccgatgctggccctgccgcatggcctcgtgctgttcatcggcgtgctggcgttcgtcgccttcctcggcgaaggtgcgatgctcgactggagcgcggtgttcctcagcgacgtacgtcgcgtcgatgccagcctcgccggcgtcggctatgtgaccttcaccctgaccatgacggtcgcgcgcctgttcggcgatgcactggtggcacgcgtgggccgccagcgcgcgatcgtattcggtgctctgctcgctgccagcggcgtgctggtgctgaccctggtcacgccgtggcagatgtcgttggccggatacgtgctggtcggccttggctgcgccaacatcgcgccggcgctgttctcgctggccggccatcagaaccgcatgccgggcgcgctggccatcaccgcagtttccacgctgggctttgccggcatccttgccggaccggcgttgatcggctttgccgcgaatcatttcggtctgattgctgcgttcatcggtgtggccacggccttgttgctggtggccgtgtccacacgttggctgcgggtttag

SEQ ID NO: 497889 - DNA, 1506 bp, Stenotrophomonas maltophilia
atgacgttgcgatccaccgccaagcgctggacctatctggtgcaccgctggctgggcatcggcggatgcctgctgatgttgctgtggtttgtcagcggcatggtgatgctgttcattggttacccgaagctgacacccggtgagcggctggcggcgttgccggtgctgggggatgctcgcgatctgcaggggctgtcggtactgcctgccgtggtgcaggccgagccggaggttgtggcgctgacgacgctgcgtggcgagcctgcgtacgtggtgcgcaatggcagcaacgtgggcgcctggtctgccgtgaccggccaggcgctgctgccggtgtcggcacagcgagccgaagcatccgccgcacagttcgcgggcggccaagccttcgtcggcgcgacacgcgtggatgaagaccgctggacgcattcgcgtgcgctggatgcgcatcggccgctgtaccgggttgaagtgggcggcgcgcagccaggggatgtgtatgtgtcctcacacaccggcgaagtggtgcaggacgcaccgcatgtgcagcagcgctggaactatgcgggcgcctggctgcactggttgtacttcctgcgcatgcagtcggtggacccggtgtggacgtgggtggtgatcgtgctgtccgcgctgtgctcggtggcagcgatcagcggcatcgtggtgggtgtgtggcgctggcgcttccgcgggcactaccgcactggcgcgaagacgccgtacgtcgagccctggatgcgctggcaccatctgatcgggctggtggctgcggccttcatattcacctggatcttcagcgggctgatgtcgatgaatccgttgggagttttcagcagcacgcgtgaagcgatcgacagcggacgctatcgtggcggtacggtggcggtggatggcgcgttgggtgaaccggcggcgctgctggcggccgtcgacgacgcgcgcttcaagccggtggagttccagtggcgacgcatcgatggtgagctgttcgcggtgttgctggacgggcagggcgagacccgcattgtgtccggcagtgatggtcatctgcaggttgcgcggttgctgccggccgcatggctgcagcagaaggtgcgggcgttgtccgatgcgcccgtgcaggggtactgggtccagcatgcagcggatgcgtacttctacccgcgtgcaccggaagccatgaacggcgcagcggtacgccgcttcccggtggcggtcgctgattttgacgatgccgaggcgacgcgggtctacctcgatctggccactggcgacccgttgctgacgatggggcgtcgcgagcgcgtgggtcgctggctgttccacttcctgcacagctgggacctgccggcgatgctgcgtcaggtcaccgcccggctggcggtgttgctgctgctgagcctggctggcgctgcgttgtgtgcaacggccacggtgatcggctaccgccggttgcggatgaagctgcggcgcaggcggcgctga

SEQ ID NO: 497890 - DNA, 2139 bp, Stenotrophomonas maltophilia
atgaaaacgaaccccaactccgcgcgcctgcgccgggcgacgctgcctgccatgtgcgcgttgctcctgcacaccgcctctgtacttgccgccgatgcggcaccaccgaccacgctggataccgtgcgcgtggtcgatacccgcagcggcgagctgtcttccacctccagcgcaggctctgcgttgggcctgagcgtgctgcagacaccggccagcctgacggtgatttcgcgcgagcagctggaacagcgcggcgacaccaacctcaatgatgcgatcagccgcgccggtgcgatcagtgcgatgccgcacccgggcaacggcctgagtgcgctgtccagccgtggcttcaccgatggcgcttccgtgatgcgcctgtatgacgggctgcgccagtatggcggcgtgggcatcacctttccgttcgatacctggtccatcgagcgcatcgaagtgctgcgcggtccggcttcggtgatccatggcgacggtgcgatcggcggcgtgatcagcatcgtgccgaagaagcccacgcgtggggcaatcgagaacgagatcagcgcaaccgtgggcagcgaggacaccgcacgcctgggcttcggcagtggtggcgcgctgacgcccgagctggcctaccggctggatgtgagcggcaactacagcggtggctgggttgatcgcgggcgcagtagtgatgccaccttctccggcgcactgctgtggcaaccgcgtgcggatctgcagctgtcgctcacccatgcggaaggctatcagcaaccgatgcgctacttcggcacgccactggtggatggccgccagctggaggcgctgcgccaccgcaactacaacgtggaagacagcgacatccgctaccgcgaccgctggacccagctcgatgcgctgtggacgccgaacgcaagcgtcgaatggcgcacgcgcctctaccagatcgacagccagcgcgattggcgcaatgccgaagcctacgtctacaaccgcgctaccggcttgatcgatcgctcaggcaataccgagatcacccacgaccaggaccagaccgggttgacctcgacgctgagggtacaggggaacattgcgggcctggccaacagcttcgccgtgggcctcgatgccaaccgcgcgcacttcaagcacaccaacaacacctatgccggcagctcgggcccggtcgatccgttcgatccggtgccgggccagttcaccagcgacgcgccgaacctgccgcgctaccgtaatcgtgccgagcagtacgcgctgttcgtggaagaccgcttggcgctgagcgagcgctggtcgatgctgggtgggctgcgccacgaccgcgcgcgcattgatcgtaccgatctgatcagcggccagaacgcgttctcgaagacctaccgcagcaccggctggcgtgcaggcacggtgttcgcgttgcggccgacgctgagcctgtatgcgcagtactcgcaggcggcggacccggtcagtggcctgttgatgatcagcccggccaacggtgccttcgacctggccaagggccggcagatcgaggtgggcctgaagcaggccttcgatggcggcgagtggacgctggcggcgtaccgcatccgcaagaccgggctgctcagccgcgatccgctggtgccggatcgccgcgtgcaggtgggcgcacagacctcgcgtggcattgaggcgtccttgaactggaacttcgcgccgcgctggtcgctcgatgccaatgccacggtgctgaaggccgagttcgaggacttcctggaaaccaccggttcgccggcggtgctggtgtcgcgtgatggcaacgtgccaccgaacgtggccgagcgcctggccaatgtgtggctgagctggcagtttgcaccggactggagtgcggcgggcggcgtgcgttacgtcggcaagcgctacgccgacaacgccaacaccttggagctgcccggctacagcaccaccgacctggcactgacctggcaggcggcacagcgcacgcggctgtcggcgcggctgttcaacgtgttcgacaaggcgtactacgccaccgcgtactacaccagcacgcagtggctgctgggtgcggaccggcgcgtcgaattcaccgttgatcatcgcttctga

SEQ ID NO: 497891 - DNA, 387 bp, Stenotrophomonas maltophilia
atgctgctggtgctgcttgccccgctggtgagccgctggctggcgcatggtcacgttgcagcggctgtgccggtagcggcgatggaccattcccagcatgcgcagcatgcgatggagggccatcacgaccaccacgcgatggcgatgcagcagggcgaggtcgcaaagaagccgcccgccgatccacacgccgcgcatgagatgggcgtggactgcgactactgcctgatcgccgcgcggctgatcaccctgctggtggcggcattgctgctgttggcaccgatggtatcgatatgccgtgcgctgcgtggtgcagtgcaggcgttgccgcagcgggtcagcggcacattgggagcgcgtgggccgccggtcttcatggctgtctga

SEQ ID NO: 497892 - DNA, 255 bp, Stenotrophomonas maltophilia
atgtctctgaacagcaacgacgctggcttcaccgaacgcatcgccggtttatcggccgagctcgccgtgctggtgagcctggtggagaaccacatccatctgcagctggctgatctggccgactcgggtgatgtggatgcacaggagcgatttgcggtagccgatccggagcgctggttggagaacgcccgcaacagcctgcaggcgggtttcatgttcctggagcgcgcggtgcagcaaccggcgcggttctag

SEQ ID NO: 497893 - DNA, 225 bp, Stenotrophomonas maltophilia
atgacggacaccatcgacgaagcgcaggaaatggaagcgcgccacctgcaacgcgccctggcccagcacgcaacgcgggccagcaacgttgcccctctcactcccatgggggaatgccacaacccggactgcagcgaggacttcgacaacgatccggcaagactgttctgcgggcctgcctgtgccgagcgtttcgaagccatccatcaacaccgcaacgcatag

SEQ ID NO: 497894 - DNA, 2337 bp, Stenotrophomonas maltophilia
atgcacacaccgcatcccacgcaggacatcgttcccgcgttcctgcaggccatgcacgcgcacggcatcgtgccggacgcgcgcggccgcgacgcgctcaacgccgatggcacgctggtgcgcttccatgtggaaggcgaccgtcgtggcacgcgtaatggttgggcggtgttgtttggagaccacgtgccggccggcgagttcggcagctggcggaccggcacccgccatgcctggtgcgcgaaatcgccgaccgcgttgagcgccgccgagcagcgtgccatcaggcaacgccaggaggcggcccgcagcgagcgcgaacggcatcagcgcgaacgcgaggacgccgccgccagggcggccaacgtgctgtggaaccgagccattcctgccgatgcccaccacccctatctcgtacgcaagggcatccatgcacatggcctgcgtgtggcgccatggccggtgcgcaacagcgatggccttgtcttccgccacatcgacaacgccctgctggtaccggtgatgaacagcgcgggccgtatcgtctcgttgcaggcgatctttccccgcgtggatccagcacttggccgcgacaaggacttcctttccggtggccgcaagcagggctgcttccatgtcatcggcaagccggttaccggccaaccgatcgccattgcagagggctatgccaccgccggatccatccaccaggccacgggctggtgcgtggtggtggcctgggatgcaggcaaccttggcgcggtcgcccgagcctggcgcggcgccatgccggacgcgtcattcgtgctgtgtgccgacaacgatcagtggacgcggcagccgctggacaaccctggcgtcaccctggccacgcaggctgccgcggacatcgatgcccgcgtggtctggcccgagttcgccacgctgcatggcgacgatgaccgccctaccgacttcaacgacctgcatctgcgcgaggggctggacaccgtgcgtgcccagttgttgccccccatgccgccggcagggggcgacgacgtggcactggacgatgcgccgtcatcggccagcgcgcgctaccaggtgcctggcaacctgtccgcattcgatgccttcaccccgtttcccgataccaacgcgcgcgggcggccgttgccaaccgcccgcaacctggccgagctgtgccgtcgtaccggtgtgaccgtgcgctacaacgtcatccgcaaggatctggagattctggtccctgggctacagacgaccgtggacaacgccaaggaagtcgcggcgggcgaagtgatggattgcatgcaccgcgccggcatggccaccgccagcttcgagaccaacctgtgccaggtggccgaagccaatccctacaacccggtcgccagctggatcacctcacggccgtgggatggccagtcccgcctgcaggcgttcttcgacaccgtgcaggaagccaagcccacgcacatggccgacggccgcgtgctgaaggaagtcctgatgcggcgctggctgatctccggcgtggccgcggcgtttgagcccgatggcgtggtcgcgcgcggcgtgctgacgttcgtctcgaaacagaacctgggcaagacacgctgggcgcggcaactggcgccggcggagctgcaactgatcgctgacggggtggtgctcgatccggccaacaaggacagcgtcaagcaggtcatctccaagtggatcgtcgaactgggcgaagtcgatgccaccttccgccgtaccgatatcgcggcactgaaatcattcatctcgcgcagccatgacgagatccgccgcccctacgctcgcaccgaatcccgctatgcacggcgcaccatcctgtttgccagtgtcaacgacgaacgcttcctccgcgatgccaccggcaacacccgctggtggaccgtgcacgccgtagcgttgggcgaaccggcgcggatcgacatgcagcaggtctgggcagaggcccatgcgttgtactgcagcggcgagacctggcacttgagtgccgaggaactggatgcgctgaatgcaaccaacagcgaacacgaacccatctcgccgatcgccgaactgatcgatcgccatttcgactggtcgctccctgccgaacactggagcgcgcattaccgcgccacagagatcgtcatcgcggtgggcatcgacaagcccaaccgtcgcgaggtgaacgaggccgccgcctacgtggtcaaacgccatggcgtacgcacccgcgtggtgggcaaggaacgcgccaaagtctggctgatgccagagcgcagacgcactctcgccgagcatgcggcaggcccgttctag

SEQ ID NO: 497895 - DNA, 276 bp, Stenotrophomonas maltophilia
atgccacgcatccatgatggtcgcgacgttgacagcagcagcgacgactggcgcctgcactgcgaagcacgtcgcctgctgcaactggacggctaccggcgcatgggcaacgacgggcgctggacggcggtcagtccgcgccggcatcgccagcagtatctcgagggtatcctggccgcacgcggcgcggttgagcgtgagcgcctggcagcagcggcattacggctgtggaccgccagcccgcccggccaaccgcaccacgctgaaagtagatga

SEQ ID NO: 497896 - DNA, 228 bp, Stenotrophomonas maltophilia
atgccccgtccccgactgcatgccttcgaaggtgagcagctgaccgtgcagcagatccaccagcgggtaccggtgctgtccgagcggaccatccgcgaccaccttgctgccggccggcgtacccgcaccgccatgttgtgctttgacccgatcgccgcagcggcccggggagggcgcatcacccagcgcatcctccgcgcccgcaccgtcgtcggtcgcgattcctga

SEQ ID NO: 497897 - DNA, 639 bp, Stenotrophomonas maltophilia
atgattcccgcctccctcgacagcggtcatcgcctgattgccgacacactggccgcgttccgtgccggccctggactgggcagcgttgccctgcggccggcgccacgctctcgtgtgccgctctacatcggcatcgccggcagcaagcgctcgggcaaggacacactcgccaatggactggcgtcggcgttgtcactgccatgcgacagcttcgcggccccgctgcggcaattggtcgccaccctcctcgggctctccctggacgaactggacagccgcaaggaggacgccatcgactggctggccgaactcaccccgcgccacctgatgcagaccgccggtaccgagtgggggcgtgaccgcgtccatcccgagctgtgggtacgctcgctgttcgcacgcctgcccgagggcgggctggtacccgacgtccgcttcgccaatgaggcccgcgcgatccggcgccgtggtggtgtcgtgatccgcgtcaatcgcccaggccatcgcagcagcgaccctcatgccagcgagcagccgctgccgcatgagctggtcgacatcgaagtcgacaacgacagcaccgcggccgatctggtccgcagatcgctggaccagctgctttcgcgcggtgtgatctga

SEQ ID NO: 497898 - DNA, 384 bp, Stenotrophomonas maltophilia
atggaggtcgaacagttcacgtcgacgcgcctgaaggccatcgagttgttcaagtcccagcccaagggcagcaaggacaccgtgagcctggatgcgatcttcatctcgctgtgcacgctggccactgcccgggcaggcgctggcagcgcccagcaggcgcgtaccgtggcccgcccgggcaaccagcagccgcccgcgccatggttcgtcgaaacccttgcggcccttaagggcaagggcgagtcgatcaccgtggcgcgcttcctgatgttcgccaaccgcttcccggtcaagcgcatggaccaggtcaacgcggcacgctggctgcgcgacgccgggtacatcccccgcaagaccggcggcaacctggtgttcgatctttga

SEQ ID NO: 497899 - DNA, 450 bp, Stenotrophomonas maltophilia
atgccactgaagacatcctccatgaacgccctgcccgacagcatccagaccctggccgaggtcatcggcgaatccgcagccctcacgctggtgcgtgcctggccgccgaccacctccagcaccaccggccgtcaccgcgtcatcgtctacgtcccctccaccctgcccgaccagcaccggctgatcgacatccttggccacgacgtcgcccagcggctggtcgcgcacttcggcggcgaactgttgttcctggcatcctgcttcgctgccggcgcgcacgaacgccgtgaacagattgcccgcgcggtcgccagcggcatgccacgcgaccatgttgcgcgtgagttcggcgtctcacagaccaccatcaagcgcgccctgcgcggtgcgcgcaccgcgttgccaccggctgtccacccggccctgctcaagggatacgcacgcgcatga

SEQ ID NO: 497900 - DNA, 351 bp, Stenotrophomonas maltophilia
atgaacgagagcgacctgctggccggcgtgccggattgggccaagtacctgggcgggacctcgggcgtgctgatcgcggtgtcgctgtggctgcgccagtggttgtcgtcggccaaggtcgaccgcaccgccgatgaagccaccagcaacaccctgcgcacccttcaggaacagctcgcggccgaacgtacacgcgccgatgggctgatgcacgagcgcgaggcaatggcccaggagatcgggcagctgcgcggtgaagtcagcgccctgcgtgcacagatcgcccagcagagcgtacagatagacgctctgttgaacctggttcgcaagcagccgggggccgccgcatga

SEQ ID NO: 497901 - DNA, 486 bp, Stenotrophomonas maltophilia
atgaccgccgctgcagccagcgccctcggtggcgccaacgtcgccgcattcctggacatgctggcggtatccgaaggcaccgacattccgaaccagcgctcacgtgaccgcggctacgacgtcatcgtcggtggccagctgttcaccgactaccgcgaccatccccgcgtgctggtgtcgttgccacgctatggcatcaaatccagcgccgccggccgctaccagttcctgcgcagcacctgggatgacctgcgcgcgcgactgggtctgcctgacttcgggccagtctcccaggaccgtgcagcagtcgccctgctgaaacagtgcggtgcctacgagctgatccggctgggacgcttcgatgccgccgtcaccgcggcccggcgcatctgggcatcgctgccgggcgccggctacggccagaaggagcacgcactggaaacactgcgcgcggcgtaccgtgccgccggcggagccctgcagtga

SEQ ID NO: 497902 - DNA, 378 bp, Stenotrophomonas maltophilia
gtgacgcttgcggcactgaggttgggcatcgggctgctggtccttgccggcagccacgcgagctgcgcctggctgggatggaccctgcgcgaccgcactgcggaccttgccgttgccaccacccgggcagcgcagcaggaggcccgcgccgatgcagtccagcgcgcgcaccagcaggccctcgccaacagcgccgcaggcgcgcaggccgaatcacagcgcctggcccaccaggcccggcacaccgaacagttcaacaccctgcaacgggacatcgagacccatgccaagactcctggtcgtgatcgcggcgacgctgacgctgagttcgtgcgcatctggcgcgaggccaacgccggccacgccctgccgcgctga

SEQ ID NO: 497903 - DNA, 555 bp, Stenotrophomonas maltophilia
atggcgaacgatcccttccctcccacgctcgatccgctgattgccgcgatcgaagccacgatccgcgcacgctttcccgggtttgcaagcgtcgagttccatcgcgacgccaacgccgaggggatgcccctgccggcctgcctgctggcgatgacccgctgtgaccgcagcagggacaacaatgatggcagtggcctgctgcaggccacgctacgcttcgaagcgcgcattgcgctgccggcgaccgatgcaagcacagcgctgcagctgcgcaacgcggccctcgccctggcgacctggctgcaccagctcggccgcttccccggcgttgccagcggtgcgatcgatgtgattgcagcattgccggaagacgccgcggcggcacagccgggcctgcgcacctggatcgtcgagtggtcactgccggtcgcgctgggcgacaacccctgggacgacgctggcggcgtggtgccgcaggcgtgctacagcttcgcgccggagatcggccgcgtccatgagtcccgctaccagccattgccggagcgcgcaccatga

SEQ ID NO: 497904 - DNA, 591 bp, Stenotrophomonas maltophilia
atgagcgctgaacacgcgcggttgatcggcaacctgctgatgatcggtgtggtacgcgagctggacgaggcaaacggtcgcgttcgcgtcgatgccgacggcatgcttaccgactggattccctggctggaacgcggcgcgggaccgggcgtacgcacctggtgcgcacccgaacccggcgagcaggtcgtactggcgtgcccctatggcgaccccggccaggcgctggtactcggcagcctgtaccaggaccgctttccgccgccggccgactcgcgcctgcggcagcgcaccgcgttcgccgacggcagcagcgtcgagtacgaccaggaaaccaccacgctcaacgtccatgtcggcagcggcaaggtcatcgtcacctgcgcgaatgcacaggtgatcgccagcgaaacgatcgtgctcgatacaccctcgatcaaggcgaccggcgatctggatgtcagcggcgcgatcagcgccggcaaggacatcagcacaccgggcgaagtcaaggccggtgccatcggcctgaaggcacacacgcacaccgcacagggcccaaccgccccgaccacgccggcccaggcctga

SEQ ID NO: 497905 - DNA, 339 bp, Stenotrophomonas maltophilia
atgcgaggaatcgacgccaacaccggcaaatcactggatgggctcgcccatctccaccagtccgtgcgtgacattctcaccacaccccttggctcccgcgtactgcgccgcgaatacggttcacgcgtattcgaactgatcgatgcgccgaccaaccgctcgctgcgcatggacctgatcgcggccaccgtcgacgcgctggcgcgatgggaaccgcgtctccacgtcgagaacgtcgacgtctccctccccgcccccggcgtgatgatcctggcagtgaccgggatccacctgccggacggcgaggccatcaccatcgaaggaatcgaggttcgctaa

SEQ ID NO: 497906 - DNA, 897 bp, Stenotrophomonas maltophilia
gtggcatccggctcgttcaccagtgtcaatctgtcccagctgcctgcaccggcggtcatcgaagtgctcgatttcgaagccatgttcgatgaatcgctgaccgcactgcaggccctggatcccaccttcgacgcgctgctgccgtcggacccggccttcaagatcctggaggtctgcacctacctgcgcctgcttgatcgccagcgtgtcaacgacgccgcgcgtggcgtgatgctggcctatgccggtggcagcgacctcgaccacctcgccgcgatcttcggcgtcgcccgccaggtgctcgacccgggcaggccgcaggaaggcattccaccgcgatatgagagcgatgaggacttccgccgccgcatccagctgggcccggaagggttcagcgtggcggggccggaaggtgcctatgtattccatgcgctgagcgccgacccgcgcgtgctcgacgccagtgcgaccagtcccgcccccggcgaagtggtggtctcggtgctgtcgcgcgaagcggatggaaccgccacccagggcctgctggacatcgtcgaggcgaagctgagcgccgatgacgtgcgaccgctgaccgaccacgtgctggtgaagccggccacgatcgtcacctactcggtcgacgccacgctgttcacctttgccggcccggattcgcaggtcgtgcttgccgaagcgcgcacccgcctggaccgctacatcagcgagtcacatcgcctcggccgcgatgtcacccgttcgggattgttcgccgcattgcatgccgagggtgtgcagcgcgtggagatcgtccatccggctgcagatgtggtggtggaccgaacccaggccacccactgcgccggcgtgatcctgacccacggcggcaccgatgaatga

SEQ ID NO: 497907 - DNA, 780 bp, Stenotrophomonas maltophilia
atgaatgagccgagcacgcgcctgatcaacgcgcggctgcgcggcgcgatcgatggccgcaaccgcaccttccgccaccccggcggcgcgctggcgagcctgcaggcggtgtaccgcaccgatgcacgggggcggcagccgctgcagggcagcgtcatcgagggcagcagggtcaccctggccactgcaccggcgcccggcgaggtcatcgatggtgacgcccaggtggtggtgccctcggcggcaaacctgctacccaccaacgccacccatgccgagcgcgcgcttgcccgcgccatcgttgcacgtccgttgccggtggacgtcaccgcgctgtgggatgccgaccgttgtccgaccgcactgctgccctggctggcctgggcgctgtcggtggacgaatggaaggcctactggcccgaagccgtgaagcgcgcccgggtgcgtacggccatcgctatccagcgtcgcaagggcaccgccggcagcgtacgcgacgtggtggccgccttcggtggatcggtgctgatccgcgagtggtggcagctgcagcccaggggcgcgccgcacaccttcgaagcggtgatgaccatcgccaaccaggatggccagtccgccacggcgatgttcgtggaggacgtcatcggcgaaatcacccggaccaagccggtgcgctcgcacttcacctttacccagggcatgcaggccgacgccgccatcggcgcacttgcagccgcccacgccacggccttccgccgccttcaactgatcggagagtaa

SEQ ID NO: 497908 - DNA, 1968 bp, Stenotrophomonas maltophilia
atgcgcctgaaaatcaccgatgccggcttcgccaagctggtcaatccgccgaacaccggcaccaacgccgtcctgatcacccagatcggcctgacctcgaccgccttcgtgccgtcggcggggctcaccgcactgcccggcgagatcaagcgcgtcgccaccttcggcggccaggccgtgggcgatgacaccgtgcacgtcaccatccgcgatgacagcgccacctcctacacgctgcgcggcttcggcctgtacctggctgacggtacgctgttcgccagctacggccaggccgatccgatcatggagaagtcggccgcatcgatgctgctgctggccaccgacacacgcttcagcgggatcgacacgacgcagatccagttcggtgatgccggcttcctctatccaccggccaccaccgaggtcgtcggcgtggtcgagctggccaccagcaccgaagccgaagatgcgaccgacacccagcgcgtggtgactccgcgtggcatgcgtgcttacaccgacaagcgcttcggcgccagcgccccgaccgcgctggcgaagacactgctgtctgcggcgaacaccgcggcggcgcgcactgcgctggaactgaagagcgccgcactgaaggacaccgggcatggcaacggcctggacgccgacacactggatggcaagcacgcctccgagttcgccctggccggtgacttcgccaccgtgggccacaagcatgtgattgccgatgtgaccgggctgcagtcggcactggatggcaaggcgtccaggggcggcaacacgttcaccgaccagcagttcatcaacggcacgtatccgttgctgggcttcggtgccgccggtgccgaacagtccttcattggcggctggggaaattccagcctgtggcgcgtatggagcgcggaccgcagtgccagcagcgaaatcaccatcaagcatggcgacacgccgcgctggaacggctcgccgatgtggcatgccgggaacttcgcgcctgaagcgaagatggacaagagtggcgggacgttcaccggcgcggtttccatctccaacaactcgctgcgcctgtccggctggggcagcacgctgaccgatggtgtcatctacttcggcaccggtgacagctacattttcaagtcaggttcctccttcaccttccgcaatgtggagggtgcctatagcgcaacgctcagcgcaggcgggaacatctggaccagcggcaacttcgatcccggcgggaagatcaacaaagccggcgacatcatgaacggcacgctgaacatgtatgtgggtcaaggcagcacccaggtcgtgcaccaacggttcggctggggcaacaacgtgacccgatgggcgacagccatggagagcgacgccacactttcgctttactcctacgacttcaatggaggaactccgacgcagcgcgcgagcttcagcaatgtccagtaccgggagaacacattcgtcggcggcgtcacttccgcaggtggcaatgccgcattcatcatcaaggaccgtgggaacgcgaatcaagagttccacatctacaacacggacaacgtgttccggatctggtcgtccactgcgcaagtggatcgactgcaactgaatgccgcgggggctctctggacggccggcggcttcgatactggctcttcgcgcaagctgaaaaacatcgaaggcgcacttccgtatggcctggcagctgtcgaacagatggaacttgcagccggccactacaaacccgagtacaacgacgacggtcgccgtcgcctgttcttcgtcgccgagcagctggccgaactggtgccggaagcggtcgacctggaaggcgtcgagttccagggtgagcgcgtggcatcggtcaagctcgaccagctgctgccggtgatggccaaggccatccaggaactggccgctgaagtgcgcgcactgaaagcggagcgctga

SEQ ID NO: 497909 - DNA, 660 bp, Stenotrophomonas maltophilia
atgcccagcggatatcgctcttccggtgtcgactttgacgacctgttcgatccgtacgttgaaggtccactggcgcaggattcgggccgccgtatcggcggcaccgacctgagccgccgctatgcccacatccagtacggcagcaagcgtgccgacgtaggccatcgcatcaacggcatggacgtgtccaacctgtgggcggcccgcggcagcgccacctacaggctgccattccatggcaagggctactcggcaagcaatggcgccaagaccaactccaccggctccgtgtcggcaaccgtctcgatcctgatgtatgccgacggcacctatgccatccgcacgggcgtcgccggtggcggcaatggaggcagctcggtagcagcgtcaggccagtggcttccggcaggtgcaagcgtttccgagtacgaagtgcagatcaccggctcctcgcccgccaaagcctctttcagcaccagtgctccctcgttcgtgccggcatcggctggaccgtcggcaggcgtgtcgatcagcgtccctgccaggtccgccagctacgaatcggacagcgtcagcatttccgtcgcgctgcgccgtgccggaggtatcgcccaggtttccaccttcagcgccagcgtcagcgcctccggctgggtctga

SEQ ID NO: 497910 - DNA, 1203 bp, Stenotrophomonas maltophilia
atgaccgaatttctccatggcgtacaggtcgtcaacatcgataccggtgcccgatcgattgccatcgcctccagcagcgtgatcggcatcgtcggcaccgcaccgctggccgacaccgaagcgttccccatcaacacgcccgtactggtgacctcgccgtcgcaggccgccaagctgtcggccaccaccggcgccgatgcgggcaccctgcccggtgcgctcgacgcgatcttcgaccagtccagtgccgtggtcgtcgtcgtccgcgtcgagaagggcgccaatgaaagcgccaccctggccaacgtgctgggcggcgtgaacgcccagaccggcgcctacgaaggcgtgcatgcactgctggccgccaagtccatcgtcggcgtcaagccgcgcatcctggtcgcacccggcttcacccatgtgcacccggccgatccggccaagccggaggccgtgctggccaacccggtcgtggccgagctgcttggcatcgccgacaagctgcgcgcagtgatcatcaaggatggcccgaacagcaacgacgacgctgccaagtccaccgccgccctgaccggctccaagcgcgtctacgtggtcgaccccgcgctgctggtgcagtccggtgatgccatcgtcacccgccatgcctccggtgccgtggccggtgccatcgcccgcagcgacaacgagcgcggctggtgggcgtcgccgtcgaacctggaactcaacggcgtggtcggtaccgcgcgtgcgatcgacttcggcctgtccgatgccaccagccgcgccaacctgctgaaccaggccaacgtggccacggtcatccgcgaagggggcttccgcctgtggggcaaccgcaccaccagcatcgatccgaagtggcagttcctgtgcgtggtgcgcaccgccgacatcatcgccgacagcctggaagccgcccacctgtgggccgtcgaccgcggcatcagcaagacctacgtcgacgacgtgcgcgagggcgtcaacgccttcctgcgcggcctgaagacccagggcgcgatcctcggcggcaactgctggatcgacccggaactgaacgcagcggacagcgtggcccagggccgcttctactgggacttcgacttcactccgacctacccgggtgagcagctgaccttccgcatgcacatgaacaacaactacgtctcggagatcttctaa

SEQ ID NO: 497911 - DNA, 504 bp, Stenotrophomonas maltophilia
atgacgcgcaagatccgcaaaaatttcaacttctacgtcgacggcaagggttatgccggcagcgtgatgtccttcaccgcccccaagctgtcgctgaagaccgaggacttccaggccggcggcatgctcgccccgaccgagatcgtgctcggccatgaaaagctgaccgccgatgtcgagttcgcctccgacgacgcggagatcatgagcaagttccacgtcatcgaaagcaaggaatacggcttcaccgcccgcgaggcgctggaaggcgacgacggcgaagtgacccaggtcgtgcacaacatgcgcggcaaggtgaagctgctggaccgtggcgaaaccaaggtcggcgagaagggcacgatcaaggtcagcctggcgctgagctactacaagctgacccatggtgcccaggtcgtgcaggagatcgacgtggtcaacatgatcgcccgccagggtggcatcgacgtcctggccggcatccgcggcgcgctgggcatctga

SEQ ID NO: 497912 - DNA, 291 bp, Stenotrophomonas maltophilia
atgtccagcaagaccaagacccccaccgacaccgtcatcgagcgcgatggtttcgccgagatcaccctcacccgtccccgccaggtcaatggcatggaaaccgccgtgctgcgcatgcgcgagccgaccgtggaagacatggagcgctaccaggacgacaagggcagcgatgcacagcgcgaagtgcggatgatcgccaacctgtgcgagatttcgccagaggacgtgcgcaagatgccgttgcgcgactacgcacgactgcaggcaggcgtcgcgctttttaccacctga

SEQ ID NO: 497913 - DNA, 2448 bp, Stenotrophomonas maltophilia
atggccagtaacgttcaaacgacaacgatcacgatcggcggtgaggtgtccaagtcgctgaaggacgcattgtccttcgccaatgatggcgtgaagcgcctcggcgatgaagccggcaagctggagctcaagctcgccgcgatgaagaagtcgggcaccgcatacacccgcatgcgcgcgcaggccgatgcgctgcgcgcctcacaggaagcgctggagcgtgtcgaagccaagcgcaccgccaacctggagaagcgcgagaaactcggcgcctcgttcaaggcagcgcgcggcacactcggcaccgccgtcaccgcactggccaagccggtcgagaacgcctccggcttcgcccgccagaaccagcagatcggcgtggcagccaacctcagccgcgcgcaggtgagtgcgctcggccaggcgatcctgcagcaatcgcgtgcaaccaaccagggcgccgacgatctgcagcgatcgatcaagctgatggtcgcggccggcatggacgcacagtccgcgcaggccagcctcggcgccgttggacggaccaccaccgtcaccggtgccagcatcgatgatgtggcccaagctgcggccgccctgcagcagtcgttcgatatcgatccctcgcgcatgcagaacgcgctggacgtgctggtggtgaacagccagcagggcagcctgggcctgaaggacatggcccaggtgctgccggtgctgggttcctcgttcgaggcgatgaagctgcagggcacatcggcggcggctacgctgggtgcggcactggaagccacgctggactcggcaggtggcgccgacaaggccgccagcaacatgaagagcttcatgtccgaggtgctctcgccggacattcaggagaaggccaagaagagcctgaacctggatctgcgcaagatcatcggcgatgcacagaccagcggcggcaatcccttcgatgctgcgatgcaggggatcatccaggcgactgcgggcgaccagaagaagatcggcaccctgttcagcgatgcacaggcgaagaacttcgtccagcccatgatcgagaactgggacacctacatccgtgtccgcgacaaggccttgaatggatcggcgggtaccaccgatgcggcctatgccgacgcgatgcagaccgatccgcagaagatcgaaggcgccaagatcgccgtggacaacctgtccaaggcgttcggtgcggcgctgctgcccgcggtgggcgaggccgcggtcaagctgaccgagctgttgaacggggttacctcgttcgtgcaggaaaacccgaagctgatcgccaacaccacgcagatcgtggtcggcatgctgggcatgcgcgcggcggtactcggcgctcgctatgcctggaccttcctgcagggcccgatcctgggcgtgcagaaggccatccagctgttccgtggcggcagcctgctggcacagctggggcgcttcgggccgatggccatgcgcctggcatcgggtttccgcatcgtcgcaactgccattggtgccatcggcggtggccccatcgccgttgcggtcgccgccatcaccgccggcgccctgctggtgcgcaagtactgggaaccgatcaaggcattcctgggcggcgtctgggaaggcctgagcggtgcaggcaccgcagcgatgggtgaactgatgcgcgcggttgaaccactgcgccccgcctgggaagtcatgagcgggctgatcggccaggcctgggactggctgtcgaagatgctggagccggcgcagtacaccggcaatgaattgtcacgcgtcgcccagatcggctcgctggtgggtgaggcgctgctgaccaacttccggctggtgatccaggtcatcggcggcgtggtgggggcggtggtgtggctgggcgagatgctcggcaccgtcgccggcttcatcaacgaaacccttggcaacatctgggagtcgatcagccagaaggcgaccgcagcgttcgaccgcatcctggaaaagctcaagccagtcatagaaggcgtcggctggttcatggacaagcttggtggtggcgtaggggctgccaacgacaaagcgctggaggtcgccgagggcgggctgcagaccgcagtgggcgccgccaacatctacagcggcatgaaggcgcgcggcggtggtggcatcggcgacatggcgcgcgtggcgtacgcggtcggcaccaacgacaacgatggcctgaaccgccgcatggccgagctgagcggcgcgcagggacgccgtgcgccggacatgccctcgcccacgatgcgcgcaccgaccaccgtgcagcagcaacagaccaacaacatcaccatccaccagcagccaggcgaatccagcgaggcggtggcgcgccgcacggccgacgagctgcagcgtcgcaacgcggttgccgcccgtggtggcctggcagacaggaactga

SEQ ID NO: 497914 - DNA, 468 bp, Stenotrophomonas maltophilia
atgaaacgcgaattcgtaaccggcactgtggacaagctgctgtcgcagttcaaagccaatgactccggcaacgccccggtcctgctgatgctgggcggcttcaagttcagcctcaacaccgcggtcttccgggagatccagcaatccaacgagtatcgctggcaggcgcaggaccgcatcggccagatggcggccctgcagtacaccggaccgggctcagccagcatgaccctgccgggcgtcatctactaccagttccgcggcgccggcaacgagctctcacagctgcgcaagctggccgcgcagggcacgcctcatcgactgctgaccggcaaaggcggcaacctgggcctgtgggtcatcgagaagatcgatgccaccgccagcgagttcaccgccgacagcgcgatcctgaaacaggaattcaccctttcactgcggaagcacagcaatggcacgaacgtatag

SEQ ID NO: 497915 - DNA, 216 bp, Stenotrophomonas maltophilia
atggcacgaacgtatagcacccgcgacggcgacgtcgtagaccgtatcgcgtacgcgcattatggcgagcagtcaccggccatcctgcgcgcggtgttcgatgccaacccgggcctggccgcacgcggcccggtactgcctgccggcgtagcgatcaccctgccggaggtgcagcgcccggccagcgagcgcaagggagtcgccctgtgggattga

SEQ ID NO: 497916 - DNA, 1074 bp, Stenotrophomonas maltophilia
gtgggattgaacatcacaccggccttccgcgtggtggccaacagccaggacatcaccgacaagatcatggcgcgcttcaagtcgctgcgcatcaccgacgagaccggcaacacgtccgacacgctggaactgcagctggccgaccacgatccgtccgatccgatccagctgccaccggttggcgcggaactggaggccttcatcggctatgacggcgaagtgcggcgcgtaggcctgtacatctgcgacgaggtggagatctccggctttcccggcagcatgacgctgcgcgcccgggcggcaccgttcgagaccagcaaggggggcaagagcgacctgcagacgcagaagacacgcacctggaagaagggcaccacgatcggcgacatggtgcgacgcatggccggcgagcatgggctgaacgcagcggtgagcgcatcgctggcgtccatcgtgctgccgctgacggtgcagtcgcaggagtcggacatgaacctgctgctgcgcctggccaaacagcacgatgccatcgccaagcccggaggcgggcgcctggtgttcgtgaagcggggcgaatccaccagcgccagcggcgagcgcattcccgatgtcaccctcaccccggccgatggcagcgactaccgggtaagccttgccgcacgcgaagatgccggtaccaccattgcgtactaccgcgacgtgcgcagtgccaagcgccaggaagtgaaggtcggcagcggtgaaccgatcatgcgcctgcgcatggcctatgccgaccgggagagcgcagaagcggcggcgcgcgccaagcatcgcgaacaggcacggcagacgcggacgctcagctacaccctgcccggccgcgaaacactgatggccgaagccaccgtggtgatgcaggggttccgcgagggcgtggatggccagtggctggtcaagcgtgccgagcacagcatcggcagcgagggctttatcacccgcatcgaatgcgaacaacccaacagcgccgacgcagtgaaagcggccagcaatgccccggccagcgaaggcgaacaggtcggcagcgaagtgtag

SEQ ID NO: 497917 - DNA, 570 bp, Stenotrophomonas maltophilia
atgtcactggtcctggcctccacctcccgctaccgccgcgagttgctgcagcggctgggcctgcccttcgactgcgcgcgcccggaggtggatgaaaccccgttgaacggtgagacgccgctggccctggcaacgcgcctggccacggccaaggcaaccgaagtcggcgcccgccaccccggcgcctgggtgatcggctcggaccaggtggcggacctgaacgggcagccgctgggcaaaccgggcacggccgaggcggcctgcgcgcagctggcggcgatgtccgggcagacagtacgcttccataccgccatcagtctcacgctagacggagaatcattcagtgccgtggatctgaccgaggtccgtttccgcgcgctgggccaggaggagatcgcacgctacgtggccaccgaacagccgctggactgtgccggcagcttcaagtgcgagggtctgggcatcagcctgttcgaagcgatcgacaaccgcgacccgaccgcgctgatcggcctgccgctgatcgcgctgtgcgggttgctgcgccaggcagggttcgcggtgccctga

SEQ ID NO: 497918 - DNA, 2730 bp, Stenotrophomonas maltophilia
atgaccccacacgcccccgccgttacccggctggcggtcgcgctcgccctggcaatggctgctcctctggtcgcagcccacggcgtccccgccggcttcgaggatctggttgaaggccagaccgaacaactcgacatccagctgttcggccgctcggccgggctgtcgccggtgcgcgtgaccctggagcacgtgcagctggaagatcccgcgcgcgtactgcaggcgctggacctgcctgccgaagcacaggcggcgttgctgccgacgttgtcgcaaccgctgccgcgcaacagccacctggcctgccgctttggtggcgccacggccggctgcggctatctcgatccacccgaagaccccactgcggcgcgcgcgctgtacgacgaaggcgagggcgccgtgcgccttttcgttgcgcggcagtggattcccggtgagccggcagctgagcgttaccacacggtcacggccaatgccgagaacgccttcctgcaccagcagacactcaacgtcagcggcggtcgcgattaccaggcgctgtccgcgcgcggcatgggcacgctgggcctgttcgatcgtggccacctgtccgccgactggtactacacccagcagcgctaccgcagccgtggcagcaacgacgacttccagttcgacaacgtctattaccgtcatgacctgggcaaggcgcattacctgcaggccgggcgcatggaccgccgcaacctgtccagcccgcagggcggcactttcagcttcagcatgctgccgctggaccgcttccagggcgcacgcctgggtaccacccaggcctatgtggacaccgacgcggcggtgcaggccagcccgctgaccgtgctgctggcgcgcgatgcgcgggtggacgtgttcgatggcgagcgcctgctgcagaccttctacctgcaggccggcatcaaccagatcgacacccgcaatttcccgttcggcaactacctggtccgcatgcgcatctacgaggacggtgtgctggtgcgcaccgaggaggcgcccttcgacaagggcggcgactggaccaacagccagtggcaatggttcgtgcagggtggccaccgcagcgaacgccgcagcgatgctttcgatggcgagcgtatcgcgatggcgggcgtgcgcgtgccgttgggccgcgacgcggcgatgaccgccggtgccgccacgttcggcgggcaccgctacggcgagctccgcctggacctgcgccgggtgatggccacgcaggaagtacgcgccaccttcagcggcatgcgtggcagcgacggcagcaacgggcagcagcaccagctgtcgtaccggcgcacggcgtcgtggaatctctaccagcagcgcatgcgtggcaaggcctgccagttcgaggccgaggcgcgcgaccagttggggtgcaccaacgcgctcagtggttcgatgtcgctgccgctggcgggcggcaatgtttacgtgggctacacccggcgccagacctggcgcaccggctggcaccggccggagttcgagcaggatccgttgttcgggcttgagccgctgttgccgccggggccgttggaaccgcgccgcgagccgctgctcagccgcacctggcaggccagcttcagccgcagccatcgctggcaggatttcagcgtctccacgcgcgtgggcgtgtggcggcagaacagcaccgacagcgtgcgtggcagcaccgagcgcgaccgtggcatctacgtcaacctcagcctgggccgtcggcaccgcagtgctgccggcgatggacagcgccgctatgccgtggatgtgcgccagccgcagcatcagcgcccggcgatcgactacagcgtcggccagagcctgcgccaggaactggatacacagtaccgcgagctgtccggcgagctgcgcgccaacaacaacgagcgctacagcgcttcactgggtggccagctgcagaatggcatcggccacaccagcgccagcgtggcgcgctaccagcagcgtggccgcagcgagaccggctacagcggcgcacacaattccggcttcgcgctcggccgtcgcggcttctactggagcggtgccaacggcgccgatgccggccttgccgtgcaggtggccgataccgatgacgccgacctgcgcggcgtggccgccgaactgcaggtgggcgggctgcgcaggcaacgcctgcagatcggtgaacgccggttgctgccactaccggcctatcaatcgcaacgtgccgaagtgcaggacgccagcacgctggacagcatcgccgccatccgcgtgaccggcgtgggcggtgcacgaccgatgttcctcacgcccggcaagctgatgcgcatgccggtgccgatcgaagtgacttacaccttcatcggccatgcccgtgacctggccggtgcgccgctgggcggcgcccgcattctcaacgcgccggtgcccggcaccagcgccaacggcggcttcgtcgccgatttcccgcgtcgcgaaacgacgctgtacctgctgcaggacgaccgcctgctgcactgcccgctgcaggtgcgcgagcgccgccaggtggtgctgctggtcggtgccgtgcactgcgagccgctggccgtggcccagctgccggccgagatccgccagcaggcccgcgtgacccgcctgctgcaggaacgcgcgttgattgccgccacgccccggaccgctgctgcaggaggtacgccatga

SEQ ID NO: 497919 - DNA, 1140 bp, Stenotrophomonas maltophilia
atgaaccggcgttggatgttcgtgttgatgctggtgtgtgcgctggtgctggtgatgccgcgggcgtgggcgcagtggccgccagaaacgcatccggccgaccagagccgggacatcgtgatgagctgggatcgctcggcggtacccggtgatgtggagttgtgggcgccgcggacggtgttgggattcagtcacgacctggcgctgaagtatgggcagatccatgtggtttgtgagtctgcttctgacagtgaattcggtcggtgcccgacggagggttctttgacccaggttccaggagtgaccgagatcggtttggagctcgttgaggagcggacaggattgcgtgcggagattcgcgtactcggctacctgcagagggcgatgtctgggcgtgcttgcggactcgatttctgggaggacattggcacgcgtcgaatgctgcacgccgcatcatggttcatctgtacggtcgaccagccacttggaaccggcgcaaaactggatattcctgcaagcgagatcgcaaagcttgtcgcaggccactggaaggccacgatgcgcctgaacatcaaggccgaccccgccgcagcacccgtcgccacagccaccttcaacttcgatttcaccgtcaccgactacgacgcgatctcgatctacttcccgaccttcgacaccgtcgcgccgctggtcaatctcgatctgcgctacgaccccatccagaaggtggtgggtggcaggaaacagctggatatgtgcctgtacgacggcctgggttcgcagagcgaatacctcgacgtcacggttcgcgacagcggtccacgcccacctgcagggtcggacttctcgctctggcaccgcgatggcggcagcgatgccagccagcgcctggactaccgcgtccacctggactacggcggccaccgcctggcgatgaagcacaacgtcaagcagcagctgcgcggcatcgacagcgcacagctgcggctggtgatgctgccgggcatcagccagccggtgtactgcgtgcccacgccgctgaccctggaaacaccgcctacccctatcgccagccagcgccccggcctgtacgagggcgagctgaccgtggtgctcgatgtccccactgccaaaccctga

SEQ ID NO: 497920 - DNA, 708 bp, Stenotrophomonas maltophilia
atgaagaagctgctgttctgcctgctgccggtgagcgccctgcttgcactgccggcatacgccaatctatccatccacccgatgcgcgcagcggtggatgccaagcgcggcacccatatccgcgtgtactcgcagtcgaccattccgcagtacgtgcagacccgcctgcggcgcatcgtcaatcctgccacgcctgccgaagaagaacaggagatggaagcctcggatgcggcgattgccatcacccccggcaagttcgcactttccggcggcggcaaccggctgattcgggtgattccgctgcagcaggtccagaaggaaacggcctaccgcctctacttcgaaggcgtgcgcgggccggatgacgctcccctcgaagacggcgaaggcgcacaggcaaacatcggcgtcagcctggtctggggggcgctggtcaacgtcacccccgacgacggtgtggtggacctgcgcctccaggacaacacgctgcacaacaccggcacgctgcgcgtgggaatcatcggtgccgaggagtgcacggccgcgggcacctgcacgccacaccccgtgtcgcacagcctctatcccgatgccgcactgacgctgccgttccagcttcagccgggcaactcgctgcaactgcgttaccggctcacccgcgatggctatcgcgaacacgtgcggacgatcgaaccgacggcgacctga

SEQ ID NO: 497921 - DNA, 4380 bp, Stenotrophomonas maltophilia
atgaatcgaatctatcgtcgtatctggaatcacgccaaaggctgctgggaggtggccagcgagttgaccaggccctgtggcaggaaatcgagccgcgcaaccggcgccggtggactgctgatggtcgcgctgctgttggcgggcggggatgcgcacgccaagacccgttactacattgggtgcgatcccttcaatctgggaaatggcgagtttgtttcctgctcgcccattgctggccgctatgacgacaccatgttcgtcggctatgcactgaccaacggcctgaactcgcttggctacggtgcaggcgtgaacatgaaaggcgacaacaccaccgcatttggcattggtgcccggatcaacggtcagaacagcgctgccttcggattcaaggcaagcacctatgccgtggatagcgtggcggtgggctacaacgccagaaccaccgctgatggcggccacaacgtggccgttggtgccaatgcctatgccgcctacattggtgccactgccttggggaacaaggcagaggccagggcagcaaatgccatcgcactcggcagcggctcgtcgtcgcgtggcgtggatgcccttgcgctcggtgccaactccagcacttcggccgcgggttcgatggcggttggtgcaaaggcgtctgccagccgtacaaatgccatcgccctggggttgagttccgtggcgcagcaggaggacgcagttgccctgggcgcgagcacgatcgcaaacggtgctggtggggtggcgcttggtgccaaggcaatggtcgacaccggtgcaggcacgggtggtgtcgccatcggtggcggtgcccgtgcgggaagcctgggctacaccggtgccatcgccatcggcggcgatacgcgcgcgtacatcgacggcgttgcgctgggctatgcggcgtctgtgtccgcacagggcgctgtagccctgggtgtccgctcggtggccacggaagccaatacggtgtcggtaggcagcgcctcggtgcgccgtcgcatcgtgaacgtggccgatggtcgtgtcaccgcctccagcaccgatgcggtcaccggtaagcagctgcatgccatgaacgagcgggttgacggcatgatcaagcaggattccgcaggcggcatcgtacgcatcgccaacagcaacaccggctcggaagtcagcatgcgcaacgcggtgctggccacgcgcaaggtgagcggcgtgtccgatggcgcgctgacgacgactagcaccgacgctgtgaacggacgccagctcaacacgaccaatggtaatgtcaccaaggcgcagaccgctgcggatgcggccaaggctgatgccagcaaggcgctggcccaggtcaccacggtgaccggcctgatcggccagacttcgtccaccagcagtgtccgcttgggcgagaagaacagcggtacctcgctggatgtccgcaacagtgccaatgccaaccgcaaggtgaccggtgtggccgatgccacgctgagcacctccagcacggaagcggtgaccggcaggcagttgaacacgaccaatgagaatgttgccaaggcacagaccgctgcgggagaggccaaagctgatgcgagcaaggcgctgactcaggtggtgacgctgggcggcctcgtggggcaggtgtcggcaaccggcaatgtccgcctgggtgagaagaacagcggaacggtgctggatgtgcgcaatagcgcgaatgctagtcgaaagctgactggtgtggccgacggcacgctgagcacgtccagtgctgaagcggtgaccggcaggcagttgaacacgaccaacgagaatgtcgccaaggcacaggccgctgcggacaccgccaaggtggaagcaggcaaggcactggctcaggcggtgacgctgggtggcctggtggggcaggtgtcggcaaccggcaatgtacgcctaggtgaggagaacagcggaacgcttttggacgtccgtaacaacaagaatgagaatagaagaattaatggtgtatcggatggggatttgagtgcaggcagtagcgatggtgtttcgggccgtcagctatttgcgacaaacgtccgcttgggggctttggaaagtgcaggaaagtacataagcgtcggagtggatgcgttcagtagggatgctgtggccgggcaggctggcgtcgcaatcggtgattctgcaaaggctggtgctgagggtgcaacggcagtaggtgccttctctacttcacttgggagaaatggagtagcgattggccgcgcatcccttgtcgcggggggggcagccaatggatttgcaatgggagcaggatcgaacgtacacgcaaacaacggcgtcgcgatcggatctggtgcaaaggttgccgcaacagctgatgaatctcttgcgcttggagcgggttccgaagctaccgaagcggggaccgcgtcctttggggcctctggtgtgggacgtcggctcgtgaatgtctctcgtggcaccgccgaccacaacgcgatcacggtttctcagctcaaggacgcactcgtcaccctcggcgctggcgcaggcatggatgccagcggcaatatcatcgccccaacttactcggtgcaggctggaacgcagaacacggtcgaagacgcactgatggcgcttgatggcgccgtcatcaccgcaggccgccgcgcggacaaggtggaagatcagctcagctccatcttccaggactcgccgtcggcccgtgccgatggcatgaaccagatcgcgctcagtggcgcgaacggcatggtgctgaccaacttggctgacggtcgggtagcgccaggaagccgtgatgccgtgactggcagccagttgtacgctgcagagcagaagatctcgcagaatcggaatgatctggaggcgatgcgcaaggagagggagacggggcagcaggcgatgcgtggattggatgcgagcggtccgattgatttcggtggtgcgcgtttgactggcgtggcggaggcgaagctgtcggctgacagctcggacgtcgtgcgcggcagtcagctctatgggaccaacagccgagtctcggaacttgaggacgtcgcacagtctgtgagtatcgggtcagcgcccttcagtgaacgcgcggaagcgggtgtggcaggcgttgcgttgggaaattcggcgaagacgggcctagagggaggaactgcggtagggacgtttgcgggggccatgggaaagaactcgaccgcaattggtagagcggcgactgtctctgtggattctgcgaatggattcgcaatgggagtcggtgcacaggtcggcggagacgcgggcggcgcgaatgagggtgtcgcaattggtgctggcgcaagagtcggaagcggggcgcacggctcgctagcacttggaaatggctcccaagcagatgaagagggagtcgcgtcatttggtggtgttgggatcaagcgccgtctcgtaaacatcgccaacggcaccgccaaccacaacgccgccaccgtcggccagctgcgcggtgcgctgtccgcgctcggcggtgaagtcgatgccaacggcaacatcgtcggccccagcttcaccgtgcagggccagtcccagtccacgctcaatggtgcattggaagcactcgacggcgcagtggtcagcaaccgctcgcgcgtgaaccaggtcgagtcgcagctgcgcagcgtgttccaggacacgccctccgtccgcgccgacggtctcaaccagctcaccctggccggaacccacggcatggtcatttccaacgtggccaatggcctgattgcggccggcagccgcgatgcagtcaatggcggccagctgcactcgatgcagcagcagctcaacggccgcatggacgggctggagcagcgcatcgatgcgccgcagtcgcaggcaatggcggtggcttcggtgccggagccggaagcgccggtgccgcaggccgaaggcggccagcaggtggcgtcggtcggcgagggtgagaaacctgcaccgcagccgaagacgaaggaggacaccccgaagccccaggtcgataccgctgaactggagaagatgctggcccgtgccaacgagtacaccgatggcgcgatcagcaccttcgagcgtcgcctggacaagatggacaagcgcttcaaccgcatggcggcgatgagcagcgcgcagaccgcgatggcgatgaacaccgccggcctggccacctacaaccgcctgggtgcgggcgtgggctacagcgagggtgagtcggcgatggcggtgggctaccagcgtgtgctcaacgagaagggctcggccaccttcagcctcaatggcgcgttcaccaacagcggtgaacgcagcatgggcgtcggcgtgggcatcggctggtaa

SEQ ID NO: 497922 - DNA, 744 bp, Stenotrophomonas maltophilia
atgtacagatgggtaagtggaatcgtcagctatcgcacgttctatatctggcgggcgcgctttcgctactacacccggaacctggacctgtggacgctgatgagcgggctatgcatcgccggtctgctgttggtgctgtggtacctgtggcagatgctgggcgtgccgccgccgcgcgtgcatcctcaggcagcggcgctgcggatcgagggcgtcaccagcgaggcgatccatcgcatcgtgctggtgcgccacgcgggccgcacgccgggtgcaccgttcaccacgccggaggaggtaagggcgagcacgttgcgcacgatgcgggtgcggcaggtgatggacagcgaagtggtgtggcggctgaaagccgacatgctggcggacatcgccgactacatcaccgccacgggtgggtgcgtcccgtacgactgccgacggattcgcgctcgattggaggatgtgcgcagggcgggtgttgagaatgcgcagatcaacacagcactgttgacgatcctggaggtgtcgctggaccagatgccgtcgttggaggcggtcgagcatgagcgggtgaagagtgggtggtcggatgggttcaacgacatctatgaccagatctggttgctgcggggcctgcaggtcatgcatgcacagatgatgcgggagtatccgcagcgagccccagtaccgtggctgccgcggctgctcagcgacccgctgcgcgatacccgttttgtctggtag

SEQ ID NO: 497923 - DNA, 645 bp, Stenotrophomonas maltophilia
atgcatcgcgcccgtcagcatgctgccagccagacccgcgagcggcgtcaccgcctcgcccacgaagccgcccgcctgatggccgaaggcggcatccgcgactatcaccaggccaagttgaaggccgccagccggctcggcatccacgacgatgcctccctgccccgcaacaccgagatcgaagacgccctgcgcgaataccagcggctgttcgctggcccccagcacggtagcgagcttcagcgccgccgcgaggctgccatgcgtgcgctggagttcctgcacggcttctccccgcgcctggctggcccagtgttggagggcaccgccgacgccaacagtcccgtgcagctgcacctgcacagcgacgacccggaagccgtgcaccgcttcctggacgagcacggcattcccgccgaatcgcggacgcgccgcctgcgcatggaccgcgaacgctgcctggacgtgccggtgtgggtgttcagtgccgaggagctgaccttcgacctggccgtgctgccgtacgacgccctgcgccaggccccactgtcaccggtggatgagaagccgatgcgacgtgcgtccgtggcgcagttgcggcaggtgctggccgaagcggagatcagcgcgtacatcggcggatga

SEQ ID NO: 497924 - DNA, 2424 bp, Stenotrophomonas maltophilia
atgactcgactccgccgctggctgcgttggatcttcctgattgtcctggtcctggcgctgatcggcgcggccgccgtgggcggtctgtactacgctgtgtcctccaagcttcccgacgtgcagaccctgcgcgacgtggaaatgcaggagccgatgtacatctatgctgccgacggcaagctgatggcggtgttcggcgagacccggcgcaccccgatcaccatgaaggacgtgcccgagcgcctgaagcaggccttcctggccaccgaggacgcccgcttctacgagcatggcggcgtggactacatgggcatcggccgtgcggtgtggctgctggccaccaccaacgacaagcgcgtgccgggtggttccaccatcacccagcaggtggcccgccagttcttcctcagctccgagtacagctacacccgcaagctggccgagatcctgctggcacggaagatcgagtccgagctgagcaaggacgagatcttcgagctgtacctgaacaagagtttcttcggcaaccgcgcctacggcgtggccgccgccgccgagttctactacggcaagaagctgaacgagctggacctggacgagatggcctcgctggccggcatccccaagttcccgtcctcgggcaatccgatctccaatccggagcgcgcccgccagcgccgcgacaactacgtgctgcagcgcatggccgacctgaagttcgtcagccaggccgaggccggcgcggccaaggccgtgccgatgcacgccaccgcccatgagccgccggtgcaggtcgatgccccgtacgtggccgagctggtgcgccaggaaatgatcgcccgcttcggcggtgacgtggtcaacaagggctaccacgtcaccaccacgatcgattcgaccctgcagaccgccgccaaccagtcggtgcgcgacggcctgctgctatatgaccaccgccacggctggcacggcgtggaaaagcaggtgcagctgggcgccggcgacgatgccgccgccctggccgagcacctgcgcggcatgtacggccaggccggcctgttgccggccatcgtcgccagtaccggcgccgatggcagcgctacggtggtgctggccaaccgcaccgagatcgtgctgccggccggtgccgccaagtggaccaacaagaccccgggcaagctggtgcagcgcggtgacatcgtgcgcgtgcgtgccgctgccaaggaaggggagtggctgctggaccagctcccgcgcggccagtccgcgctggtctcgctggatgcccacagcggtgcactgaaggcgctggtgggcggtttcagcttctccggcaacaagttcaaccgtgccacccaggcccgccgccagccgggttcgagcttcaagccgttcgtctacgcggccgccttcgacaagggctacaacccggcctcgatcgtgctcgacgccccggtcgtgttccgcgaccgccgcggcaagacctgggccccgcagaacgacggcggcggtttccgcggcccgatgcgcctgcgcgaagcgctggtgcagtcgcgcaacctggtctcggtgcgcctgcttgatggcatgggcgtggactacgcgcgcaagtacatcagcgaatttggtttcgccgaatcggaactgccgccgaacctgtcgatgtcgctgggtaccgcctcgctcaccccgctgtcggtggcccgtggctacgccgtgttcgccaatggcggctcgcgcgtggacacctggctgatcgaccaggtgaacgaccgcgacggcaacctggtgttcaaggaaaacccggcgctggcctgccgcgactgcgccggcagcagcgaccagccggtcaaccaggtggtggacggcttcaacttcggcgccccggccccgaaggtggacccggccgctgcggccaaggccgaagccaagaccgaaaccccggccgcgccggccaaccccgatgcccgcaccgccccgcgcgcgatcgacgcccgcaccgcctaccagctggtgtcgatgatgcgcgacgtggtccagcgcggtaccggcgcccaggccaaggtgctcggccgcgaggacgtgggcggcaagaccggatccaccaacgaccaccgcgatgcctggttctccggcttcggcggcccgtacgtgaccaccgtgtgggtgggccgcgacgacttccgctcgctgggctaccgcgaatacggtggcaaagccgccctgccgatctggatcgactacatgcgcaccgcgctgaaggacaccccgatcgcgcagaacgagccgcccagcggcatggtccaggccacgctcaacggcgcgaccgagtgggtgaaggtggaagacatggaccgcctgaccgactacgacctgaacctcaatacgccgcaggccgacgccgccgcgttcgatatcttctga

SEQ ID NO: 497925 - DNA, 1059 bp, Stenotrophomonas maltophilia
gtggggctcatcccaaaaagtcagtcgccgcttgtaggcgtcgacatcagttcgactgcggtaaagcttttgcagctgtcccgcagcggcaatcgtttccgtgtggaacattacgctgtggaacctcttccgccgaatgcggtggtagagaagaacatcgtggaagtggaggccgtgggtgaggccatccgccgtgccatgaaccgttcaggcagcaaggccaagctggccgctgccgccgtcgccgggtcggcggtgatcaccaaggtgatcccgatgccggccgagctcgacgagaacgacatggaagcccagatcgagctggaagcggtcaactacattccgtacccgatcgaggaagtgaacctggacttcgaggtgatcggggcgatcccgaacaacccggagatggtccaggtgctgctggccgcgtcgcgttcggagaacgtggaactgcgccagtcggccctggaactgggtggtctgcaggccaaggtgatggacgtggaggccttcgcggtcgagaacgcctacgccctggtcgccagcgagctgccggtgtccatcgacggcgtggtcgcgctggtcgatatcggcgccaccatgaccaccctcaacgtcctgcgcggcggccgcagcctgtacagccgcgaacaggtgttcggtggcaagcagctgaccgacgagatcatgcgccgttacggcctgagctacgaggaggccggcctggccaagcgccagggcgggctgccggaaagctacgagatggaagtgctggagccgttcaaggaagccacggtccagcagatcagccgcctgctgcagttcttctatgcaggcagtgagttcaaccgcgttgatcacatcgtgctggccggcggctgcgccgtgctgggcgggctgccggaaatggtcgaggagcagctgggcgtgccgaccgtggtcgccaacccgctggcacagatgacgttgggcccgaaggtgaacgcgcatgcgctggcccaggatgcccccgcgctgatgatcgccaccggtctggcgctgaggagcttcgactga

SEQ ID NO: 497926 - DNA, 873 bp, Stenotrophomonas maltophilia
atggcacgcatcaatctattgccctggcgcgccgagcggcgcaagcaacgccagcgcgagttctacgcaatgctgggcatggccgcgatcggtggcctgctgctgtcgctgctgatctggttctattacgaccgccaggtgagcggccagatggaccgcaatgcctatctggaagccgagatcgagaaggtcaaggaacagaacaaggagatcgaccgcctcgatgcgcagaaggaccgcctgctggcccgcaagaaggtgatcgaggaactgcaggccaagcgctcgcagatggtccacctgttcgacgcgttggtgcgcacgattcctgacggcgtggtgctgaccgccctgcagcaggagggggacatgctcaccctcgagggacgcacccagtccaatgcacgcgtgtcggcttacatgcgcaacctggaaacctccggctggatgaccaacccggagctgtcgatcatccaggccagtgccggcgacaagactgcagccggcccggtatcggacatcaaggcactgccgtacatgttcaaggtcacggtgaagctgccggcgcagagtgaagagacaggcactgccggtttgaacgcggatggcagcgtggcggccgccccggctgcgacgcccgccgtggcgccgcttgccgccggccccgatgcggcggccccggctgctgcaccagcaccggccccggcccaaccggcggcggccccggccgcagcacccgccagcgcaccggcgcctgcaccggccaagccgaaccagcccgccgcaccggccccggccgccaggcctgagggcagccgcctggcgcagccgccgcaggcctcttacgccccgctgcagggggaccgcgcatga

SEQ ID NO: 497927 - DNA, 657 bp, Stenotrophomonas maltophilia
atgagccagaaaatcgatctgaagaacctggatttcaacgacatcggcaactggccgcagaaggccaagatcgtcttctgttcgttgctggccctggtcatcatgttcgttgcatggatgctgctgatcagcggcaagcgcgatgaactggccagcctggaatcgaaggaaagcgatctgcgcaccgagttctccaagcagcaggaacgcgcggtgaacctggggccgctgaagcagcagctggcgcagatggagcaggtgctgcagcagatgctgcagcagctgcccagcaagaccgaaatgccggacctgatcatcgacatctcgcagaccgcgctgtccagcggcctgaccagccagctgttcgaaccggaacaggagcaggtcaaggagttctacgccgagaagccgatcaagctgaagatggtgggcagctaccaccagttcggtgcgttcgtcagtggcgtggcctcgctgccgcgcgtggtgatcctgaccatgcacgacatcaatctgaagccggcggacaaggctggcggtggttcgcgtgccggtgcgctggaattgtccggcacggtcaagacctaccggtatctcgacgagaccgaggtgcaggaacagcagaaggctgaagccggcaaggagggcagcaagtga

SEQ ID NO: 497928 - DNA, 534 bp, Stenotrophomonas maltophilia
gtgatccgttccttctttgcacgctgcgggatggccgctgccgtgttgctgctggccgcctgcggccgtggcgtgaccagcacgccgggcgatgcgccgaatctcgagaagtgggtggaaggcgaacgtgcccggccggcgcagccgctggaaccgttgcctgtgatgcagcagttcgagaccttcgaatactccgcgcagggcctgcgtgatccgttcaccgatgcctggaccaatccgcaggggaatggcggattgcggccggatccgaaccggcgcaaggagcccctggagggcttcccgctggacgcactggacatggtcggtaccatcggcaccggcgggggcaccgtcgcactggtgatggggccggacaaggtgacctaccgggtgcgcccgggcggttacctggggcagagcgacgggcgggtcactgcggtcttcgaagaccgtgtggagctgatcgaactggtgccggatggcgcgggtggctggctggaacggccggcaacgctctcgcttgaagatcaatga

SEQ ID NO: 497929 - DNA, 1968 bp, Stenotrophomonas maltophilia
atgacctttcaccaagccaaggggctgcgtcccaaccggcgctctaccttgaaccgtgtcagcgcgttgggagtcgcgctgatgctggcctgcgctccggcgctggccgccgcaccggcggagaagccggtgggcaccaccgtcgcaccggccgcggcaccggccggcctgtcggtggccaagatcgatttcaagcgcggcgatgatggcgcgggccgcctgatcgtgcagtttgacggccagggcgcggtcccggacctgcgcacgcagggcaacagcgtggtggtcgacgtgggcaatgcccgcctgccggccaacctgcagaagccgttgaacgtcgtcgacttcgccacgccggtgcagcgcatcgacgccaaaccgtccggcgccggcacccaactggtgctgagcaccggcggtgcggtggagtcgctggcctaccagagcggcaacgaatacgtggtggagatcagcgcgcggcaggctccggccgccgtcggtgcagtgaccgccggcagcgtcacccaggccgcaaaggccgtcggccagcgtggcttcaccggcaagccggtgaccttcaacttccaggacgtgccagtgcgcaccgtgctgcagttgatcgccgaagagtccaacctcaacgtggtggcctccgactcggtgcagggcaatgtgaccctgcgcctggtcaacgtgccgtgggaccaggcactggacatcgtgctgcgtgccaagggcctggacaagcgacgcgatggcagcgtgatctgggtcggcccgcaggccgagctggccaagttcgagcaggagaaggaagacgcgcgcatcgccatcgagaaccgcgaagacctggtgaccgattacgtccagatcaactaccacagcgccacccagatcttcaaagccctgaccgaagccaagggcatcggcggtggtggcggtggtggcgcaggtggcggtggtggtgggtcgtcgcaggaggagagtggcttcctgtccggccgtggccgcatcgttgccgacgagcgcaccaacacgctgatgatcagcgacattccgaagaagatcgcgcgcatgcgtgagctgatcaacgtgatcgaccgcccggtcgaccaggtgctgatcgaaagccgcatcgtgatcgccaccgatacgttcgcgcgtgagctgggcgcgcggttcggcatcagtggcagccgcgacaacgcctacttcagcggcaatctggaagccaacgaggcaacccgcaaatcgcaggtcgaagccaatgcgaccaacgccaaggcctaccgcgactggctggccggtggcagtacgggcccggcgccggtgccggtcggctcggcaatcacccgtggcctgaactgggccatgccggcggcgtccaccaacccggcaggctcgcttgcgctgtcgatcctcaatgccggctacctgctggacgtcgagctgtcggccatgcaggaggagtcgcgtggtgaagtgatctccaacccgcgcgtggtcaccaccaaccagcgcgaggccctgatcaagcagggtaaggaaatcggctatgtgaccatcagcgccggtgcgggcggtgtcgctacgccgaacgtgcagttcaaggaagtggtgctggaactgaaggtcaccccgaccatcaccaacgacaaccgcgtgttcctcaacatgcaggtgaagaaggacgaagtggaccggctgatccagctggaaggctatggcaccgtgccgtcgatcaaccgccgcgaagtgaacaccgcagtgctggtcgaggacgggcagaccgtggtcatcggtggtgtgtacgagttcaccgaccgcaacagcatcagcaaggttccgttcctgggcgatgtaccgttcctgggcaacctgttcaagaagcgtggccgcagcaaggacaaggccgagctgctggtgttcgtcaccccgaaggtgctgcgcgtggccaggcagaactga

SEQ ID NO: 497930 - DNA, 450 bp, Stenotrophomonas maltophilia
atgagcgccaaccttccgctgcgcgatgtgcagttgccgccggcaccgtcgtggtggccgccggcccccggctatctgatggtcggtggcgcggtgttgctggtgatcctggcgctggccctgctgtggtggcagcgccgccgtcgtcgccaacgctggttacaggcgttcgaccaggagctggccaccaccgccgatgccaccgcggaactggcggcgatcgccggcctgctgcgtcgcgccgcgcgacaggcacagcccggcagtgaatccctgcgtgacgatgcctggtggcagcgcgtggatccgaagggcacgttgccggatgcgcgccgcaacctcctggccgaaggtgcctatcgtccccgcgtggacgccagcgaagtggcggccgtgcgtagctgggcgcgcgagcgctacctggcgatgctgctggagcgccgccgatga

SEQ ID NO: 497931 - DNA, 1197 bp, Stenotrophomonas maltophilia
atgactgagctgctcaacggagtgtggcaggccagcctgtggttggcggtgggcgcggtcctgctggcggtgatgcggccgctgttggtgcgattggggggcgctggtctggcctatcgcagctggtggttgctgccgatgctgctgctggcactgatgctgccgttgccgcaggttgcgttgttgcagcaggtacccacgctgccgctgaaagtcgtgccgggtgccgtggatggactgagcgggcagtcgctgccatgggcacccctgctgctggcatgggcgctgggcatgggcctctgcctgctgcgcgacctgcgtgcgcagcgccgtttcgaacggcgcatgggtccactgacgccgcgcaccgatggcagctggcaggccagcgccgacccgggcctgccagcgctggttggcctgtggcggccgcgcatcgtggtcggccctgacttcgaccagcacttcagtgcacaggaacagcacctgatcgtgcagcacgagcgcagccaccgtcgcaatggcgaccactgggccaacggcgcgctgttgctggtgcgcgcggtgttctggttccacccgctgctgccctgggccgcacgccgcttcctgcgcgaccaggaactggcctgcgatgcccgcaccatcggcccgcagcctgcgctgcgcggcctctacgccagcacgctgctgaaggcgcagctggtccacccggttgcgcccgcggtctgccattggcgcagccaacccgtgttgaaggagcgcatcgccatgttgaagcagtccaagcggaaggcattgccgtgggtgtcgggacaggtactggtggtcggggtgtgcctggggatgggagcggtggcgtgggccagccagggcggaggcgcgggaggcgcggcaggggccgtcatggatcgggagatccaggtcgacaagatgccgccgccgtcctatccgaaatctgcggtcgagcagcgccaggtgggcgtggtgaacctgcgcgtggaagtggatgcccaaggccatcccaccgacgtccaggtgctcagcgccaccaatccgggggtgttcgatgctgtctcgattgctgcggcgcgcagctggacctatcggcccgcagtgaagaacggcaagccggtggccggtgccgtgcgcgtcccgattacctacgccatggatgacaccgaggacacgaagtga

SEQ ID NO: 497932 - DNA, 564 bp, Stenotrophomonas maltophilia
gtgaagcgagcgccgctgctgatgatggcggtgctgctggcgggatgtgcaacccaggatcgcctgaccaccgccgatacccgcagcgagaatgtgggtcaccagcgcctgcgacccgatgcggggggagggaccggccagatccagccctacgcgctggccgccagcgaaggctaccgcatgccacaactgcatacggcaccggacccggtagtgggcgagcgtgatccacgcacctcgctgccgccgactacggtctgcctgcaggtggtggtggatgcgcagggtagcgttgagcgcagcatcccgctgaccgaccgcagcgaatgcagtgcgggtgaggcaccggagaatgcgcccttgctgcaggcagcgcaggaggcggttgccatgtggaagtactcgtccgccgcagtctgcgacttcgcggcaggcaaagtgccggctgatcgcggcgactgccgcagtgccgagcgggtcgaaccggtggccgtcaccctgcagtacgccttcaccttcgaggtcgtgaagggccggcagacggtccgcacgcagggaaaatga

SEQ ID NO: 497933 - DNA, 2664 bp, Stenotrophomonas maltophilia
atggaagcactgattgccctggtcgtactggtcctgctggccatcccgctgctgctggtggtggcgctggtgatgattgccggcctgcgccgccgcgtcgccgcgctggaaagcgccatggctgccgcgccggtcgccgccatgcacgcgcctgaacggcctgcggccccccctgtggccagtgccgatccaccgttcctgcggccggtggcggctgctgcaccgcctccgcctccgcctcagccaacgccggtgcgcgaagcggtgcctgcggcaacggaggcgccgcgcccgatcgcaccaccgccggtgccacccgcgccgatgcagccaccgttgccttccggaccggcgctgccgaacttcatcgagcgcggcattggcgcggtcaagcgctggttcaccgagggcaacgtgccggtgaagatcggcatgctggtgctgctggccggtgtcgctgcgctgctgaagtacgtcagcgaccagggctggctggtgctaccgatcgagctgcgcctggccggtgtcaccgtcggtgcactgggcctgctggcgttcggctggcaccagcgcgagcgccggcgcctgtttgcgctggccttgcagggtggtgccatcggcgtgctgctgctgaccatcttcgcggccttcaagcgtttcgagctgattccgccgggtttcgccttcgtcagctccattgcactggtggccgcgctgtgcgtgctggcggtcgtgcagaactcgcgcacgctggcggtgctgggcatcctcgccggcttcatggcaccgctgtggctgtccaccggcagcggcaaccacgtggggttgttcagctactacgccgtgctcaacgccggcatcttcgccattgcctggttccgaccgtggcgcgcgctgaacctgctgggcttcgccttcaccttcggtatcggcacgttctggggcgtgctgcagtacgcgcctgacaagttcagcagcaccgagccgttcctgctgctgttcttcgccttctacctgctgatcccgttgctctacgcacgccggcagcccgccgggcagcgtgacctggtcgatggcagcctggtgttcggtacgccgttggtcgcgttctcgttgcaggcggggatgctgtaccagcagccgatgacgctggcgctgtgcgcactgggcctggccgcgatctacgcggcgctggcgtgggcgttgatcaggcgcgcgtcgtacaccgtgctggcgcagtcgcacgcggtgctggcggtgggctttgccacgctggcggtgccgctggccttgtcggcgcgggccacctgcgcggtcttcgcgctggaaggcgccggactggcctggttggggctgcgccagaagcgctggctgccgcaggtgtccggcgcgctgctgcagatgggcgctgcgttcgccttcgtggccggtggcgatcactggcatgaggacctgcgcttcctgatcaatccgactgccatcggggcgctgctgctggccctggccggcttcgcgtcggcctggagctaccagcgcaggtcacgccacgagatcgccctggtctactacctgtggggcctgctgtggtggctgggcggcatggcgcatgagatcacccgcttcttcccgtaccgcaccgaagtggacgcgttgctggtgctggccgccgtcactgcctggctggccgccgaaatgcagcgccgtcagccggcacgcgcactgggcgtgaccgcgctggccatgctggcgctgggcttcccgctggcgctgatgcagagcgacgcgcaccatcagccgttcgccggctacggtgcgctggcctgggcggtgttcgcggtgatgggcgtgcgcacgctgctctgcctgcgccaggggggcgacagcgtggcgcgcatcgcgcagttcctgtggtggctgttgtggccgtctctgctttcgctgctggccctgtggggcggtggcgaggccggtctggcacagggctggaccacgttgctggtgacggtgccgtggctgttgatggcggcactgtcgctgtggcgctggaatgcgctgcgctggccgctgggtgcagcgttcgatcgcgtgcgccagccgctgcagtgcgtgctgttcggcctgttgtcgatcggctggctgtccggacagctgctgccgggcgatgctgcgccgctgctctggctgccggtattgaatccggccgagctcggacagtggctgagcctgttgctgcttgcacgctggctgtacagcgatcaggcgccgaagaccctgttgggaatccgcatgccgctgctgtcactggcaacgttcgtcgcgctgaccagcgtggtgctgcatggcgtgcatcagtggggcggcctgtcgtggagtgcgtcgatgatgcgttccagcctggcgcagaccagcctgaccgtgctgtggagcgtgctcggcgtgattgcctgggtgtggggatcgcgccgtggccagcgcgtgttgtggatggtcggtgccgtgctgatgggcgtggtgctggccaagctggtcatcgtcgatcgccagcacctgggcaacctgctgggcatcgcatcgttcatcgcctacggcctgctgtgcacggtcgtgggttatctggcaccggcaccgcccagcgcggcgccgtccgtggaggaaaaacaatga

SEQ ID NO: 497934 - DNA, 912 bp, Stenotrophomonas maltophilia
atgcgccgtcttcttctctgcctgctggccttgggtatgcacctgccttcggcaaccgcccgcggcaggacaccggaagacgtcgtttcccaccaccttcaggcaatgcaggaacgctacgacctcgcactgcagacgcttgtccagcagcgcgaggccgaccaaacgggtacaaccgatattcccgtcgatgctccccccatggcggtgttgctggcgacctggacgaggaacatcgaacgtcatgtcgatccggttgatggcgtggactcgccgcatcttgcctgggcgctgcaggttctggccaacagccgatgccagccgaatcggagtgaggtgtggcacagcctgaccgaagacatgcgggttgccgacgtgtacttcacctgccgcgtgggcgatatcgagcgtcttcggcatctgtccgaggccaccgtcttcgatgacagcgagcagagcgatcaacgtttctggaaagcctacctctcggtgctccgcgacggccccttccacgagatcagcggcaccacccgcctggtatcgaccgctcgggagcccgattggcacagtgaagaatcggtccatccgaacgacgatgtctcacgcacccgcgtcgaaaccgacatacacgatgtcctggttgaagcgcttatcgcgcaaccgcggcgcctggaccacgctggcacgcatgacgccatcgcacagatgaccggcatcgtggagtgtgacgacctgctgcaacagcatcgccgctgcgtggcccgcattgcgccgcaggaactcaagggtgtgagtgatctggccagtaccctgagcaagcggcgacagcagattcccgaggcggagctgctgcggcaatgcatggccttccggcccagaatgcaggcactctggacccgtgagtgccagtag

SEQ ID NO: 497935 - DNA, 426 bp, Stenotrophomonas maltophilia
atgatcaatgctgttgccctcttctaccggggcaatcgcatgaaacaccgtacgacgtcgaccacggtcatgctgctggcgctgatggtgtgctggcaggccgaagcgtccagtttcaatcccagacccaagaccttcattgtccgcccatcggttgctttcgagtcgaaccagctacgtgacagggacatcgatgcacagctgagcgaagacgacgactgccgtgcgttcctgatataccacgatgagtgtgcgccgacggtattgccggacgagtacgacgacggcatcagccgacgcaggctgcggtcgaagtcaacgcagctgacgggggaagcgctcggcgcttactgccgtgacctgcatgtgctgtggaagcagcaatggaaagagcagtgccccacccacgaggacgagggcacctga

SEQ ID NO: 497936 - DNA, 474 bp, Stenotrophomonas maltophilia
atggatgagcgccgcctcaagtacctgtacatcgcgctggcggtgctgttcggcctgcccagcctgttcttcggcggtgccggcgcctgcatcgccgtggtcatgggggtgatcgggctcgtctcgctggaagcggacaaactgtggtttgccgcctgcatgttcgcgtggggatcgtgcgcgatcgccggcctcgtggcctgggtcgcactgagcatcgtctggctgcgcgatggtgcacgcgggctgcacatggcatcacgccgctggtggctgctgctgggcctgggcgtgctggcaggcctgcccttgctggcgatggcgctgtattacttcgccgagctgggttcgtccgtgctcagcgggctgttcgccgggccgtccctgctggtgcccaccggtatgttgatcctcctgcggctgcgtgctgacgccctgggcgagccatccggcccggtacggtcaaaggagtag

SEQ ID NO: 497937 - DNA, 381 bp, Stenotrophomonas maltophilia
atgcgcatcaatcgagtaatggccagtgccgtggcctctgtgctggcactgggcgccgtggccccggccttcgccgacaacgaccatcgccgcgaccacgaccgccgtgaatggcgggaggatcgccgtgagtggcgccaggaccgccgtgactgggagcgcgaccgccgcgaggcccggcgcgactgggagcgcgaccgccgcgactggcaccgcgaccatgaccgctactaccgtccggcaccgccgcgggtggtctatcgccctgcctatggccccggctacggctggaaggtcggccaccgctaccgcgactactaccgtggcccgatctacgtggtgaacgactacccgcgctacaacctgcgccgcccgccgtaa

SEQ ID NO: 497938 - DNA, 366 bp, Stenotrophomonas maltophilia
atgagaacctcccttctgctgtgcgtggccctgatgtccgtcagtgcgctggcccaggccagcagcggcagcattcgtttcagcggccgtatcgccgagccgggctgcatgaccaacctgtcccagggcgagctgagcctggcggcctgcccgccgtcggccaagggctcgacggtggctgtgacggcgctggccgatggccaggccgcgacgctgcgcgacggcaagcgccaggggcagaagctgtcggtgtcggccagcgcgatgcgcgccggcgatatcgccttctccgagcgctacagcgtgcaggcttcgaagcagcagccgctgcagggcgcctacctggtggtggtcgactacctgtaa

SEQ ID NO: 497939 - DNA, 795 bp, Stenotrophomonas maltophilia
atgaaacttgagcagatcagcctgcgcaccggcttcctgctggccctggccggttgggctgcggcggtctggctggccactggcttcggtctgggcagccagctgccaggtgcggatggcgatgccgatgcggtgccttcgctgccggtgctgccgccgttggccgcagaacgcatgcccagcgccgacagctacagcgcgatcggtgagcgaccgctgttcgccgaggaccgcaggccgaagccctacctgctcggtggcagcgagccggccgccagcgccgcgctgcgcctgaccggcgtgctgctgaccggcgacttcggcatggccaccttcaccaccgaacagaaccgttcgctgcggctgcgcctcaacggcgaagcggtggacggctggcaacttgtggggcttgcgccgcgccaggccacggtgatcggcccaagtggcagccaggtgctggaactggccgtgttcaatggccagggcggcgagccgcccaccgtactgcggggtgccaatggcgcgccgccggcgggtgcggtcgttgtgccaccgccggcgggcgctccgccgatgccatccccacctccggctgctgcaaccgcaaccgcgcagccgcagcccgccagcagcgtgccatcagccgccgccgcggcacctcctgccaacaccaatggccccagcgaagcgcagatgcaggccatccgcgaacgcatccaggcccgtcgccgccagctgcagcaacaacagcagcaacaaccgtcgccgcccccgggcgatggcaccaaccgatag

SEQ ID NO: 497940 - DNA, 1893 bp, Stenotrophomonas maltophilia
gtgatcaagaagcagaaccttcgcatcaatgtgttggcagccgccgtgctgtcgctgaccggtgttggcctggcacaggccgccgacctgaaagcaaatgcgccgttgtccggcccgaagacgcagcaggttgatggcatcatcgtgaagtaccgcgctggcagcgccgcagctgccgatgcgaacgccaagctggccgtggtcaactcggccatcgcccgcgccctgccggcaggtaccaacgcggctgcgcgcagtgccgcgctgcgcccgcaggtggcccgcaagctgggcatcggtgccgatctgatccgcctgcagggagggatcgcgcgcgccgaactggacaaggtgctgggcgaactgaaggctgacccgaccgtcgaatatgcggtggccgacgccatcatgtatccgatcgatgccgcgtcgtcgccgcgtgcggacgccgtcgcgaagtccgatgcgtcgcccagcttcgtgcccaacgatccgtactaccagagccacaactggcacttccacaacccggtcggtggcgtgaacgcaccggccgcatgggacgtctcgcagggcgagggcatcgtggtggccgtgctcgataccggcatcctgcccgagcacccggatttcgccgccggcaccctgctggagggctacgacttcatcagccaggccagccgctcgcgtcgtgccgccgatggccgcgtgccgggtgcactcgactacggtgactggatgcccaccgccaatgcctgctacgacggttcgccggtacgcgacagcagctggcacggtacccatgtgaccggcaccatcgccgaggccaccaacaacggcctgcataccgccggcctggcctacaaggccaaggtgttgccggtgcgcgtgctcggctactgcggtggcaccctgtcggacatcaccgacgccatcacctgggcctcgggcggtaccgtggccggcatccctgccaaccagaatccggccgagatcatcaacatgagcctgggcggctccggcagctgcgatccggcctaccaggcggccatcaccggtgccaccaaccgcggtaccctggtggtggtggcagccggcaacgactcgatgaatgtcgccaacgcccgcccggccaactgcgatggcgtggtctcggtcggcgcgaccggcatcaccggcgccatggcctactactccaacttcggtacccgcatcgatctgtccggcccgggcggtggcgtcaccgacggcaatccgaacggctatgtctggcaggcggtgtccagcagcaagacgtcgccgccggcagccggttccaccgagggttacacccttggcggcaaggccggcacgtcgatggcggcaccgcatgtggctgccgtcgccgcgctggtgcagagcgcgctgatcgccgccaaccgcgacccgctcgcgccggcgggcatgcgtaccctgctgaaggaaacggcacgtccgttcccggtcagcattccgtccgccaccccgatcggtaccggcatcgtcgatgccaaggccgcgctggacaaggccctggaagagccgtgcaccgagaactgcgggccggtggccaagccgctgaccaacaaggtggccatcggcgggttgagtggtgccaccggcagcagcgtgctttacagcttcgaagccgcggcaggcaagcagctcagcatcatcacctatggtggcaccggcaacgtgtcggtctacctggccaagggccgcgagccgagtgccaccgacaacgatgcgcgctcgacccgtccgggcacctcggaaacggtgcgggtgacggcaccgactgccggcacctactacatcaaggtggtgggcgaggcggcttacagcggtgtgagcattctcgccacgcagtaa

SEQ ID NO: 497941 - DNA, 1845 bp, Stenotrophomonas maltophilia
atgaatacggatgcggcggtgcgggaggcggctcgccgtgcgggcctgctggtccgctggaccgacgtggccggagcagagcgcgaggttgcgcccgacgtgctgcgcgccgtgctgtcggagttcgcgtgcgacggtgcgccggtggtccacccgttgctcaccgcctgctgtggtcagctcctggccatgcctgaggcaacgggcgcggcgtgctgggtggacgagcagggcacagcgttgcctgcacgtgcggatgcgcaagggcgctggcgggttccggatcagccaggctattggcagtggcgccagggcgggcagcaacaggcggttgcggtggcaccgcagcgtgcctggtggccgcagggcctgctgcgcggttggggtctgtcggcgcaggtctacagcctgcgcgcgcccgatgatgccggcatcggtgacagcgccggctgtgcgcggtggcgcgagctgctgcaccgtcacggcggcgatgcactggcgttgagtccgctgcacgccggcctgccaccgggtccgggctacagtccttactcgcccagcgaccggcgctggcttgacccgctgcaggtgtcgctgccgcaggttttgccggaggccgccagcagcgtgttgcgcgaggacgaagcactggcgatggccgttgaagcggctaccgcagcacgccgcatcgactggccgcactcgtcggcagtgaagtggcgctggctgcgccaagggcgccaatggctgcggcagcaggcgccggcacagtacgaacagttgcagacgtggtgcgatgcgcagggcgaacccctgctgcggtattgcgagcacgccgctgaccgcttcactggaagcgccgacgaccatgcgtttgcgcagtggttggcgcggcaaggctgggcgcaggtgcaggcgggactgcgcagcgacggcgcgtcgatcggactgatcgcggatctggcagtgggttgtgcaccgcagggcgtcgaggcccggaccggcggcgaccgtctgctgcagagcctcgagctgggcgcgccgccggatgcgttcaatccgctgggccaggcctggggtatcaccagctggtcaccctctgcgttgcagcgcgaagggtttgaaccgttcatccgcgtgttgcgcgccgtgatggcgggtcgcggtggattgcgcatcgaccacatcctgggcctgcagcggctgtgggtgctgcctcgtggcgcaggcgccgggcagggggtgtacctgcgctatccgttcgatgatctgatcaacctgctggtgctggaatcgtggcgccatcgctgcgtgctgatcggtgaggaccttggggtggttcctccgggtatccgccagcgactggcagcccgtggcgtgctggggcttgaggtgctgccgttcgcccgcaacggtgagcgcttcctgccggcgccaaggtggcgccgcgatgcggtggccatgccctccacccatgatctgccgccgctggccggctggctgcgtgggcgcgacctgcgctggcgtgcacgcctgggtgagctgaccgagcttcccgcggcgctgcacgcgcgtgccagcgaggtacaggcgctgtccgcagtcgcccggggcgagggcgcgacgctggaagcgcgtgcgctgtcactggtggcgcacgcaccttcacggctggcgctgctcccgctggaagacgcgctgggcagccgcgcgcaggtgaacctgccgggtaccgtcaacggtcacccgaactggcgccgacgcttgccgcttgcgtgggatccggacgcggccgacgcgcgcattgcccggttcagcgccacccgacgcaaggcgggacgatga

SEQ ID NO: 497942 - DNA, 2238 bp, Stenotrophomonas maltophilia
atgagccacgacagcctgcagccggtcgccctcgaggacgactccatggcaactgccggacgggaggagggcgtggtggctccggtcctggacgacctggttcatgcacggccggccgatgcgtttgcctggctcgggccgcaccaacagcccgatggccagcgccagctgcgcgttctggtgccccacgcgcgtcgcgtggaggtgattgcgggcccggagcggcgctgggatctgcaaccgggccccttgcccggcctgttcgaaggtgcagcgggtgaagcgcccgtgccgctgctcgccctgcatttcgagcagggtgtggagcaggtgcacgatgcctattccttcggtccgctgctggatgaggcgctgctgcagcatttccatgccggtgatgctgatgcagcgcggcagttgggcgcggtagcgatgcaggtacagggtatcgacggcgtgcgcttcgcggtgtgggcccccaacgcacgaagggttgccgtggtcggcgatttcaacgggtgggatggccggcgccatccgatgcggctgcgccacaccgctggcgtgtgggagctgttcctgcctggcgtgcaggccggtgcccgttacaagttccgcattgtcggcgccgacggccgggtgatgcctgacaagttcgatccgatggcgcgctgggccgagctgccaccggcgaccgcatcgcgggtgccttcggctgtgccgatgcagtggcacgatgacgcatggttggcggcccgccgccaggccggaacccgcgcaccactgtcgatctacgaagtgcatgcggcctcctggcagcgcagcgacgatggttcgccgctggactgggatgccttggccgaccggttgattccgtacgtggcagggcttggtttcacccacatcgagctgctgccggtcagcgagcatccctttggcggttcctggggctatcagccactggggatctacgcgccaacggcgcgccatggcacgccacaggcgttcgcgcgcttcgtggaccgctgccatcaggccggcatcggggtgatcgtggactgggtgagcgcgcacttccccaacgacgcgcatggcctggccgggttcgatgggaccgcgctgtacgagcatgccgacccgcgtgaaggggtgcacgccgactgggacacgctgatctacaactatggccgcaacgaagtggccgcctacctgatcggcagtgcattggagtgggtggagcggttccacatcgacggtctgcgcgtggatgccgtggcgtccatgctgtaccgggattacagccgtgccgagggccagtggatacccaacgagcagggcgggcgcgagaacctgcaggcggtcgcgttcctgcggcggatgaaccagacgctgcgcgagcgctttccggacgtgctggtgatcgccgaggaatccactgcatggccgggggtgaccgcgccggtggagcagggcgggcttggtttcacccacaaatggaacatgggctggatgcacgacaccctgcagtacctggggcgcgatccggttcatcgccagcatcaccatagtgagatcagcttcggcttggtctacgccttctccgaacggttcgtgcttccgctttcgcatgacgaggtggtgcacggcaagggagcgctgctggccaagatggcgggtgagccggtgcagcggctggcccagctccgcgcgtactacggtttcatgtgggcgcacccgggcagcaaactgctgttcatgggcggcgagttcggccagggacaggagtggtcgcacgatgcggcactggactgggtacaggcggccagcaacgagggccagggcctgtcgcgcctggtgggcgacctcaatgccgtgctccgcgccgaacctgcgttgcaccgcgacgaacgcgacgaacgcggtttcgactggagcgtggccgacgacagccgcaacagcgtctacgccttcatccgccgggatccggccggtagcggccgcacccttctggtagtgagcaacttcactccggtacgtcgcgacggctaccgggtcggcgtgccgcaaccggggtgttggaccgaacggctcaacaccgacagcggttactacggtggcggcaacgcgggaaacctcggcgcagtgcataccgagccgcggccgatgcatggtcacgcgcagtcgctgcggctgaccctgccgccgctgtccacgctgtatctgcaggttgatgcatga

SEQ ID NO: 497943 - DNA, 684 bp, Stenotrophomonas maltophilia
atggatctggactggagcgcactggggttgtcgctgaaggtggccggctgggccaccgcgatcaatctggtgctgggcgtggcactgggcgcgctgttggcgcggcggcgctttcccggccgcgagctgctggattcgctgctgaccctgccgatggtgctgccaccgacggtgctgggctattacctgctggtgctgatcggccgcaacggcccgatcggcgcgtggctgcagtcgtggttcggcatcaacctggtgttcacctggcaggccgcggtgatcgccgcggcggtggcttcgctgccgctggtgttcaagccggcacgcgcggcgttcgaagaagtggacgggcagctggaacaggctgcacgcacgctgggtgtgtccgaagcagcggtgttcttccgcgtcacactgccgctggcatggcgcggcatcctggccggcctgttgctggcgtttgcgcgcgcgatgggtgaattcggcgcgacgctgatggtggccggcagcattccgggccggacgcagacgctgtcgatcgccatctacgaggcggtgcaggccggtcaggatggcaaggccaatgcgctggtgatcctgacttcggtggtgtgcatcgtgatcctgttgctggcagcgcggctggtgggcggacgtcgccgggagctgcgtgatgtggcttga

SEQ ID NO: 497944 - DNA, 1224 bp, Stenotrophomonas maltophilia
atgtctgccatgagcttccacgttgacgagagcgaggacactgcgctgcaggctgcattgctgcggcaaccgcggcacgtgctgtttccgccggctgaccagttcagtactggttttggcgaaagcggctggcgcgctgccatgcgcgccagcaatgagcacctgatcccacgcggcttgacgctcggcttccaggtcggtcgtggcgggcgcggtgtgccgccgcaggcctatctggacaccttgctgctggcgctgcggctgcaggccgacgtgctggccgaggaccgtgaagtggtggcgatggtactgcagctggggctggccgagacgttgccgccgccgcagctcggccagctgctggatgcggtgccgcagcacctgcgcaccgtggcgcggccccaggtggaggtgcggctggacgcaggcagcgcgctggcgccggcgcagctgcgtgcggtgggctgcacccgtttgaacgtgatcgatcgcgccgatgcaccggggccgaccctgctggcacaggcgcgacaggtgggcttcaccgcgcgctactaccagttgcgggtacccggcagcgaggacgctggcttcattgaacggctgcacgaggtgctggccgaggcaccggagcgcatcctgctgccggcgccgtgtgcgctgccagaatacccctcggccgtccattggctgcaggcctggcgcctgctgcgcgctgcgggttacgaaccgattggtggcgatcactatcagcgcggcgatctgccgaacccgcacggtccgggcgatggccagcgccattgcgatcttgccagcgtgccacgccgcgaccgcagtgatttcatcgggcttggcctgtctgcctgcagccagatcggcgaggtgttctaccggctggaggacgaactgggcgaatggcgtgcgcggctgctggcgggtcacatgggagtctccgccgggctgatcctgtccgaggacgagcggttggtggccgaagtggcgcagagcatcgcctgtgaccacgccctcgatgcggctgccttcgagtggcgcaacgatgaaccgttcgaggaatgtttcgccgaacagctgcccgcgttgtcgccgctgctggcacgcggctgggcgcagtgggatgcgcgcgtgctgcgcctggccgaagaagggcgcctgctgtggcgtatgatggccgcatgcttccggccggcggccgccatcgcttga

SEQ ID NO: 497945 - DNA, 1332 bp, Stenotrophomonas maltophilia
atgaaccaggcccttgcccccgccagtgccggtcagcagcaacgtgcgctgtggctgactacgttcgccttcaccgtgtgctttgcggtgtggatgatcttttcgatcatcggcatccagatcagtcaacagctcggcttgaatgacacccagttcggcctgttgatcgccacgccggtgctgaccggttcggtcagccgggtcttcctcggcatctggtccgaccagttcggtggccgcaaggtgatggtgctggtgatgctgtgtggcgcagtggccacctggatgctgacctacgcgcagacctacacccagttcctgattgccgcgctgtgcgtgggcatcgccggcggcaacttctcggtgggcgtggcctacgtctccaagtggttcccggccagcaagcagggcaccgcgctgggcatcttcggtgccggcaacatcggctcggcggtgaccaagctgctggcgccgctggtgatggtggcagccggctggaccatggtcgccaaggtctgggccgttgcgctggctgtcactgcggtgctgttcttcctcttcagcaaggaagacccgtcgctggagcagcgccgccgcgagggcgtgaagccggtgccgttcgccgagcagatggcaccgctgaagaacctgcaggtctggcggttctcgctgtactacttcttcgtgttcggcggcttcgtggcgctggcgctgtggctgccgcactacctggtgggcgcctatggcatggacgtgggccatgccggcatgctggcggcgtgctattcgatcccggccagcctgttccgcgtggttggtggctggatgtcggaccggatgggcgcgcgccgggtgatgtactggaccttcggcgtgtcggccatctgcaccttcctgctggcctacccggataccgagtatgtggtgaagggcatccatggcccgatccacttccatctggccatcggcgtggtgatgttcaccgtgctggtgttcgtgctgggcttcttcatgtcgctgggcaaggccgcggtctacaagcacatcccggtgtactaccccaagcacgtgggtgccgtgggcggcgtggtcggcatgatcggtggtctgggtggcttcatcctgccgatcgtgttcggtgcattgaacgatgcggtgggcatctggagcagctgcttcatgctgctgttcgtgctggtggccgctgcgctggcatggatgcacctcgcgatccgccgtatggaacgccgccacttcccgcagatcgaccgcgaaaccgacctgcccgaagccatcgatgcggccgccgccgagcgggtgcgcggtgggtga

SEQ ID NO: 497946 - DNA, 900 bp, Stenotrophomonas maltophilia
atgggcagcctgccgaagttcctgccgatcaccgtgatcgactccgccgcgccggttcctgccgaggcgcattcgcatcaccatgacgcggcagcgcagggggcgcgctcgctcgggcagccggcgccgtgccggctgttcgtggacgagaccgcgatcagcgaggccgacatcgcccgcgagatgcagcaccatcgggcgatgcgcccggaacagtcacgtgccgaagcggcacgtgcactggtggtgcgcgagctgctgcgcctggaagcgcagcggctgggcctgcaggcaccggagggcaaccgggtaagcgatgaggaagtgctgatccagcaactgctggaagacgcgatcgaagaccgcgtgccgaccgatgaagactgccggcgctacttcgtgcagaacccggagcgcttccgctctcccgaccgtgtgcgcctgcgccatatcctgctggccgcgccggccgacgacgtggctgggcgcttcgccgcacgtaccgagggcgagcggctggtcgggctgctgaaggagtcgccgcacctgttcgccgatttcgccctgcgccattcgcgttgcccatccagcagcgagggcggcgacctgggctggctgcagcgtgggcagaccacgccggagttcgaccgccaggtgttccgcctgcgcgagggcctggccggtttcccggtggaatcgcgctggggctaccacgtggtctgcgtcgatgcacgcgaggaaggccagccgcagccgttcgatgccgtgttgccgcagctgcgcgactacctggaactgcaggtgcgccagcgcgaggtgcaggcctacctgctgcagctgcaggaacgctacccggtgcgcgggctggatgcgatcgaagccgaagcggatatcggctga

SEQ ID NO: 497947 - DNA, 708 bp, Stenotrophomonas maltophilia
atgagttactccctgcatcaattcgccttccagtactacccgtacatcgccgtggccgtgctgctgatcggcagctgggcccgctatgacaaggccatgtacacctggcgcaccggctccagccagatgctgtcggacaagggcatgcggatcggcagcaactgcttccacatcggcatcctggccatcctcggtggccacctggtcggcctgctgaccccgcacgcagtgtacgagcacttcatcacctcctcgcagaagcagatgctggcgatggtggtcggtggtgtgttcggcgcactgtgcttcatcggcatcagcatcctgctggtacgccgcctgttcaacgcgcgcgtgcgggccaccggcagcttcggtgacaccctggtgctggtgttgctgttcgcccagctgtgcctgggcctgtacagcatccgcatctcgtccggccacctggacggcggggtgatggtgcagctggccgagtgggcgcagcacatcgtgaccttccgtgccggtgccgccgactacatcgagggcgtcagctgggtctacaagatgcatatcttcctgggcctgaccctgttcctgatcgcgccgttcacccgcctggtgcacgtgtggagcattccgatcagctacctgtggaggccgtaccaggtggtgcgccgccgccaggccacgctgcgctacgggccgcgggagtaa

SEQ ID NO: 497948 - DNA, 681 bp, Stenotrophomonas maltophilia
atgagcgtgctcaagctggtcggggtgttgctggactacccccgcgaagaactgtgggagcacggcgaggaactgctcgccgcctgtgacgacccggcgctgaacgccacccgccgccagcagctgcgcagcttcgtgcagcagctgctggccaccgatgcgctggatgcgcaggcggcgtggctggccagtttcgaccgcggccgctcgatgagcctgctgctgttcgagcacatccatggcgagtcgcgcgaccgcggccaggccatggtcgatctggtcgaaacctaccgccgcaacggcttcgaactggatgcacgcgagctgccggattacctgccgctgctgctggagttcctggcccatcgcccaggcagcgaggcccgcgagtggctgcaccacatcggccatatcgccgggatgctggcggcgcgtgccgccgagcgggagctgccgcaccgggtgctgttcgagatcctggtcgaagccggtgacggcaaggccgatctgcaggcgctgcgccagcgtgccagcgaggaagtccgcgacgataccgccgaggccatggaccgtttgtgggaggaggaggcggtgcgcttcggtgccgaagcccccgccgaagactgcaagccgcccgtgcgttcgccggcccgtccttcgcatcgagaggtccagccatga

SEQ ID NO: 497949 - DNA, 1545 bp, Stenotrophomonas maltophilia
atgaaggtccgtgcacagatcgcgatggtgctgaacctggacaagtgcatcggctgccatacctgctcgatcacctgcaagaacgtctggacttcgcgcgagggcgtcgagtacgcctggttcaacaacgtggaaaccaagccgggcatcggctacccgaaggaatgggaaaaccaggagaagtggaacggtggctgggtgcgcaccggcagcggcaagctggtgccacgcgcgggtggccgctggcgcatgctggccaagatcttcgccaacccggacctgccgcagatcgacgactactacgagccgttcgatttcgactaccagaacctgcacaccgccaaggacagccagcaccagcccaccgcgcggccgcgttcgctgatcagtggcgagcgcatgcagaagatcgagtggggcccgaactgggaggagatcctcggttcggagttcagcaagcgatcgcgcgactacaacttcgaccaggtgcagaaggagatctacggcgccttcgagaagactttcatgatgtacctgccgcgcctgtgcgagcactgcctgaacccggcgtgcgtgtcggcgtgcccctcgggcgcgatctacaagcgcgaggaagatggcatcgtgctgatcgaccaggacaagtgccgcggctggcgcatgtgcgtgtcggcctgcccgtacaagaagatctactacaactggaagagcggcaagtcggagaagtgcatcttctgctacccgcgcatcgagatgggtgagccgaccgtgtgctcggaaacctgcgtgggccgcatccgctacctgggcgtgatgctgtacgacgccgaccgcatcgccgaggccgcttcggtggccgccgagaaggacctgtaccaggcccacctggatatcttcctggacccgaacgatccggcggtgatcgccgccgcgcgcaaggagggcatcccggacagctggctggagtctgccaagcagtcgccggtgtacaagctggcgatcgactggaagctggcgctgccgctgcacccggaataccgcacgctgccgatggtctggtacgtgccgccgctgtcgccgatccagtctgccgccgagcgtggccgcgtgggcatgagcggggaactgccggacgtggcgtcgctgcgcattccgatgcgctacctggccaacctgctgacggccggtgacgaggcgccggtggtacgcgcgctggagcggctgatggcgatgcgtgcctggcgccgggccaggaacgtggacggcgtggaagacacctcggtgctggaacagaccgggctgagcatcgcccaggtggaggagatgtaccgctacctggccatcgccaactacgaggaccgtttcgtgattccgaccggccaccgcgagtatgccaacgacgccttcggcgagcgcggcggctgcggcttcaccttcggcaacggctgcaatggtgacagcccggccgacctgttcggccagcgcaagaccaccaccttcgtggtggacaagggcccgaaccaccgccgcaaggaggtggtgtga

SEQ ID NO: 497950 - DNA, 3807 bp, Stenotrophomonas maltophilia
atgagttatttcctcgatcgcttgcagttcttcaagcgtgacccccagacctttgccgatggccatggttttgccaagagcgagggccgcgactgggaaaacagctaccgcgcccgctggcagtacgacaagatcgtgcggtccacccatggcgtgaactgcaccggctcctgcagctggaagatctacgtcaagaacggcttggtcacctgggaaacccagcagaccgactacccgcgcacgcgcccggacctgcccaaccatgaaccgcgtggctgcccgcgtggcgccagctattcctggtacctgtacagcgccaaccggctgaagtacccgctgatccgcggcacgctgctgcgcctgtggcgcgaagcacgcaagagcaaggccccggtcgatgcctgggccagcatcgtggaggacaaggagaaggcgcgttcgtacaagacccgccgcggcatgggcggcttcgtgcgcctgcagtgggaagaggccaacgagatcatcgccgcctccaacctgtatacagtgaagcagtacggcccggaccgcgtggtcgggttctcgccgattccggcgatgtcgatggtgtcctacgccgccggtgcgcgctacctgtcgctgctgggtggcgcctgcctgtccttctacgactggtactgcgatctgccgccggcctcgccgcagatttggggcgagcagaccgacgtgcccgaatcggccgactggtacaacagccgctacatcatcgcctggggctcgaacgtgccgcagacgcgcacgcccgatgcgcacttcttcaccgaggcgcgctacaacggcaccaagacagtggcgatctgcccggactattccgagcttgccaagctgaccgatcattggctgcaccccaagcagggcaccgacgcggcgctggcctttgcgttcggccatgtgatcctgcgcgagttccatgtcgattcgccctcgcagtatttccaggactactgccgccaatactcggacatgccgatgctggtgcgcctggaacgtcgcgacgatggccgcctggtggcgggccgcttcctgcgtgccagtgagctgggcgggctgggtgaagccaacaacccggattggaaaaccctggcctacgacgagaacagcggccagatcgtggtgcccaatggctcgatcggtttccgctggggtgagaagggccgctggaacatcgaagagaaggcaagcaatggcgccgacacacgcctgcgcctgagcttgtccgaggccaacgacggcatcgaggcagtgagcttcccgtacttcggtggcattgaaagcgatggctggaccgctgcaccggccgaagaagtactggaccgcaacattccggtgcgccggctggccacggccgatggcggcgagacgctggtggccacggtctacgacctgctgctggcccagtatggcgttgaccgtggctttggcggcggcaacgtggcatcgagcttcgatgacatggtgccgggcacgccggcgtggcaggagcgcatcaccggcgtgtcgcgcgccgaggtgatcgagatcgcccgcgagttcgcgcgtaccgccgacaagacccacggccgatcgatgatcatcgttggcgcgggcatgaaccactggttccacaacgacatgaactaccgcggcctgatcaacatgctgatcatgtgcggttgcgtgggccagaccggtggcggctgggcgcattacgtgggccaggaaaagctgcgcccgcagaccggctggcagccgctcgcgttcgggctggactggagcaagccgccgcgccacatgaacggcacttcgttcttctacttcaacaccgggcagtggcgctacgagaagctgcaggtggacgagctgctgtcgccgctggccgatgcgagcaagtacggcggcagcctggccgacctgaacctgcgcgcggtgcgcatgggctggctgccgagcaccccgcagctggaccgcaacccgctgcagctggtacgcgaggccgaagcggccggcgtggccccggcggactatgcgctgggcaagttcaaggacggctcgctggacttcgccttcgccgacccggacgccagccagaaccacccgcgcatgatgttcatctggcgctcgaacctgctgggttcctcgggcaagggccacgagtacatgctgcggcacctgctgggtacgcgccacgggctgcagggcaaggacctgggcgaaatgggcgcagtgaagccgcaggaggtgaagtggcgcgacgaggcgccggaaggcaagctggacctgctggtcacgctcgacttccgcatgtgcaccaccgcgctgtactcggacatcgtgctgccgacggcaacctggtacgagaaggacgacctcaacacctcggacatgcacccgttcatccacccgctgtcgaaggcggtggacccggcctgggaatcgcgcagtgactgggacatcttcaaggaggtggcccgcaccgtgagcgagatggcgccgggcgtgctgggtgtggagaaggacctggtgctggtgccgaccctgcacgacacccccaacgagctgggcatgccgttcggcgtagccgactggaagaagggcgagtgcgaggccattccgggccagaccatgccgtcgatgacggtggtggagcgtgactacccgaacctgtaccgcaagttcacctcgctcggcccgctgctggacaagcagggcaacggcggcaagggaatgagctgggacaccaagcacgaggtggagttcctcggcaagttgaaccacaccgtgcacgaagagggtgtaagccagggccgtccggccatctcgaccgcaatcgacgcggccgaagtgatcctgcacctggcgccggaaaccaacggccacgtggcagtgaaggcgtgggaatcgctgggcaccttcaccggtcgcgagcatacgcatctggcggtgggcaaggaacacgaggcgatccgcttccgtgacatccaggcgcagccgcgcaagatcatctcttcgcctatctggtcgggcctggaagacgacaacgtcagctacaacgccggctataccaacgtgcacgagctgattccgtggcgcacggtgaccggtcgccagcagttctaccaggaccacgagtggatgatcgactttggcgaggccttcatgagctaccggccgccggtcaacacgcgcacggtggagccgctgctgaaccagcgcccgaacggcaacaaggagatcgtgctgaactggatcaccccgcaccagaagtggggcatccacagcacctacagcgacaacctgatcatgcagacactgtcgcgcggtggcccgatcgtgtggatcagcgaggacgacgcgcgcagcgccggcatcgtcgacaacgactggatcgagctgttcaacgtcaacggtgcgattgctgcgcgcgcggtggtcagccagcgcgtgatgccgggcatggcgatgatgtaccacgcccaggaacgcatcatcaacgtgccgggctcggagatttccggcacccgcggcggcatccacaactcggtgacccgcatcgtgctcaagccgacccacatgatcggcggctacgcgcagctggcctatggcttcaactactacggcacctgcggtaccaaccgcgacgagttcgtgatcgtacgcaagatggacaagattgattggttggacgatgaacaaggaagttcgagtgtcgcgggcgcaggacgcgcaggagcgaccgatgagcagcccgctggtgcttcggcatcggccagcaaggaggtggtgtga

SEQ ID NO: 497951 - DNA, 1419 bp, Stenotrophomonas maltophilia
atgaccgtcggtagcgatcctgttgtccgcagcactgccagtcccggtcgcgtcatcagcgactggacgccggaggatcccggctattgggagcgcaccggcaagcgggtcgccacccgcaacctggtcatctcgatcccttcgctgctgctggccttctcggtctgggtgctgttctcggcggtgtcgatcagcctgccgaagatcggcttcaacttcagcaccgaccagctgttctggctggtggcactgcccagcctgtccggcgcgaccctgcgcatcttctattcgttcgtgatcccgatcttcggcggccgccgctggaccgcgctgtccaccgcgtcgctgctggcgccgacgctctggctcggctttgcggtgcagaacccggccacgccgtactgggtgttcgtggccatcgcgatcctgtgtggtttcggcggcgcgaacttctcgtcgtcgatgtccaacatctccttcttctaccccaagcagaagcagggcctggcgctgggcctgaacgccggcctgggcaatgtgggcgtgtcggtggcgcaggcggtgattccgctggtcatcaccgtgggcgtattcggtgcgctgggtggtgcaccgcagcccgcggtggagggtggggcaccgctgttcctgcagaacgccggtttcatctgggtgccggccatcgcgctgtgcgccatcgcggcctggttcggcatgaacgacctgaccagcgcccgctcgtcgttctccgagcaggcggtgatcttccgccgcaagcacaactggctgatgtgctggctgtacatcggcaccttcggttcctacatcggtttctcggccggcttcccgatgctggtgaagagccagttcccggacgtgaacccgctggcctacgccttcatcggcccgctgctgggcgcgctgatgcgctcggtgggtggcagcatggccgaccgctggggtggtgcacgcctgaccttctgggtgttcgcgctgatgatcgcggcagtgttcggcgtgctgcacttcctgcccagcgatggccagggcggcaacttctacggcttcctgctcagcttcatggcgctgttcgtgctcagtggcatcggcaacggcaccaccttccgcatgatcccggtgattttccgcaccctgcatgagcgctggtcggccaacgacaacgccgagggcaaggccacggccgcacaccaggccagcatcgagtcggccgcagtggtcggtttctccggtgcgatcggtgcctacggcggtttcttcattcccaagagctacggctcgtccattacgttgaccggcagccccgacatggcgctgtacggattcgttgttttctatgtcacctgcctggccgtgacctggtggtggtactaccggcgcggtgccgagacaccctgctga

SEQ ID NO: 497952 - DNA, 366 bp, Stenotrophomonas maltophilia
atgaaagtgcagttgcaggaccaatcggtacggcttcgcctggacgaggccgagctggcgcgcctgctggccggtgaaacggtcgagaacatgacccgcttcggcggtatcgaaggctggggcatggcggtgtcgctgcatggcggcgatcaaccggtactgctcgacggaggcaccttctgccgcctggtactgccgcgctcggccgtcgaggccttggcggcgcggctgccgtgccgcgatggcctgccattcgacattgccctggaagatggaagccagcttcagctgcagttcgatgtggacgtgcgcgacagcgtgcgccagcgcggggtgacccgccgcagcaccgcttcatcggtttga

SEQ ID NO: 497953 - DNA, 543 bp, Stenotrophomonas maltophilia
atgagcgtcaacggcatcgtgctggccggcggcctgtccacccggatgggccgcgacaaggcgctgctgccgtggcaggggcggaccttgctggaacacatgcggggcctgttgatgcaggctggcgcacgcgaggtctgggtcagcggaaattacccggcgttcggcggcgtgccggactgcgtggcacgttgcgggccgctgggcgggctctacagcgtggcgatgcgcatgcccgatggcccggcctgggtggtgccggtggatacgccgctgctgccgccgcgattgctgcagcaattgcgtgacggccatcgcggtccatgcacgatctttgccggccatcccctgcccatgctggtggatatagacgatgcttgtcgcaacgtacttgaatcgatgctgggcgacccggacggtccgcgctcgctgcaggccctgcagcgtcgtcttggcgtgaattccgtggcgctggcgccggttgacgaggccgggctggtcaactgcaatacccccgaacaatgggaggatgttgcgtcatga

SEQ ID NO: 497954 - DNA, 501 bp, Stenotrophomonas maltophilia
atgagcgagaagatcatcgcgaaggtggtggaccgcgcgcaggcggcgatcgatccagccgagggcattgctgcggtctctgatccgggcttcggcggcatcgacgtgttcatcggcaaggtgcgcgacgtcaacatcggccggctggtgaccgggatcacctacgacctgttcgagccgctggtgatgaacgagttcaagcgcctggccgccgaggtcgaggcggcgttcggtccgaagctgaagctgtatgtggcccacgccaagggccggttgggcatcggcgatgtggcggtggtggtggccgcgggcagcccgcaccgcgacgaagcgttccgcgcgtgccggcagttgatcgaggtggtcaagcaccagtgcccgatctggaagcaggagcactacgaggacggcgacagcgagtggagcgagggttgcagcctgtgccatgcggacagcgaacccgcccatgcccatgatcatgcgcacgaccacgggcattga

SEQ ID NO: 497955 - DNA, 1254 bp, Stenotrophomonas maltophilia
atgattgcctacagcgatgccttgcagcacctgctggacgcggccaagccgctgccggccgagcatctgccgctgcatgaggccgcgggccgcacgctggcccgtgacatccacagcgcgcagtcgctgccgccgttcgacaattcggcgatggacggcttcgcgctgcgcgccaacggcacggcgttcgaggccggtaccgaatttgccgtgcagggttggcaggcggccggcgatgctggcgccgaaggcggcgagggtgcctgggaaatcatgaccggtgcgcgcatgccggttgggctggatacggtggtgccggtcgagaatgtggagatcctcgccagcgaggacggccgcccggcccgcatcgccctgaagacatcggtgaagccgggccagaacgtgcgcctgcgcggcgaggatgtgagcgacggcgagcgcgtgctgcgggccgggcagttgctggacatcaacgcgcgcaccctgctgcatgccatcggcgtgggcgaggtggcggtggtggcacggccgaaggcggcggtgatcgccaccggcaaggaactggtgaccgaggcggcgcagacgctggaatccggtcagatccgtgacagcaaccggccgtacctggtcggccgcctgcaggccgccggtgccgaggtggtctggcagggcacggtgggcgacgacgtggccgcgttcaacgcggtactggatgcagcgctggacgcgggtgcgcagctgttgatcagcaccggcgcggtgtcggccggccgctacgatttcattcccgacgcgctgcgcggccggggtgcgcgcatcgtgttccacaaggtggcgatccgccccggcaagccgctgctgtttgcggtgctgcccaatggcgcgctgtatttcggcctgcccggcaacccggtgtcggctgcggtgggccagcgcttcttcgttgagccggtactgcgccgcctgctggggctggcgccggagctcatgttgcagctgccgctgcaggccgacgtgcgcaagccgccgggcctgcgcttccacgcgcgtgcgcgggtggaaatggacggacagggacgcctgagtgcgcgcgtgctgtccgggcaggagtcgttccgtttgatgtccatgctgcaggccaacgcctgggtggtgctggaggccgagggagacctggccagcgctggcacctacgtgcgcgtgcagggctggggtcaccacgaaccggtgcagctggtgagccaggagtcatga

SEQ ID NO: 497956 - DNA, 996 bp, Stenotrophomonas maltophilia
atgagtggggaattgaatgcggccttccacatggccgatgtccgtaacaagcgcatcagccgccgccgtgcggtggcggtgggcgagctgcatgccggtccagtggcctatccgctgatcgtcgagcgccgcctgcccaaaggcgatgcgctggtgatggccgagattgccggcctgcagggcgccaagatggcgtcgatgctgatgccgctgtgccatccgctgccgctggaactggtgcaggtgttctgcgcaccggtgccggagcggcaggcgatccgcgtgtggtgcgagtgcgccagcgaggcacgcaccggcgtcgagatggaggcgctggctggtgtcaacgcggcgttgctgaccctgtacgacctgagcaagccagtggaaccggcactgcgcatcgaaggcatccgcctgctgttcaaggaaggcggcaagcgcggggtctggctgcacccggatggcatggacgaggccgagcgcgtgcgtttcaacccacgtgcacctaaggggttggagggtgcggcctgcgcggtgattacgctgagcgatcgcgccagcgaaggcacttatgaggatgtgtccggcccgaccctggtgaccggcctgagaaagctgggtggcgacgtagtggccgccgaagtgctgcccgatggcatcgagccgttggcgggccgcctgcaggccttggctgccgagggcgtgcgcctgtgcctgtgtaccggtggtaccgggctgggcccgcgtgacctgaccccggaggcgctgcgttccttgaacgcgcggcccgtgcatggcctggcgcagatggtgcgggccctgagtgcgcagcacacgccgatggcctggctgagccgcgccgaggtggtacagctgggcaacatgctggtgttcgcattgcccggcagcccgaaggcggcggcgcagtgcctggatatcctggcgccggtactgggccatgccctggcgatggtcgagggggatggccactga

SEQ ID NO: 497957 - DNA, 405 bp, Stenotrophomonas maltophilia
atgatgatgaacgatttccagcaactgctgcatgccgccggcgagcaggctgaaccgcaacgcctgctgttcgtattcgtgcgcgccgagctgcccgaatcgcccaccggtgaccagcgcgaccggcatgaccgccgcgagggcggcaccctgtcgccggtgctgtgcgtggacaagctgccagccgaggtgcccagcttccaggcgctggcgaccgaatcgaccaccaccggcatcgactgggacctggtgttcgtggcggcgctggatggcagaggcggtttcgcacccaacagcgacgaagccgcgcgcccgctgaagctgatggtcaacgccatccatgacggtcagatcggccgcttcgccgccttcgaccgtggcggcgagcccgttcagttctattga

SEQ ID NO: 497958 - DNA, 330 bp, Stenotrophomonas maltophilia
atgaccgcgaccgcttcgctgcaccccacccccgacacccagggccgttcccgcctgtggagtgtgttctggctgcagggcgtcattcccagcaacattctgtgggcggtggccctctgggccctggccaaccagcgcaccacgctgctgctgggggtatttgccgtgctgctgctttataccggctggatcatcccggcggtctggcgggcggcgcccaccgcgcacaaccccaacctgggtgtggcggcgcgcgggttgaccgtcgcctgggggctgaacaccgtgctggtgatcttcttcctgaccctgcagctggtggctcaatag

SEQ ID NO: 497959 - DNA, 285 bp, Stenotrophomonas maltophilia
gtggatggcgaggtacgcagccatgacgcagcgggcaacaccaccagcgtccaggtggagaacgtggaagtcgtcggattcgggggcgtggtgttcctgtccagcacgacccaggttttcggaagcgacattgccacggccatgcttgccgatgccgacggcgtaccggtgagggtcaccttgtgcctggacaatcacgatcagctcttcgagctggagctgtgcaaggtggacttctcgccgatcatcggcgtcgatctgaggagcgctttcagcgagtactga

SEQ ID NO: 497960 - DNA, 213 bp, Stenotrophomonas maltophilia
atgaatacgtatgaccatctcgtctgtgttgatgaagatgcaaaggaattggttgtttttcgggtgggggcagatgggaagaggaccttgttcaccagggtggcgcttccgcaggttgagggatggtctgccgagttgcaggatcttgcgaaagcgctcggcgagaacctgctgatcgactctccggtgatccggcggattctcaatgtgtga

SEQ ID NO: 497961 - DNA, 342 bp, Stenotrophomonas maltophilia
atgcgatgcattcggatactggccatcttctcgctcgttctgggccagctggggtgccgggatgatgctgagagttcaacgtaccccatgggtcagactggaaagacttgcactgccttcaaaggctttgatcgccagcctcccgaagtggttgttaccgaactggctagacgggggttggacagtcgcaggttgatccataaaacagtttgcggctcgatcaccagctgggagatccttcctgcaggggcgtcgatcaatcggatacctcccccagatacctacgtgaacgtctggctgagggaaaacggctctgtttccgtcagtacggacctcccttga

SEQ ID NO: 497962 - DNA, 216 bp, Stenotrophomonas maltophilia
atgcatatgcgcaagaaaatatttaattggcttggtttgttgttctttgcgctaatcttcttgaggtcctcgtcctatcttgtattgaaggcgtatgcgattggccgccttgagaggggcgattattttgtaatgttgcctatggcgctggggtcgctcctgatctgcggcatgtttatggcaattattattaaaggagtgaaagccaatcggtaa

SEQ ID NO: 497963 - DNA, 807 bp, Stenotrophomonas maltophilia
gtggcgctgatcaatgtgccggcgaccggcgtgccggagctggcctacgtccaaccagatcatctgggtacgccgcgcgtggtgatcgatccggtgcggaatgttgcaatctgggagtggagcaacaagagcgaagtgttcggcaaccagattccgagtgccgatcctgatggggatggtgtggcgttcgagcttgcgttgcgcttcccgggccagcaggcgacggatgcgagtgggttgttctacaactatcagcgggaatacgaccctgcagtggggcggtattcgcagagtgatcgcattggactcaggggcgggatcagcacatacggatacgcaggtggcttcccgtcgtctttgatagatccacttggtttgtgtccctgcgagtgcgtcgactactttggcatgacgttcggtgtggcagacgtcacctttggaggcttggaagctgtgaatggcgcaggagccaccattgccggtgttttgtctctgcagcccgaagttgcaatccccggattcctggtaatggtgaatggtggagcaacggcgtacgatggagtgtcagcgatacaaaccgctcaagatggaaaggaaagagaatccatctacaccgaggtgggcggggagttgctggggccagttggcgcgaagacgggagagctgttgtcgtttggcttgacgttcagcggtcaccttaaggccacacggaaactgttgcaacgcgtagccactgacaaggatgcactggatgccatgaaggcggtgagggatgtttcgggtgggtccgggtgcaattgcaaataa

SEQ ID NO: 497964 - DNA, 168 bp, Stenotrophomonas maltophilia
atgaacgcggtgaagcagggcaattccgtactggaaagctacgcctgcaatcatcgcggtgagcgcgtgctgcgtaccccggccggtggcgcagcgcagatcaccctgtatgacgaggtagggctgtggctgggcaactactcggccacgggccaggcgcagcagtag

SEQ ID NO: 497965 - DNA, 1323 bp, Stenotrophomonas maltophilia
atgggtacgctgcaggtctggatgaatggtgtggaagtcgcactttgggatgatgtccggaacgggtcatcccggttgtcgtatgtcagccagtggatcagctcgccccagtcccgaccgttgtcgctctctctacccctgctcccagatggcgagagccatcggggcaacgtcgtcaacgactacttcgataaccttcttcccgataacgtcgccatacgcaaccggatccgcgaccggttcgccacgcgcggcagcgatacgttcgatcttcttgaagccattggacgggattgtgtcggcgcagtgcagctgttgccgccagcgcgtccacccgaagacatccagcagatcacgtgcgaggtgttggacgaagcaggtgtcgctacgatcctgcgtcaggtgacgacagggaacctgcctggcgcacccagccgtgatgatgcattccgcatttccatcgccggtgcgcaggaaaagaccggtcttctgctgcatgctggcaaatggtgcactcctaccggcaacacaccatccactcacatcttcaagctgccgcttggcattgttggcaacatgcgggcagacatgcatcagtccgtggagaatgaatggctgtgcatgcatctgctttccgcctttgatatccccgtggccgagacgcagatgggccgcttcaacgaccaacgtgctctcattgtcgagcggtttgaccgtcgcctgtctgccgaccgccggtggtggctgcgactgccacaggaagacatgtgtcaggtctttggtctgccggctgccagaaagtatgaatccgatggcggccccggtatcgttccgatcatggatctgcttcgacagtccgaacaccccgaggatcgcgcgatcttcttcaagacgcagattcttttctggatgctggccgcaaccgacggccatgccaagaatttcagtgttcacctggaagccggtggacgcttccgcctgacgcccgtctacgacgtgctgtcggtatatcccatcctcggcaggggacccaatcaactcgatccacgaaacgcacagctcgccatggccgtacatggcaagaaccgccaccggaaactgcaccttgtgcgacggcggcactggaatgaaaccgcgcgcgcctgcggcgttgccgatggtgcagaaccatggatcaagacattgatcgcggccgtcgagcccgccatccagcaggtcacccgtcagctcccggatgacttcccctcaaacgtgtccgaaccgattttcaacggacttcgtgctgcggcagcacgcctttccagcatggcccccgaggcttga

SEQ ID NO: 497966 - DNA, 258 bp, Stenotrophomonas maltophilia
atggacaggccgctgcacacagtgaggacagcccaacaacttgcgcccctgatgcgtgctttccggcgccaggcgggcctgagccaggctcagctggcggagcgactcgggatcagccgccaggcagtgggcgcgctggaacgcgaccctgcatcggcaagttttgaacgcctgatgcggatctgggcggtgctgggtctggaggtcagcctccagcaacgaagtccccaggagaacacgtcgtcattggagtggtga

SEQ ID NO: 497967 - DNA, 636 bp, Stenotrophomonas maltophilia
atgtcagttccaggaaagatcctggccagcgtgctgctggcctcgggagcggccacggcgtgggccgcgccggccatgccggcaccacaggagttctacttcgacagcgaccttgcggcggcaccgatggtggtgatgcagggcgaaggcgatgagctggtcacccagctggtgaggctgcgcgagcgcggccggcgcgcggtggaagccaccgtgcagctggcttcggtggccagcacccagggccgtgccgagctggccgaccagctgtatggcgaggccctgaaggaggcgccggcacagagcagcgcgggccgcagcgtgcgttggaactatggctgggacctgctgcgccagggcaagccggaggcggcgctggagcaatggttgtcgtcggccggcaatgcgcgcagcaagcccagctgggtgccacccacgtacgcgctggccctatggcggatggggcagaagcaggaggccgtgcagtggtatgccgcagcagtgcgtaccgagccgtcgcaatggagcaccagtgccaattacgcgcagctgctgccgcagtggcgcgaggatgagcgcgcgtcgttggccgaagtgcagcaggcctgggcggcggccccgcctgcgtggccctga

SEQ ID NO: 497968 - DNA, 477 bp, Stenotrophomonas maltophilia
atgcgtgaactgatcctgctgcgccatgcccatgccgaaccggctacccccggccaggccgacctcgaccggccgttgtcgccggtggggctcgccgaagccgaagccgccggcaagtggctgaaggagaacaacctgctgccggactgcgtgctgtgctcaccggcgcggcgtacccgcgaaaccctggaagccgtgctcggcaccatcggttacgtggaaaagcgcctggaagaccgcatctacgaagccacccccggcaccttggcggcattggtggacgaccgccgtgatctcgaccgggtgctgatcgtcggccacaacccgggcctggagcggctggtggcgttgatgaccgagggcaccagcagcgactaccgcggcatgccgccggccggcatcgccgtgctcggcttcccgcgcgaggcctcgatcgagccaggcgtggccagcctgaacgcattctggtggccgtga

SEQ ID NO: 497969 - DNA, 468 bp, Stenotrophomonas maltophilia
atgaagcacgtccccgtcctcatcattgctgcgctgctggccatgtccgcgaatgtggccgctgccagcacgcccagcaccgatcagcttgaagcacacctgtggcaactggtgcgtgccaccaacgcgcaaggaaagcgcatcgacgcgttgttcgtccgcggtcgcgcgccctacacactgcgcttccagtccggtttcatgagcgagttgaacctgtgcaaccacgtcagcaacgagtaccggctgcagggcaacctgctgatcctgcgcaacagcgtgcagaccacagcgctatgcgtcgatcagagactgcccacgcagcagaagctcgccggaaagctgatgcacggcgaaggctcggcaccgacgcttgcgcttgacgaccgcggcgcgctggtgctgcgcaacgcgaggggcgacaccgcagtgttcgaaccggcggcgctgcaagcggatggaaggtag

SEQ ID NO: 497970 - DNA, 489 bp, Stenotrophomonas maltophilia
atgccttattccagaacacaggtgctgctgcactggttttctgccgccattatcctgtgggctacgttcagtggcttctacgtggcattcgccgatgccccggccggcctcaagcagggcatcggcttcatcaatgtctcgctcaccacggtgctgattccgttcttcgtgctgcgcctgtgcctggcgatcgccggcggccgtcgccacaatcctggcgaggcggtggcacgaatcgcgcactgggccctctacgcggtaaccaccgtcgtgttggtaaccggtgtgctgatgatggaacgggacatcgacgtgttccatcttgtcgtgatccccgcgccgctctccgaacccgtggccaccgctgcattcaacgccacccacaaatacgcctgcatggtgctggcgggcctggttgcactgcacgtggcggccgtcgcccggcatcacctggcgggcaatccggtgctgggccggatgcgttggtga

SEQ ID NO: 497971 - DNA, 477 bp, Stenotrophomonas maltophilia
atgcgccgcacacgactcgccatgatcttctgcagtgccctgctgatggcatcgccggcaattgcccacgatgcagaaggcgcgaagcccgcacagccgcttcccgatatcgcgctgcccgcaccgctggaccgtgtactgcgcgactacgagcaggcgtggcgcacgggtgatgccaaggcattgggtgcgctgttcgccgaggatggctttgtgctgcagagcaaccagccgccggtgcgaggccgcagtgcgatcgaggccgcgtatgccggccagggcagcagtccgttgcggctgcgtgccttggcgtatgcggtggaggggaatacgggctacatcattggtgcgtacagctacggcaacaacgtgggcgataccggcaagttcacgctcacgttgaagcgcgtgggggatgggccgtggctgatcttttcggacatggacaacaccagcgcgccgccacgggcgcggtga

SEQ ID NO: 497972 - DNA, 1032 bp, Stenotrophomonas maltophilia
atgaatctgttcgaacgccacctgacgctttgggtcgggctttgcattgcggtcggcacgctgctgggccacttcctacccggtgctttcgcggtgctggcgtccgccgaagtcgccaaggtcaacctgccggttgccgcgctgatctggctgatgatcatcccgatgctgctgaaggtcgacttccgcgcgatgcgccagttgcagcaacactggaagggcatcggggtaacactgttcatcaactgggcggtcaagccgttctcgatggcgctgctgggctggctgttcctgcgccatgccttcgcggactggctgcccgcagcacagatcgacagctacatcgccggtttgatcctgctggcggccgcgccctgcactgccatggtgttcgtctggagcaacctgtgccgcggcgatgccaacttcaccctgagccaggtggcgttgaacgacgcgatcatggtggtcgcatacgcaccggtggtggcgctgttgctgggcctgtcagcgatcactgtgccgtgggacacgctgctgttgtcggtgggtctctacattgtggtgcccgtgctggtggccgccctgctgcggcactggatcctttcgcgcagcggcgaggcgggcctgcagcgtgcgcttcgaaggctgggaccgctgtccctgtcagcgctgctgctgacgctggtggtgctgttcgggttccagggccagcagatcgtgaagcaaccgctggtgattgcgttgattgcagtgccgatcctgatccaggtctacttcacttcaggcctggcctacctgctcaaccgccgcttgggcgtggcgcattgcgtggccggcccgtcagcgctgatcggggccagcaacttcttcgagctggctgtggccacagcggtgggactgttcggcgtgcactcgggagcggcgctggccaccgtggtgggtgtgctgatcgaggtaccggtcatgctgtccgtggtgcggatcgtgaaccgtacacaagcctggtacgagagacgcgaagagcactga

SEQ ID NO: 497973 - DNA, 504 bp, Stenotrophomonas maltophilia
atgacccgcaatgtcctgttcctctgcaccggcaacagcgcccgcagcgtgcttgccgaagccaccctgcgtgcatggggcggtgatcgcttcagcgcattcagtgcgggcagccagcccaatggccagatcaaccccttcgcgctggcccagttgcaggccgaaggaatgcccattgaagggctgcgcagcaagtcgtgggatgagttcgtggatgcagcaccgatggatctggtgatcaccgtgtgtgatgcagccgcagcggaagcctgccctgtggtgttcggtgacttcgtccgcagccactggggcctgcccgatccggccgccgtggcaggcagcgatgccgacaagaccgcagccttcgcgctggctcatgccatcgtgaaggcgcgactgcgtgcattgctcgccttgcctgactcattgtggtccgaccgcgaagcgctgcagcacgcgctggatcagattggacagttgcagccgaccgacagcatgccgtga

SEQ ID NO: 497974 - DNA, 330 bp, Stenotrophomonas maltophilia
atggaaacgttgaatgcaattgctgccctgactgccctgggccatgccacccgcctggctgccttccgcttgctggtggaggctggcccggcaggtcgcatggcgggcgacatcgccacggccctgcaggtgcccccagccacgctcagcttccacctgaaggagctggtgcaggccggcctggtggagagcgaaagccagggtcgccatgtctgctaccgcgccaacttcgatgcgatgaacggcttgatcgagtacctgacgcacaactgctgcgcgggctcgccaaccgagcaatgcatgcccacggcgcccgcctgcaagggctga

SEQ ID NO: 497975 - DNA, 729 bp, Stenotrophomonas maltophilia
atgaataagcccatcacaagcccccatctaccgaatctggtagacgcctcgctgccccagcccgatcaccaccagctcgccgcggcagatccgggaccgccacgcatcctcctgctctacggctcgcttcggccgcagtcgttcagtcgcaagctggcgctggaaaccgagcgattgctgcgtcacctggggtgcgagacccgcgtgttcgatccgcatgcgctgcccatgctggacagcgtgcacccgcaccaccctgaagtgcagcgactgcgcgaatggtcgcagtggtcggaaggccaggtctgggtcagccccgagcggcatggcacggtcaccggcgtgttcaagaaccagatcgactggttgccgctggaagatggcagcgtgcggcccacgcagggcaggacgctggcgctgctgcaggtgagtggcggctcgcagtcgttcaatacggtcaacacgttgcgtgtgctcggccgttggatgcgcatgctgaccatccccaaccagtcgtcagtggccaaggcctggcaggaattcgatgacgacggccggatgaaaccctcgccgtactacgatcgggtggtggatgtgatggaagagctggtgaagttcacgctgctgacgcgtggcaggacggactacctggtggaccgttacagcgagaggaagggcgatgcgcatgccgctgcattggcgcgggctgcagaggctacggcttcctga

SEQ ID NO: 497976 - DNA, 333 bp, Stenotrophomonas maltophilia
gtggacccactcttccagtttctgctgagcacgatgggtggcgtattcgtcttcctgttcttcgtggcgcgcgagtacctgcgtggcttgggatggctgctcggttcctgggatccgaacatggggcacgcgaccgaagatgagctcatttcgaaggccaatcgcagcgccttgctgattgcggcggtgcttctggcgtgggccttcatgggcccttctccctaccgccacaactgggaaatcgaagtaatgggcatcggcgccggcatgctgctggcctatgtggtgatcatccgccttgcagcttcaagggtgaagaggctgcttgggtga

SEQ ID NO: 497977 - DNA, 273 bp, Stenotrophomonas maltophilia
atgaaactgaccaagcagcacatcaacgcagcacgcgccatcaccgtcgccatcgtggccaccgtaagcctcggcgcttgcgccacctacaaggacgagttcgcaaccatcaactcgcgcctcgatcagctcgacgtaaaggtgcagggcgctgcccagagtgccgagtccgccaaccagtcggcgcagcaggccaaccagcgtctggaccagatcgaaggccgcgtacagcagcttgaaagggcaccggccggtcgcaagccgcgcggctga

SEQ ID NO: 497978 - DNA, 951 bp, Stenotrophomonas maltophilia
atgcgggcactgatcctgatcgcctcgccggttgcgctgccgcaggcacaggcggctgagcgcatcgtttctgccaggcacatcgtcgtacagacagacgatgtcacgcgcttcttcaaggtgctggacgccaaccaaggacgcccaagcgccgatgatctgcaacacggctatctggatgcgggtacggatgccctgcgcagcttcaccgaccgccgtatcggctcgatggagcggctggccagggccatccaggacaagccggcattgtttgcgaaagcgagaacctgcgcgaccgcattgccatcgatccgcacgcgcgtcgcggctgccgtcgatcgacttggcgccctgttgccgtctgcgcgctttcccccggtcaccgtactggtgggccgcggcaacagtggtggcgtgactaccgaagcgggtgtggtcatcggactggaagcactgtgcaacgccgactggatgcagaccgacgtaggtgaccgcttcgtgcatctgatcgcgcatgagtatgtgcacgtgcaacagcccggtgcacgcgtggacatcgagcagcccaccctgctctatcagaccctgctggaagggggcgccgaatacgtggccgaacggatctccgggcaaccggccaacgcgcatctgcagcgttggacacagggtcgcgagtgtgcgctggagcgcgcgttcctgcaggacagcacgggtaccgatctttcgaggtggctgtacaacggtcccggcgacgatgcgcgccgcggagatctcggctactggatcggctatcgcatcgcccatgcctacgttgcgcgcgcggccgacacgcgcagcggcgtcgccgaactgctggatgtccagcctgggaacgctgcagcgctgctggaagcaagtggatggcaacctgcgtgcggagcaggcggaagcacgcagacgcgcatgccttga

SEQ ID NO: 497979 - DNA, 741 bp, Stenotrophomonas maltophilia
atgggaatcgggagcgaggaaaagccgggctgtgattcggcatcacccacgccgcagcacgtgctgatgctgcccgggctggatggctccggcaggctgtcgatcccgtttctgtcagcactccaggctcatgggctgacgacgcaggcgattacgctgcctgcgcagggagggcaggatcacgccacgctggcccaacggctgtggtcgcagctgcccggccatcccttcatcctgcttgccgagtccttctcgggcccgttggcggttgaactggccacgcgacagcccgccgggctgcgcggactggtgcttgccgcgacctttgcgcgtcggccggtgccattgccggcagccagcgcagccctgctgacgccggcctggcctctgcctcccgtggcgttgctggcgcgccttctgctggggcggtggcgcacccgcgagcacctgtcgatgctgcgcgatgcgctggcccggattccggcggccacactgcggcaacgcgccgcagcgaccctgcgcgtcgacgtacgcgcattgctgccggcaatcgacgtgccgacgctgtgcctgcacgcgtgccatgaccgcctgctgtggccgcccagcgtggcagaactgcaggcccttttgccggatgcccggcatgtttcgctggaagggccgcatctgctgctgcaggcacgcgctgacgcagccgcagccgaagttgccgcgtggatgaggacgctgtcgccctga

SEQ ID NO: 497980 - DNA, 558 bp, Stenotrophomonas maltophilia
atgcgatggacctacgcgctggccatgatggccatgatggccatgatggccatgatgctgccactgaacagttccgccaacgatggctggataaacggggcaggcaaggcgatgccggagaccgatgccatgaaatccagcggtggctttgcggcatcgctgctggtcacctccgatgccgactggcaggccaagtgggaaaccccaccagagaccactcccggttttacccaggccgacgaagtccacccgggcggtgaattgttcctgctgacattcctgtccaacccgcaactggatgagaaccgcgtacccaaggtgcactgcgatctgcgcatgctgcgcccggacggcactaccagcatcgacgaacgcgatgttccctgtttcaccgctgccctgcccggcccgccaaccctgttgtacatgaccaacctgcacctgaagttcgtggccgaggccagtgatccgaaaggcacgtggactgcgcaggtggtggtcagggatctgctgcggaatgtgagcctgcctctgcaggctcacttcaacgtccgttga

SEQ ID NO: 497981 - DNA, 291 bp, Stenotrophomonas maltophilia
atgaagatgcggcgattactgagctggaccggtcttgcgctttgcgtggtctacctgctgttgaccgcatggctggttcacggcgcgcagtcggatgcggacccgaagggggcctatatcctgatgtcgctccccatcaccctgcagtctgctgcactcgatgccatcggcgcaggcagcctgctgtacggcaaaccctggtcgaccgcgtatgcagtactggttccgccaacactgctgttgctgtacgcagccggctggctgatcgaacgcgccgcgggcggccgctag

SEQ ID NO: 497982 - DNA, 2127 bp, Stenotrophomonas maltophilia
atgaactacttgaggaatgtcagggttgcctggcgtcttgggctgggctttggcctgttgctgctgttggttgcggccgtggtggccaccggcgccaccgccagtgtcgtgcagaagcgcgcgatgcagcaggtggtcgatgtcagcgtggccaaggtgcgcctgctctcgcagatgctcgatgccaacaaccagatgatggtcgttcgccgcgagatgctgatccgccagggcgatgaccgtggccatgatgagcagcgcatcgccgatctggtcaagcgctatgaggccagttggacggcctaccaggcgctgcccagcgacgccgagggcaaggccattgccgaaaccatcgccgccaagcgtgccatcgcgcgtccgctcaacaagcagaccagcgaactgatggagcagggctactacccgggcgccgtggcgctgaccctgggcccggtgcaggaagccgccaacggctggaacaaggcgctgtccgatggcgtggacttcgaggagaaggaaagccgtgaggcggccgccgaggcaatccgcctgggcgagcgcagcctgctgcagttgctggtgctgggcggcgttgcactgctggtcggcatcgccgcctcggtgatgatcgggcgcagcctgaccggcccgctggcccgcgcggtgaacctggccgagcgcctgtccaagggccagctggatcaggagttccgcctcggcggccgtgacgaactgacccagttgggcgaggcgatggccagcgtgcgccagagcgtgcaggcagcgatcggcgcgcagctgcagatggccgaacagcacgaggccggtgcgatccgttaccgcatggacgccagcgccttccccggtgatttcggccgcatggtgcaggccaccaacagcctggtcgaatcgcacgtgcaggtggaactgttgatggccgaagtgatgcagcgttacgccatcggtgacctcagccgcgacctgccggactacccgggcgagaagggcacgctgacccgcaccctggccgcagtgaagcagagcctgatggcgatcaacgcgcagatcgatgaactggcccgggccgcgcgcgccggtgatttcagcatgcgtggcgatgccgctgcgttccagttccagttcaaggcgatggtcgagcacctcaacggcatgatggccagttcgcaggccagcatcgccgacgtttccgacgtgctacgcgcgatctcgcacggcgacctgactgcacgcatggacggcgagtacgacggtgtattcgcccgcatgcgtgacgacgccaacaccaccaccgcgcagctgaccggcatcgtgcgtggcatccaggtggccgccgacagcatcaacaacgcggcgcaggaactggccgccggcaacaacgacctgtcgcgccgcaccgagcagcaggccgccaacctggaagaagccgccgcatcgatggaggaactgacctcgactgtgcgccagaatgccgagctcgctcgtcaggccgacagtgaagcgcacgccgccggtgccgccgtacgcgaaaccgagcaggcgatggcgcagatggcgtcggtgatgggtgagatcgatcagtcctcggcacgcatctcggaaatctccaccgtgatcgacggcatcgcgttccagaccaacatcctggcgctgaacgctgcggttgaagccgcgcgtgcaggtgagcagggccgtggttttgccgtggtcgccagcgaggtacgcacgctcgcacagcgtgccggtgtcgccgccaaggagatcaaggagctgatcgaagacgccgctgccaaggtgaagagtggcctggcggtgaccgttgaatcggaagccgcgatcgcccgcgtggcccaggccagttcgcgcaccacgcagctgatgagcgacatcgcagcggccagcaaggaacaggccgccggtatcgagcaggtcaaccaggtggtggtgcagatggaccaggtgacccagcagaacgctgcgctggtggaagaagccactgccgccagccgcgcgctggaggaacaggcgcatgcgctgaccacgtcggtggcggtgttcaaggtggagcagggcgcgcgcatgcccatcgtgcctgcgcaggcggcgtaa

SEQ ID NO: 497983 - DNA, 663 bp, Stenotrophomonas maltophilia
gtgaagggcgaaacggtcgtgcggatcaccctgtgggtgttgtggagcctgtggggcatcgcctgcctggtactggtgctgggcgcggccgccaataccctggcttcgcgcacgcagacggtgccgttggtgctgagccctggcgcaaccgcccagatcaccgtctaccgcctcatcgatgatcaactgcggctgcgcctgcgctatgccgcggacggtacggaggccgaccccgaggtgctgctgcgcatcgaaactccgaccgatcatggagacttccgcgcaggggagcgttcgggagtggccggacagggcatcaatcgtgggctggcttcggttgagtccagcggcctcatggcgtcctacttcggctatggtcgcggcgatgcattgccacgcggccgctcatgggtgcggctaaccgtgctggaggtggacccggcgctggccgatcgcgcggccaccgtcgagctgcagccgccactggacctgttgaagctgactgacctggattatgtctggttgtggccgttcttcttctggaaggtggcggcactgctcctgctgattccaggagctgccttggcggtgttcacgttcactttgcggcgctggcagcaccgggcttcgaagcaggcggattcagcagtggatacggattga

SEQ ID NO: 497984 - DNA, 282 bp, Stenotrophomonas maltophilia
gtgctggaaatcggcttcatcgatgcggtggaatccgttgtaaagctgatcgaggcccacccgggtgctggttccgcactgcatgcgggtctgttgccctcgctgccagcgccgttgcgttttcatccggttcgtcgcttcaacggctacctgatctactacgtggagctacctgcgcacgtttccatcgtgcgcatctggaatgcttcgcggggcatggaagcactgttcgaagacgagaagctcaaccccgatattggttcgtcgcatccaggatactga

SEQ ID NO: 497985 - DNA, 243 bp, Stenotrophomonas maltophilia
atggccaccatgaacatttcgctgaccgatccgctcaagcagttcgtggacgaagaagtgcgcgaaggcggctactccagtacgtcggactatgtgcgtgacctgatccgccagcgccagcgcagcaaggccgaagaactgctcaagcagctgattgccgaggggctggcgtcgggaccttcggcgcctctggcgccggatcactttgacaagctgcgtgagcgtgcacggaaccgcaagtga

SEQ ID NO: 497986 - DNA, 1584 bp, Stenotrophomonas maltophilia
atgtacctgccccgctcgcccctgcgccacgccgatgccgaccccagtcggccggtgatctggaccgtcagcgtctcgcggctgaccggtcttctcggcgacgtcattcccgagttcgatcgccgcgcgcgtatcgagcagatcaacctcggcttcgaggaagcggtggacgtgatcggccagcgcctgcgccgcgagcactgcgacgtggtcatcgccggcggctccaacgcggcctggctgcgcagccggctggagctgccgctggtgccgatccaggccaacggcttcgacctgatggaagccttggcgcgcgcacggcggatcgctggccgtatcggcctggtcacccacgccagcgacgtgccggtgttcagcaacttccagcagagcttcggcctggacatcgagcatcgccgcttcgtcacccgcgaggacgcccgcgactgcatcgccgacctgcgcgccaacggcatcgaggtgatcgtcggcaccggcatggccatcgaccacgccgaacaggccggcctgcccggcgtgctgctgtactcggcagattcggtacggcaagcgttcgagcacgcgttggaactgacccagaccctggctcgctccggcggcagccggcccgcgccgcgccgccgtgccgcaccgcgcagcgatgcccacgacctgctcggcgacagcgaggccatggcacaggtgcgcgcacagatcgcgctgtacgccccgcatgacagcaccgtactggtcaccggcgaaaccggcaccggcaaggaactggtggcgcgccagctgcacgccgccagcggacgccgtggccgcttcgtggcactgaactgtggcgcgatcagcgaatcgctgctggaagcggagctgttcggctacagcgatggcgccttcaccggcgcacgccgtggcggccgcgtcggcctggtcgaggccgctgacggtggcaccctgttcctggatgaaatcggcgaacttccgctgccactgcagacccgcctgctgcgggtgctggaagaacgcgaagtactgcgtgtcggtgccaccgaaccgaccccggtcgaccttcgcgtggtggccgcgaccctgcagtcgctcgagcagcgtgtggcggccagcagcttccgccgcgacctgtattaccgcctggccgcgctgcgcatcgccctgcccgcactgcgtgcccggcgcggtgacatcccgctgctggcgcagcatttcttccgccagctgcgtggtatcgacgcgccactggatgcggaggcactggcggtgctgaccaccgccgagtggccaggaaacgtgcgcgaattgcgcaatctggtggatcggctgcgcatccattggcaacccggtgaagggctgattgatgccgcgcgactgctgcagctggcacccgagctggtgaatgagggcgccgctgcgctaccagtggaaagcaacggcaagcggccgccgcgtgcgcagttggaaacgctgttgcaggaacaccgcaatgaccgcgaggggatggcgcaggcgctgggcgtctcacgcaccacactgtggcgctggctgcgcgcggagggattgtaa

SEQ ID NO: 497987 - DNA, 360 bp, Stenotrophomonas maltophilia
atgcaacgcctgccgctgtaccgcgtggtggttttcgtgccgtcggcagcactgggcgcggtgaagcagggcatcctggcggtggatgcgctggcggccggcgactacgagcacggtatgtggtggtcggcgccggggttcgagcagttccgcccgcgcgtgggtgcgtcgcccgtgcagggtgaggcggggcgcaccgaagtggtcgacagcgtacgcctggaattctgcctgccgcgcgatccgcagcggctgcagcgcatcttcgaacagggcatcgtgccgcatcatccgtggcaggtgccggtggtgcaggtggaggaaatcgagcttctgctggccgacgcacggcggttgtag

SEQ ID NO: 497988 - DNA, 1122 bp, Stenotrophomonas maltophilia
atgaccctgctgttcccgctcggcctggccgcgctcgccgcagggttgctgccgctgctgatccacctggcccgccgccatccgtacacgccactggatttcgccgcgctgcgctggctgcgcgcgcagatacggccacgccagcgcatccgcttcgatgactggccgttgctgctggtgcgcctgctgttgctggccgcactggccctgctgctggcacgacctgtgttgactggcccgacggcgcctcccgctgcatggaccgtggtagcgccgggactggatgctacgaccctgcatggaacggccgaggatggcaactggcactggctggcacccggcttccccgccattgatcaggcaccccctgcagccaccgcctccctacccagcctgctgcgcgaactggacgcgcagctgcccgtcggcaccgcattgaccgtgcacgttcccgatcccctgcccggcctggatggtgcccgcctgcagctgtcgcgcgacgtgcagtggcacacgcagccgatgccggtcactgcgcaaccgagtgccgcgacgtcgccgcgcctgcgcgtgcacagcgatgcttcggccactgcccagcgctggttgaacgcactgcagcgcgcgtggggcgtgcaggcaccgcttgctccgccgccggcggatgccctgccggagcgcggcgagatcggcgtgtggagccgcagcgatgcactgccggcgaactggcaggcgtggctgcgcggcggcggtcgtgtcatgactgccggcaagcctgctgccagcgcccgcatcctgctgcgcgatgccgagggcgcaccgctgctgtggcagcaacgcatcggccacggctatctgctggcgctgccgggtggctggaatgccgccagcaaccctgcgctgcgcgatccgcgcctgccacgtgccctgctgctggcgctgcagccgcctacggccccgcgcctgggcgatgcacgtgaccaggcaccgcagcgggccgcattgcctgctgcaacaccaccgctgcgtgagcccacgccttggctgttgctggccgtcgtgctgctgttcgcgctggaacgctggatggccagcagcgcccggcgcagggtggccgcatga

SEQ ID NO: 497989 - DNA, 1809 bp, Stenotrophomonas maltophilia
atgaacgcctccgctgtgaacctgtggattgcaccggcactcgccctgatcgtggtcatcgccagcgtgcgccagctgcgtgcggacactgcgcaccccggccgccggtgggtcgtgatcgcactgcagatcatcgtcgccacgctgctgtatttctgcctggcgccccccacccgccagcagcccgcaggggggctggtcgtgcttggcgtcgatgcgggcaaggccggcgcactcccggccagcgaaggcccgctgttgctgttgccggaagctgccgatgtgcccggcgcacagcgcgtacccgacctggccaccgcgctgcgccagcatccggccgccacgctgacgctggtcggtgcgggcttggtcgcacgtgaccgcgacgcggtgctgccgccggatgtgcattggcaggctgcaccggagccgcgcggctggatcgcgctgcagccgccggccgatgtcgcacccggtgcccgcttcgacgtgcaggcacaggcgcgtggcgcggccaaggcgaaggccgaactgctcgacccggccgacagcgtggtcgatcgcacggaggttgccgacgacggccgcgtgcagctgagtggtgtcgcccgcgccgaaggccgcagcgtgttccagctgcgcctgctcgatgccgacggccatgtggtggacagcgtaccggtgccgcagcagaccctgccgtccgcaccgctgcgcctgctggtgcgcgccggcgcgccgggtccagagctgaagtacctgcggcgctgggcagccgatgcaggcatccgtgtgcaggtgctggcggataccggggccggactcagcatcggcgatggcgcggtgtcgatcgatgcagcatcgctcacgcgcagcgatctgttgctgctggacgagcgcagcctggcggcattgagtgcgggccagctggccgccgtgcgccaggcgctgcgcgatggactgggcgtgctggtgcgcagtgcgggcgcaccttcggccagcgcgcggcaacgccttcgcgatctgggcctgccagtgcagggtgatggcagcagccactccctcgaacttcccggcgatggcgaaagcgcggtcctcgccgcacgccgtggcccgctcgccgctggcacattgccgaccggctacggcgaagaggccgaccgcagctcgcacagtgccgcgctgccttcgctggaagcactggcgttgcaggcgccgggcagcaacgcgctgctgcacgatcggggcggccagaccgtcggcggctggcgcgcggtcggcaagggccgcatcggcctgctgccgctgaccgacagctggcgctgggtgctggcaggccgcgatgaccgccacggcgaactgtggagcgacgtggttgccacgctggcacgcgcgcagggcagcggtgatgcgctgtggtcaccacagccgatcagctgggcaggcgaacggcaggcgctgtgcggcgtgcaggcgccgctgcaggccttcaacccgcgtggcgacagcgtgccgctgatcgccgatggtgcaacgtcggcgctgcgctgcgccggctggtggccccgtgaggcaggctggcagcgcctgcggcatggcgacagtatcgtctggcgctatgcattcgacccgaaggacgcacctgcactgcatcggcaggcgatgatcgatgcgaccacgcaggcgttggcctccagcacgtcggcgaacgcgtcggtgatgcagcccgtgccgggttcacgctggccgtggtggctggcgttcgtgttgtgcgcatcgctgctgtggtggctggaacggcggcgctga

SEQ ID NO: 497990 - DNA, 1023 bp, Stenotrophomonas maltophilia
gtgagcctgagcctggacaagctgcgcctgctgcggcggcaggccggcgacccgaaggcgagcacaccggccgcgccggacgtgccccctgcgccaccggcacccgtggccgcgaacgatgcgcggcaaccaccggccgaacgttcggtgttcgcctgggtcgaacaggagatccgccacaagccgaccggcgctgcggtctccacaccggcacccgcaccgctgcgtcggccggaagtgggcggtctgcatcgcctgctcggcctgcgttcgcgcggtggagccgcgccggcgcgcgccagtgcacaggatcgtcagctgcccggcgaggagatcgcgccgggcctgttcctgatcgaatcgctgcagccgcaaccaatcccgactgccccgctgtcattggccttcgccaagcgcgaggaccagcacgtagctgcgcgcgacctgctgttctttgataccgagaccaccggcttggccggtggcaccggcacgcgtgccttcatgatcggcgcggccgactggcacgtgtgcccgcagcgtggccaaggcctgcgcatccgccagctgctgatgtccaccatggctgcggaagaagcgatgctggccaccttcgccagctggctgcagccctccaccgtgttctgcagctacaacggccgcagctacgatgcgccgctgctgaaggcgcgctaccggctggcgcgacaacgcgatccgatcaccgcgctggaccatgtggacctgctctaccccacccgtcgccgctatcgcggcacctgggagaactgcaggctgtccaccatcgagcgccagctgctgcgcgtggtgcgcgaggacgacctgcccggctcggaagcgccgggcgcatggctgcgcttcctgcgcggcggcgacgcggtgaacctgcgccgggtagccgaccacaaccatcaggacgtggtgaccctggccctgctgctgcaacggctggtgcacgaggagcagcgcgagcgcgagacgctggcgctggtcgggcaatag

SEQ ID NO: 497991 - DNA, 813 bp, Stenotrophomonas maltophilia
atggtccgtctacccttgatgtccggtttgccgtgggtgttgctgctggcgtgcagcgcatgcgcacccgccggggagcacaccgtgccggtcgcacctgctgcgaagcctgaggcgaaaccggagaccttgcctgcgcaggcaggacccactgaacgcggattgcctgcattgccggaagcttccggcagcgcccattccggcggccgctacgctgcgctgcccgaaccggccaggcgggtgctggcgcagttgaagtgcaacgtggagagtgccggcaatgcgcaggtgctttccattcccgcgcagggtggccagcaggatttcatggtcaccgatcgcagcggaccgcgtttccgctactggatgcgctcgttctccagcaatggcggtaccaccgggtatctcgtgcagctgcaggactgcccagcaaccaccacgggcatgcgcgcctacatcgcacagggagccgcaccgctgcaggatgtcaccgcgtcgttgctggcgcaggccgagctgcctgatacggcgacgatgacggcttaccaggacaggggcgcgggcgatctgttcgccttcatcgggcagctggacaaggtgccggtggtgcgctgggtggccgaagccgaccccgagcagccattggccgacgatgcgcgcagcttcgaccatggcaatgccatccacggcggtttcctgcgctggaaccaggatcacttcgaagtggccaggaccgtgccggccgggctatggccctgcgatgacagcccgttgttgccgtgcaggggcgacccgttcgtgactgggcgttga

SEQ ID NO: 497992 - DNA, 2409 bp, Stenotrophomonas maltophilia
gtgaacgccgctggcctgcgtgccgccaccgcggtcgtggccggcctgctgttgcctgccctggccgccgctgcggattgcaggacgccgctgcgcattgcctggcccgccgaccgcgcgccgttgtcctccagcgagcagggccagccgcgcgggctcagcgcgcagtacctgaagctgctgggcgcgcagcgaccactgcagatgcagccattgccaagcgccgccatcgccgagggaacggtgccgcccgacgtccaggcgctgctgggctggtcgcgctcgcagttgccgacggggtgggtggccagtgcgccctacgtgcagctgccacaggtcattgtgcggcgccgggatgcatcgccggtgctgggcctggaggcgttgcgcggaggcaccgtggccagtcccgacccgctgtcgctggtcggggcgctgacggaacaggcgtctggcgtgcagctgttgccccccgcccccatcgacgacgccctgtcactgctgggcacgggcctggtcgatgccgtggtcgccaatcttggagaggtcgaggccgcgttgcgccactatcagggcgagccgctggtaatcgctgcgcccgccggaatcgacgacgcgccggtgctggccaccgtgcccgcctgcgccgacgtcatcccggtgttcgagcgggccgtgtcgcagctgaccgcgaacgaacgcgaggcgatccgcacggcctggctgccgaaccagccgcgacacccgccctctgcgtcccccctgcgctggctggtgccggcctcgctgaccctgctggcgctcatgctggtgtacgccttcggctactggcgcgtgcatcgcgagagcgagcgtcgccgcgtggctgcgcaacgcctgcaggaggtgacctcgaacctgccagcggtggtctatcaggtgcgtcgctctgccaccggccactacagctttccccagatcgcaggcgacgtgcaggcgttgttcggaatcagcgtggaaaccgccctgatcgatcatcagcgcctgctggcagcggttcatcccgacgatcgctcgcggctgatggacaccgtcgacgccgctgccctggcgcggggcccgatcgatgtcaccttccgcacgcgctcgccacaaggctggcgctgggtccactcgcatggacggccgctgtccctggacagcggcgacgtcgagtggagtggctactggatcgacgtaagcggagtgcaggcgcgcacccatgcgctggccgaggcgcgccgtgcggccgagcaggcagcgctggccaaggcccacttcctggcgaccatgagccacgagatccgcacgccgatgagcaccctgctgggcatgctcgagcggttggagggcagcgatctggatcatcgccagcaacaggtgctggtgaccgtgggtgatgctgcccagatgctgcggcagatcctggacgacgtgctgcacagccaacggctgcaggcactgccgccgcagctgcgacccacgagcgtggcggcactggtgcgcgcggtgcagcagttgctgatgccggtggcggccagccggggcctgcatctgcgtatccaacttgatccggaattgcaggccggatcgctggccgacggcctgcgcctgcgccagatcctgttcaaccttgccggcaacgcgctcaagttcaccgagcatggcggcgtggatctgcaggtgcaggtgctgcagcagcacgatcgcggccaacgtcttcgcctgcaggtcagtgacagcggggtgggcatcagcccggaacggcaacaggcggtgttcgctgcctacacccaggccgaggcatcgacaacgcgccgtttcggcggcagcggcctgggcctggcgatctgccgtgaactggctgcatcgatggaagcagaactgtgcctgcgcagcgcgccaggcaagggcaccaccgtgtggctggaactggatctggacgcctgtgagttgcctgccgaggcattgccgcttccggcagaggcggcgcggccactgtcgtcggcccgggtgctagtagctgaagatcaccccaccaacctgcacctgctggagcagcgcctgcatgatctgggtctgcaggtgcacgcctgcaccgatggtcgccaggccttcgaggcctggcaggcgcgggcgttcgacctggtcatcaccgactgccacatgccgcacatggatggctttgccttggcacgggccatccgcgccgacgcctgcgcggttcgcgcgcaggtcccgatcatcgcgctcacggccagcgcgctgggtcgcacccgcgaggcctgccgcgaagcgggcatcgatcatttcctggccaagccggtggcggcgcaggaactgcggggcttgctggccgtgctgctggcgccggaatcaatgcgccagtag

SEQ ID NO: 497993 - DNA, 729 bp, Stenotrophomonas maltophilia
atgcgcccgaccgcctctgccgccctgctgggcaccctgctgttgctgctggcgccgttggctgcccgcagtgcggactgcgcgcccgatgctggcgcgtcgttgcggtcggcgctgatgaccccgggcttcctgcaggctcatcctgacctgcactggcgcgagctgggcctgcagtcgtggcgccagggccggcccgatcatgcgctggtgcgtttcaagcgggcggccgcgcacgccgacaagctgtcgcagtcgctggtcgcgcgcatgtaccaggaaggcacgggtaccgcccctgatccggtgctggcctacatctggatggacctggccgccgaacgcggctaccgcgacctgctgctggagcgcgagcgctactggaaccgcctggatgccgcgcagcggcaacgggtgctcgccgaagggccggcgctgtatgcggcctacggcgatgccacggccaagccgcgcatggaggctgccatgcgcgtggaccgcagcggcatgaccggcagccgtaccggctgggtcagctcgatgctgcaggtggaactgtccgacggcccggaagccggctggcccacccgtggcgatgactactatcgcgatgcctactgggaccctgcagcgtactggtgcatgcaggaccgcatctgggaacaggagttccgcggccgcagcgtcgaggtcggcccactcagccccgtggaaggcgcggggcgctga

SEQ ID NO: 497994 - DNA, 732 bp, Stenotrophomonas maltophilia
atgaaagcgaagcaagctccacgcttctgcctgctgctgggcctgtcgatggccgctgccgtgaccgccagggaatgcccggtggaggccccgcggcagatcccgccaaccgtcctgaccggaggcttcttcgatgcccatccggacctgttctggcgcagcatggcccagcgggccgaacgggacaggcagcccgccagggcgctggattactacaagcgttcggcgcgctacgccgacaagttctcccaggccatggtggcgcggctgtaccaggagggcgtcggtacccgggccgatccggtgatggcctacatctggatggacctggccgccgagcgcatgtatcacgacttcctggtgctgcgggagcactactgggcacgcctggacgcactgcagcaggcacaggcgatcgagcgcggccagcaggtctatgccgactatggcgaccgcgtggccaagcctcgcatggagcgcgccctcagggacggtcgccagcagatcaccggcagccgcctcgggtacgtgagctccggcctgatcgtcgtccagcgccgcggcaacgagcagggcatcgtgacgccgggcagcatcgtctacgacaacgactactggcgcgccgccgactactggtgcctgcaggacaactactggcgccccgcgctgacccccagcgtcgagataggacggccggacgcggtccgcgacgacaaggcggtggacgactag

SEQ ID NO: 497995 - DNA, 1197 bp, Stenotrophomonas maltophilia
atgtccctcctgcgcccgctgtcccgttccccgcgtcccctgctgttgcccctgctgctggccctggcggcctgttcggcgggcaggaccgatgccccggccatgcccgaagtgggcgtcatcatcgccagcgcgcagccgctggcactccagcagaccttgcccggccgtgccgtgccgttcgagatctccgaggtgcggccgcaggtcggcggcctgatccgccagcggttgttcaccgaaggccagcaggtcaaggcagggcagctgctgtaccaggtcgacccggcaccgtaccaggcggccttcgataccgcccgcgggcagctggcgcaggccgaggccaccgtgttgtcggcacagccgaaggccgagcgtacccgcgcgctggtgagcatggatgcagccagcaagcaggacgccgacgatgccacctcggcgttgaagcaggcgcaggccaacgtgattgccgcgcgcgctgcattgcaggctgcccgcatcaacctcgactacacccgggtgaccgcccccatcgacggtcgcatcggcacctccagcgtcaccgccggcgcgctggtcgcggccggccaggatacggcgttgaccaccatccagcggctggacccggtgtacctggatgtcacccagtccagcacgcagatgctggcgctgcgcaagcggctcgatgcgggcctggtgaaggccatcgatggcaaggcacaggttaaggtgctgctggaggacggcagcacctacgcgcatgaaggcacgttggagttcgtcggcagcgcagtggatccgggcaccggcaacgtgaagctgcgcgcggtcattccgaacccggacggcctgctgctgccgggcatgtacctgaaggcggtgctgccgatggccaccgacgcgcgtgccctgctggtgccgcagaaggcggtggtgcgcaacgaacgcggcgaaccgctgctgcgcctgctcgacgccaaggatcatgtggtcgagcgccgcgtcagcaccggccaggtggtcggtaaccagtggcagatcaccagcggcctcaaggctggcgaacgggtgatcgtcagcaacggcagcgcggtatcgctcggtcagcaggtgaaagtggtggcggccacgacggcgcagttggcggcgatgccggcggtcgatccgaacggcaacaccgacgaaaagtcgcactga

SEQ ID NO: 497996 - DNA, 1404 bp, Stenotrophomonas maltophilia
atggccttcgcgatggcgaagttccaactcaaattcggcctgaccgcgaagaccttcctcgcgatcttcaccgcctgcctgctggtgctggcagtgaacggtattgccagccgcgtggccttccagaccggcttcctggactacctcaacgaccagggcgacctgcgcatgcagcggctgatgccacacctgcagcgcgagtaccgcgagcacggtggctgggagcatctgcacggtgatggcgaccgctgggcgcggctgctgcgcccggacctggcccatgggcacgaagggccggtgccgtcgctgtccgaccagaccggcgtgccgtcgcgcctgggcctgttcgacgcgcagcaccgtttcgtggccggcaaccccgacgccaccagcgatgacgagccgcatgcggtgcaggtggacgggcagaccgtcggttggctgggcatggtgccgttccagaccgtcatcgccaccaacgacctgaatttctacaacacccaggtgcgcgcctggtgggtgatcggcatcgcgctactgctggtgacggtactgctggcctggctggtatcgcgtgcgctgcgccagcgccttgccaagctggccgctgccacccaccggttggccgccggtgactacgccacccgcatcgagcgcaccagtgacgatgagctggacgcgctggtcaacgacttcaaccggatggcgcaggcgctggacgataccgaacgcaaccgccgcgccttcattgccgacatctcgcatgagctgcgcacgccattggccgtggtgcgggccgagctggaggcgatcgaagatggcatccgtccgctggaccgggccaacctggtgggcctgcagggcgagatccgccagctgggcaagctgatcgacgacctgcacgacctgtcgatgacccagtccggcggcctggcgtaccgcttcgcgccactggacctggtggcgctgctgcgcagcgaactcaatggcatgcgcgtgcgcttcgccaatgcaggcctggcgttggaagaagacctgcccgccacgccgttgcaggtgtccggtgacgagcggcgcctgcagcaggtgctggccaacctgctggaaaacgcactgcgctacacccatgccggtggccgcgtacgcgtgcaggcagcgcgcgtgcctgccggcgtgcagctggtcgtggaagacaccgcgccgggcgttccgcccgacaagtgtgcactgctgttcgaacgcttctaccgcgtggaaagttcgcgcaaccgcgccagtggcggcagcgggctgggcctggccatcagccacaacatcatcctcgcccaccacggcgtcatccacgccgcgccctcgccgctgggcgggctgcgcgtggtcatcaccctgccggagcctgcatga

SEQ ID NO: 497997 - DNA, 993 bp, Stenotrophomonas maltophilia
atgaaacaggaacagttcgtcgcccgctaccagcaggaatggcaggagctggaacagtggctgctgctgcgtgccggcgcctcgcgccgcgcgcgccgcaaggccagcggcctggcactggacgataccgccgtcccgcagcgctaccggcgcctgtgccagcagctggcgctggcccgcgagcgcggttacagcccgcagctggtccagcgcctgcagcagctgatgcagcagggccacagcgtgctgtaccgcacacggccgacgcgctggcgcgccgcgctggaattcctcgtggccgacttcccgctgctcgtgcgcagccaggcacgcagcatgtgggtggcgctggcgatgttcgcgctgccggcaatcgcctgcttcgtgcttgtacaggtctacccggacctgatccacacgttgatggacaaccgccagatcgccgcgatggagcgcatgtacgaccctgccgccgaacgactgggccgcgacagcggtaccgactggatgatgttcggccactacatcctcaacaacatcagcattgccctgcgcaccttcgccagcggcctgctggccgggctgggtacgctgctggtgctgctgttcaacggtgtcaccatcggtgcggtggccggccacctgcagcacatcggacacggtggaccattctggcgcttcgtggccggccatggcgcgttcgagctgaccgcaatcgtgatcgccggcggtgccggcctgcagctgggcatgaagctgctggcaccgggccggcgcagccgcctggacgcgctggtcgacggtggccgcatcggtgcgcggctgtgcctgggcgtggcgttcatgctgctggtcgcagccttcatcgaagcgttctggtcgtcgatcgccgaagttcccgcatggaccaagttcggcgtcgccggagtgctctgggccggcgtgctgctgtggctgtggcgtggcgggcgtggaggcggccatgcgcattga

SEQ ID NO: 497998 - DNA, 1623 bp, Stenotrophomonas maltophilia
atgcgcattgaccgtctggacgtggtgctgcgtgcacgcagcggctgggaagcgatggagctgggcagtgccctcgcccgccgccatgcgcgcgccgtgtggggcagctggctgctggccagtgctccgttgttcgtgatcttcaacgcgctgggatggtggctggatgccttcggctgggcctggctggcgatgtggtggtgcaagccactgttcgagcgtgcgccgctgtatgtgctgtcgcgcggcatcttcggcgaaccggtcagcacactttcggccctgcgtgcgcagcgccactggggcaacactggttcctggggctacctgggctggcgtcgcttcagcgtgctgcgcagcctgtgcctgccggtgaacctgctggaaggcaacgcaccgggccagcgcggtccacgccgccgtgcggtggctgccggcgccgcaggtgcggcgacagtgctgaccgtgacctgcatggcgttcgaagcggtgctggtgtccggcgccatcggtgcagtgttcatgttcatgccactggacctgatgtccgaatcctggcgtgcggcctgggacatgatcggcaaggacacgccggcatgggcacgcttcggtttcaatctggccagctggctggcctcggcgctgatcggcccgttcttcgtcggtgcgggctttggcctgtacttgaaccggcgtacgcagatggaagcctgggacgtcgaaatcgccctgcgccgcctgcgcgatcgcctgctgccggcggcatcgacgctggcgctgctgctgtgcctggcactgccgctggtctccgccccggtgcatgcgcaggacgcagatgccgagcccgaacgtgccatgggcaagcccaacgaccatggcatcgatgccgaggaaggcaacgaagcaccgaccatcgacccggccaacacgccggccaccatcttcggtggcacgccggtggacaccgccggtttccgtcaagcggttaaccgcgcctatgaggacccgctgcagcgcccgacccgcgaggtcacccgctggaagccgatcgagcaggccgaggaaaaaaagaaggaagacaagcagctgcagcgtgacaccaacagcaaaggtgaacgcaaagcgcgcagggacggcatcgcttggctggcacggctggccgaatggggcctgtggggcctgctcggcatcctgctgctggtgctgctgctgaccgcgcggctgtggctgccatggctgcgtggcagtggccggcgcaaggccgacgctgcaccggaggtgctggaggaacaggtggagttgccggtggtgctgccgccggacgtggccacccaggctggcctgctctgggaccagggccggccgcggcaggcgctggccctgctgtaccgcgccagtgtgcgcacggtgggcgagcgcagcggtatcgcgcttccacccggtgccaccgaagcgcaatgcctgcgcgcgtcgcggcgcatgcccgaggccagcgaccgtgacctattcgcgcgcatcgtgcgcatgtggcagtacgccgcctacggtggccgcctgcccagccgcgccgatttcgatgcattggccgataccctgcgccagcagtacgggtggcaggcatga

SEQ ID NO: 497999 - DNA, 1185 bp, Stenotrophomonas maltophilia
atgagtccgcgcctgttctggtcgctgctgctcggtgcattggtgctgttcggtgtaccgctgaccatcctctacctgcgcacgcacgaacgggtgaccgagacgatccggctgccgccacagggcgaagccgcctacaacccgctgtacgtactcggccaggcgctgcgcgccgatggcattgacgtgcactcgcggccacggctggaactgcagcagatggcactggggccgaacgatacggtggtgctgctgcaggacagcagcgaactgccgccgcccgttgccagcgcgctgctggactgggtcgacggtggcggccacctgctggtacgtacaccgccgccggccgaggacgatgccggcagcacgcagggccccttgctggaccggctgggcgtggacagcctgttccagcgcagcgactgccagccgttccatgtcgacgacgatcctggccacgtcgaattctgcggtggccgtcgcttcaccctgggttttgccgccagtgcgcaggccgaacgtcgctggggcacggatcgcgacctggtgttcgcgcgcctgcgccatggccagggcaaggtgagcgtgctggccgacatggagttcatgcgcagcgaggtggactcaccggcggcgcgcctggcctccgcagggggcaaggccagcgacggcctgcacgacgcgtcgcatcgcgacctgacccgctacctgctcgatccgaactacggcaagggtgcggtctggctggtctatgccagccgcccgccgtcgctgtggtcgcgcatgttctatcagggttggccgctgtgggcaccgttgctgctggccctgctgggttggctgtggggccgctcgcagcgcttcggcagcctgctgccgtcgccggttctggaacgccgttcgctgctggagcacgtgcgcgccagtggtgaactgctgctgcgtttcggccacggcgcgcgcctgtacgaggccgtactcgccctgttcctgcaccgcctgcgcctgcgcgcaccgattgccgccgcactggatggtgcgccgcgcgatcaggccatcgccgagctgctgaagtggccgcaaggccgcgttgccagcgcgctcacgccccctccgccgcacgattcctccgccctgcgcgagcgcatccgcttgctgctccagatgagatccctgctatga

SEQ ID NO: 498000 - DNA, 987 bp, Stenotrophomonas maltophilia
atgaccgaagtccccgagctgccggcggccgccaacgcccgcctgatcgaacgcgtcgatgccatccgcgatgccgtcggccacgccttcatcggccaggctgatgtgctggaccagatcctggtggccctgctggccggtggccacgtgctgatcgagggcgtgcccgggctgggcaagaccctgctggtgcgcgcgctggcacaggccctggaactggattacggccgcgtgcagttcacccccgacctgatgcccagcgacgtcagtggccacgcggtgtacgacccgaagagcgagagcttcaagatccgtcgcggcccggtgttcaccaacctgctgctggccgacgagatcaaccgcgcaccggccaagacccagtcggcgctgctggaagtgatgcaggaaggccaggtgaccatcgaaggcaaggccttcaccctggcgccgccgttcatggcgctggccacgcagaacccgctggagcaggaaggcacctacccgctgcccgaagcacagctggaccgcttcctgctgaaggtgctgatcgactacccgcagctggaggacgagaagcgcatggtgaccgcgatcaccagcggccgcgccgccagcgatttcgacctgagccaggtgccgcgcgtgctcggtgccggcgaactgctggaactgcaacgtgccacggcggcgatcaccgtcgatgacgaagtgatcgactacgcggtgcggattgtggcggccacgaggcagtggccgggtatcgcggtcggcgctggcccgcgtggcagcatcgcgctggtacgtgcctcgcgcgcgcaggcggtgttggccggccgtgacttcgtcacccccgacgacgtgcgcgacatcgcgcgccccgcgctgcgccatcgcatcgcgctggcaccggaactgcagatcgaaggccaggacgccgacgacgtgctgggtgcactgctggccaaggtggaagcaccgcgccgatga

SEQ ID NO: 498001 - DNA, 1299 bp, Stenotrophomonas maltophilia
atgaggccggccccgctgctgctggcgctgctgctggcctgggccgccctgggtggcctggtgctgggcggcctgctgccgcgctggagctgggcgctggcggcggtggcgattgccgtgccagcgttgatggatctgtggcggcagacgcggcgtccatcgccgcagatccagcgtgagctgcccgaagcgctggcactgggcgtgcgccgcgaggccgcgctgcggctgcaggcggacgcatcgatgacggtgcaggtgttcgacctggtccccggcggctggccgctggagtcgctgccgcagcgcgtgcgcctgaagcccggcagcgcgtccaccctgcactaccacctgcagccgctgcagcgcgggcgcttccgcttcgacggcgtgcacctgcgcatgcgctcgccatggcggctgtggtggcagcaacgcacgctgcctcccgtgctggacgtgcgggtctatccgaacttcgtaccgctcactcgcttcgccctgttcagtgccgaccaggcctcgcggctggtcggcgcacacgtgaagcgccgccgtggtgaaggcaccgacttccaccagatgcgcgagtaccgcatcggcgacagcctgcgccagctggactggaaggccaccgcgcgtgcgcgcaagctggtctcgcgcgagtaccaggacgagaagaaccagcagctgctgctgatgctcgacagtggccgccgcatgctggccagcgaaggcgggctctcgcacttcgatcatgcattgaacgcctctctggtggtggcctacctggcgctgcgccagggcgatgctgccggcctgttcgccaccggtggcgagcgccgctgggtggcaccgcagcgtggcatgggcacggtcgagcacctgctgcgtgccagctacgatctgcagccgcgcgcggtggccaccgactacctggccgccgccaccgaagtgtcgctgcgccagcgccggcgcgcgctggtgatgctggtcagcaacgtgcgcgacgaagacatcgaggatctgctggcggcggtgcgcctgctgcagaaacgccacctggtgtgcgtggccagcctgcgcgagcgcgaactggatgctgtcctcgatgaagaggtgcagtcgctggaggacgcggcacaggccggcgccgcggcgctgtacctgcagcagcgcgcgaaagcgcatgaagcgctgcgcagcgagaaggtgatggtgctggacgtgaccgccgacgccctgcccggtgcactggtggagcgctatctggcggtgaagcgcgaagggttgctctga

SEQ ID NO: 498002 - DNA, 648 bp, Stenotrophomonas maltophilia
atggcggtgcggcgttggcctggccggcatgggcgttcttcgcccgtgcctggccggcacttcgatgacgggcgcagcctgcaggccttcgcggaccgtgtcgcggtgcgttgccatcgctgcgacacccccggctgggtggtcgccagctgggaaccttaccggtggaccgcgcgattccgctgcaccggctgcagttctgcactggacagtggtgactgggtcggtgcggtctacatgctgggccgccaaccttgtggattctgtgggcatcagtggctgcacgtgcgtcgtcgggttcccgctggcgttcctgcaccggcgtccttcgctgctcgatgtgcgcaatgtgatcgcagtaccgatgtttcggtctcggtgcgtccattgcgtgatgccgagcctaccgatccgcacttcggattgccgctgtgcctggtcgaacagacccgcgcaggcctgctctgggcctataacgctgaacatctgcacgcattgcacgagtacgcgagcgcgacattgcgcgaaagccgcggccatcaccgatccatgttctcgcgcctgccgcagtggatgaagctggcccgcaaccgggtgttgctgcagcgcgcggtggagcgattgcagcggcgattgctgcaggggtag

SEQ ID NO: 498003 - DNA, 1179 bp, Stenotrophomonas maltophilia
atgcagcgcatccggattgccgagcgtgcccaatggcgggcgcgcgcggaagaggcaggtttccgcttccacaccatcgacggccagccgtactgggacgaaagcgcgtactacgcgttcaccctgcgccagatcgagcaggacatcgaagaccccagcgccgagctgcaccagatggcgctggacctggtcggcgatgtcatcgccagcgaacgcttgatggaccagctggcgattccgtcgcattaccgcgactggatcgccgacagctggcgccagcgccagccgcatctgtacggtcgcctggacctggcctacgacggtactggcccggccaagctgtacgaactgaactacgacacgccgacctcgctgttcgaggccagcttcttccaatggcagtggctggaagaccagcgcaacgccggtcgcctgccgcagcacgccgaccagttcaacgcgattcacgaagcgctggtcgagcgtttcggcgaactggccacgcagctgccgccgccgctgtacttcagtgccgtgggcagctccgaagaagaccgcggcaccgtcgactatctgcgcgactgtgcatcgcaggccggcctgcatggccaggccatcgccatcgaggacattggcctgtccgaggacggccgcttcaccgcgctggacgattcggtgatcggcacgctgttcaagctgtatccgctggaagacctgatggccgaggaattcggccgcgcgctgcccggctcgggcgttcagctgctggagccggcgtggaaggcggtgttgagcaacaagggcatcctgccgctgctgtggcagcgcaacgtgggccatccgaacctgctggaagcgcatttcgatgacggcagcacgctggcgtcgggctgggtgcgcaagccgctgttctcgcgcgaaggcgcgaacatcgagatgcatctggccgatggcagcacccagcgcagcgacggtccctacgatggcccggcgatcatccagcgcgcccatccgctcacccgcttcgaaggcggctatccgctgatcggcagctgggtggtgggtgaccacgcctgcggcatcggcatccgcgaagacgacagcgcgatcacccgtgacagtgcgcgcttcgtgccgcatgcgatcgttgacgaggcgccgacgcggatctacgtctga

SEQ ID NO: 498004 - DNA, 573 bp, Stenotrophomonas maltophilia
atgaaacgttcccgcaccaccgcgctgctgctgatgagcgccgcgccgctgctgttcaccgcctgccagaaggagccggaggtgaaggtgcaggaaggcctgtacacgtcggtcgaggcctgcaccgaggccaccggcgatccgtcgtcgtgccgcaatgccttcgccgaagcgcagaagcaggccgccgatgcggcgccgaagtacgccagcagggaagcctgcgagaaggattacaagccggagcagtgcgtgcagcagcacacctcggccggtacctcgttcatcggcccgatgatgatgggcttcttcatgtcgcagatgctgagcaaccgcggaggcctggcaccgcaggcaccggcatcggcgccggcctaccaggacaagaatgcgggttgggcgcgcccggcaccgggtggcactggtggcctgaacaccgccagcggcatcggcgcgggcaaggccggcctggccccggtcaccagcgaaccgaaccgtgcggtcactgccagccgtggtggcttcggcaacaccagcgcgcgtcgcagcagcagcggcagctacggcggctga

SEQ ID NO: 498005 - DNA, 1839 bp, Stenotrophomonas maltophilia
atgcccgaataccgttcccgcacctccaccgccggccgcaacatggccggcgcccgcgccctgtggcgtgccaccggcatgaaggacggcgacttccacaagccgatcatcgccatcgccaactccttcacccagttcgtgcccggccacgtgcacctgaaggacctcggccagctggtcgcgcgcgagatcgagcaggtcggcggcgtcgccaaggaattcaacaccatcgccgtggacgacggcatcgcgatgggccacgacggcatgctgtattcgctgcccagccgcgagatcatcgccgacgccgtggagtacatggtcaacgcgcattgcgccgacgcactggtgtgcatcagcaactgcgacaagatcacccccggcatgctgatggccgcgctgcgcctgaacatcccggtggtgttcgtttccggcgggccgatggaagcgggcaagaccaagctgtccgagcacaagctggatctggtcgatgcgatggtggtggctgccgatgacagcgcttccgacgagaaggtggcagcgttcgaacgcagcgcctgccccacctgcggctcctgctcgggcatgttcaccgccaactcgatgaactgcctgaccgaagcactgggcctgtcactgcccggcaacggcaccacgctggccacccacgccgaccgtgaggcgctgttccgccgtgccggccgcctgatcgtcgaactctgccatcgctggtatggcggcgaagacccgagcgcgctgccgcgcggcatcgccacccaggcggcgtttgccaatgcgatgaccctcgacatcgccatgggcggttccaccaacaccatcctgcacctgctggccgccgcgcaggaagcggaggtcgacttcgacctgacccacatcgacgcgctgtcgcggcgcgtcccgcagctgtgcaaagtggcgccgaatacgccgaagtaccacatcgaggacgtgcatcgcgccggcggtgtgttcggcatcctcggtgagctggaccgcgccggcctgctcgaaaccacggtgccgaccgtgcacagcgccagcctggccgaagcactggaacgctgggacgtggtgcgcagcgacaacgacaccctgcataccttcttcaaggccggcccggccggcatccccacccaggaggccttcagccaggccacgcgctggccgacgctggacgtagaccgcgccgagggctgcatccgctcgctgcagcatgcgtattcgctggaaggtgggctggccgtgctgcgcggcaacctggccgtggatggctgcgtggtgaagaccgccggcgtggacgaatcgatccatgtgttcgaaggtcccgcgcgtgtctatgaaagccaggacgccgccgtcgccggcatcctcgccgacgaagtgcagccgggcgaggtggtggtgatccgctacgaaggcccgaagggcggccccggcatgcaggaaatgctgtacccgaccagctatctgaagtcgaagggactgggcaagcagtgcgcactgctcaccgacggccgcttctccggcggcacctccggcctgtcgatcggccatgtctcgccggaagccgccagcgggggtgtcatcggcctggtggaagatggcgaccgcatccgcatcgacattccggcccgccgaatcgacctgctgctggatgagaccacgctggcccagcgccgcagcgacgccgatgcgcgtggttggaagccgcgcgcgccgcgcccacgcaaggtcaccagcgcgctgaaggcctacgccctgctggccaccagcgccgacaagggcgccgtacgcaacaccgcgcttctgggcgattga

SEQ ID NO: 498006 - DNA, 354 bp, Stenotrophomonas maltophilia
atggacggcacaaccctgctggtcacggtgctgagcatggtgggcgtgcgcctgccggtgctgatcgcgctgtgcgtgggcctggtctgggtggtcggcgcaccgcgcgatgccacccgcaccggtgccttggtcggcctgctgctgttgctgctggccagcctcggcggcatggcggcgggcatcctgccgatgtggatggtccgcagcggtgatttcagtgccgtgtcgagcttgagtgccatcctcggcgtgctgcatttcgcgctggcgatggtcgaggcgatcggtgtggtgctggtggtgtgggcgctggtgcgcctgctgcgtacccgtacgctcccggccgcctga

SEQ ID NO: 498007 - DNA, 798 bp, Stenotrophomonas maltophilia
atggcagatcagacaaccgccgcattgctcgcccccgcgctggccgatgccaccgatggaccggcggtgctggcggcccggctgcaccagctcggcaagcgtcgcacggcccgccaccggcatgcgcgtgggcagctgctgggtgcgtaccaggggctgctgcggatcgccgccgacgacctgcactggctgctgcccgcaggtcacgtcgcctggataccgcccttgctgccccacgcgctgctgggcgcagacgggttcaatggctggagcctgtacttcaacgcggaggcctgcctgggtctgcccgccacaccacgcatcttccagcccaatgcgctgctgcaggcggcgacagcacgtgcgctgcaatggccccatgcgccactggatgctgcgcaggcacgcctggccggcgtgatcgccgatgagattgccgccagcacgccgctgccgctggccctgccacaaccgcgtgaccggcgcctgggccggatcgccgccgcgctggctcgcgcgccgcacgacaaccgcagcgtcgaggactgggccgccagcagtggcctgtccggccgcagcctggcccgccactggctggccgagaccggcatgacgctgagccagtggcggcaacgcctgcgggtgctgctggcgctgccacgcctgctgtccggcgagccggtgatcagcgtcgcgctgtcgatggggtacgacacgcctagttcattcatcgccgtgttcaagcgcgagatgggggttacgcctgcgcggtatggaaaaggggacggaggggattaa

SEQ ID NO: 498008 - DNA, 690 bp, Stenotrophomonas maltophilia
atgttggccgaacagccgtaccacgtaacccagcgcggtgtgaacaagggggcgatcttcgttgacgatatcgaccgtcagctgtttctgcacctgttgcacagcgcgttcctgaagcatcaggtcgcactgcatgcctacgtattgatgggcaatcacgttcatctgttggccacaccttccacgcgtgttggcttggcgaatgcgatgcggatgcagggcaacaactatgtccaggcgttcaatcagcggcatcagcgcagcggaccgctctggcagggccgcttccattcttcgatggtggacagcgacgcctatctgctcagcgtctatcgctacatcgaactcaatccggttcgtgcaggcatgactgccgccccggaagatcacccatggtcgagcgtgcatggaaacctgcagcggcgccacgatccgatgctgacggaacatcccgcattccaggcgctcgccccgacccagcgacagcgggcaatgctctatgcggagtttctgcaggacatgaacgcgtccgctgacctgccggcaatccgtgcgcacagtgccggccagcatccgttgggaaatgcagattacctgcgaatggtggaacagaccctgggtcgccccgtgatgctgcgcaagcgggggcgccctcagaagaagggcgcgggggggttagaaacgacttaa

SEQ ID NO: 498009 - DNA, 345 bp, Stenotrophomonas maltophilia
atgcagcacggtttgcagggccatgacacgctgctgggccgctacggtggcgaggagttcgtgctggtgctggccggcagcacgcaggcggaagcgatggcgcgggctgcggcgatccgtaccgttctgcagcagaagccggcgcggctggccaccgggccggtgacgttcactgccagcatcggcctggcgatggacgacggccagggcgagctgtccacgctgctggcagcggcagacgcggcgctgtaccgggccaaggccgccggccgcgatcgcctggcctgcgccacgccggcggagatttcgcgtctgcccatcgccgacgacgccgtgcccgtgtaa

SEQ ID NO: 498010 - DNA, 528 bp, Stenotrophomonas maltophilia
atgcatgcgtggtacctcggtggcatcgaccaccgcccgttcctgcacctgttcgaaaagagcgacaccgcgctggctgcgctgggcatccggcgtcgctgggccggcgaatcaggaggacacccctgccggatcagcctgagcgatccgcccggtggcagcgagctgctgctgttgtcccatgtgcacctgcccctgcactcgccgtatcacgcctcgggcccgatcttcgtacagcgtggcgtgacccgttgcgtgctgccgccaggcgaggtgcccccgtatgtgcagcgccggatgatctcgttgcgcgcctatgaccaggctgcattgatgctggccgccgagatcagcgcaggcacggatgtcggcgctcggctggacgcgctgtttgccgaccctgccgtggccttcgtgcagctgcacaacgcggcccacggctgcttctcgtgccaggcggatcgcgtcggcatgacaccgacatggccggatctccacgacgtgatcgttgccacgccggacacgtga

SEQ ID NO: 498011 - DNA, 1170 bp, Stenotrophomonas maltophilia
atgcacctgtcccatcgggccgtcctcgcactgtccgccgttgtcggcctggcactgtccggcaacgccttcgcccacggcaccctgtccaagccgctcagccgcgtgaagcagtgccacgagggcaatccggagaatccgaccaacccggcctgcgccgccgccaaggccatcggcggcgcccagccgttctacgactgggccggtgtcaaccaggccaacgccaacggcaaccatcaagcggtggttccagatggcgagttgtgcagcggcggcaacagcaagtaccgcggcctcgatctgaaccgcagtgactggccgacctcgccgatccgcgccgattcgcgcgggcgctacaccttcgagttcaaggcaccggccccgcatgctacccgcgagtggaagttctacgtcacccgcgacggctggcaaccgggcagcccgctgcgctgggccgacctgcaggaattctgcacgctgggcaacgtgccggtctccggcgacgtctacaagctggattgcccgctgcccaagcgcagcggccagcacatcatctacaacacctggcagcgctcggattccggtgaagcgttctatacctgcgcggacgtgcgcttcgaaggcggtggtggcgttgaaccgccgccgcagtggcaggacgccggcccggtcaccgcccgcggtgcgttggaagaaggcaccaccctgacgctgcgcgtgttcaacgcccagggcaatgatctggagcgtccggagatcaccctggccgcaggccagaccgctgcgaaccagtggccgctggcgctggcccgcaaggtcaacgccagtgcacagcaggcgcgtgtgggcgtgatgaggaacggcgtgatcacgccggtcgcctcggccaccgagaaccgcgtctacctgaagccgggcaacctgttccagatcgatacccgcctgccgggcccggtcgatccggtcgatccgccgccgggtgacgactacgacttcgtgtatccggccggtatcggcagctacacgccgggcgaaaccgtggtcaagggcaccgacggcaagctctacgcctgccggccgttcccggagggtgcgtggtgcaacatcaacgccgatgcctatcgcccgggcaccggtttcgcctggcgcgatgcctgggtcgcgtactga

SEQ ID NO: 498012 - DNA, 723 bp, Stenotrophomonas maltophilia
atgaaattctcattgctttcggggctgtccgcgttgctggctgccctattcgcccttcccggccaggccgccgtgacactgcagggaacccgcatcgtgcacgatgccgccaagggccgcgatgtcacagtgaaagcgagcaacgtcggcgagcagcctgccatgacccaggtctggatcgacgatggcgacagccacgcacgaccggaagatgtacgcacgcccttccggctgacgccggccgaaccgcgcctgctgctgtcacagcatgcccaggcatttcgcatcacctatgcaccgcgcccctcggatccgccggtgcccatggatcgcgagtcggtgttctacttcaatctgttggacataccgcccaagccttccggaactgcagaccgcaacctgcttcagttcgcagtgcgcacgcgggtgaagctgttccatcgcccggcagggctgccgggcaatgcgcgcgatgcagcagctgccctgctgtggtccggcgatggcgatggcctgcaggtgcgtaacccaagcgcgtaccacgtgtcgctgagttcgttgacgcttgccgacggccgcagcgtcgaggtggacatgatcgcgccgggagcacaggtacgctatgcactgccggatggcgcagtcatcccagcgtcagtgtcattcacatggctggatgactacggcacacctcgcgattcggaagcccgcgttgagcggtag

SEQ ID NO: 498013 - DNA, 516 bp, Stenotrophomonas maltophilia
atgccccttcaaacgcaactgctgtgcggggccttcctggccctgacgattccctccctggcccacgccgagcgcctggaaatcaccggatcgctggaaacgtccacctgtacggtcggcacgaccggtggcgcgatcaccgtgccgatgggcaaggttgatcttgtctcggtgaacgcggcaacacgtgcaggccagaagaacttcaccatcaaccttgactgcagcggctccggtgccgcgcagaaggttggcgtccgcttcggtggtacgcagcatgacagcaccggcaatctcgcactgacagcggcctcgacagcacgcaacgtcggggttgcgctgtatgacgcggacgacaatcaccagcgcatcggtgatgacccgacgcggtggctgacgattgccgccggtggcagtggacagctgacgtatagcgcctggtacgcatcgccctcacagaatgcgcaggccgggcaggccaacgcatccggtgacttcgtcgttctctacgactga

SEQ ID NO: 498014 - DNA, 975 bp, Stenotrophomonas maltophilia
atgatgtcgctctgtcctgcatacgctggctgcctcgccctgttgggagcgacggttgctttcagtgcgagcgcgacctgccgcgcaccggggggcgacgcacagctcgatcacgttttcgacgtcgcctttaccgaccgtgccgatatcactctgggcttccattctggaatgctgaccctggtctgcgacgcaggtgaaacgcagatggaggagctgcttcagctgaccggaatgaagtacgttcgcgacgtgccctgggggagccgcgcgattgccgcctacgaaatggattccacctcgcccttgttggccttcagctacagctatggtggctgcgaaatatccgatcccgaatgcccgatcgaggaggtcgaggaaggtggcgttccgctgcgcgacggtgttccgagccggtactcgctgaatggagcaagaaagaacgtcaccgtgcaggtcatcgcgttctcacggggcggaccaatgcacgacgtggcccgccggcctgcgggctccctgcgcacgacgtctggcggcacgggtgggttccatcgtttcaaccttggcttccgctttcgtgcccagacctgcgcggtcactccgcagaacgtcgacctggatccggtggacgcggtaaccctgcagcgcaacggcagcgcgggcgagaagtcgttcaatgtgcgcgtcagctgtgccgcctccgggcgccgactggttctggagctggtggacgttcacgatcctgccagcacgtcaaacacgctgaaggcggcgccgggcagtaccgccaatggtgtggcagtgcagatcctcagtggagggaatcctgtgcggatgaaagccccctggacccatggcgccgcatcaggcagtaccctgccggttccattcagtgcgcgctacctgcgcacgaccgggacgctgcgcaccggatcgatacgtggtgaagcaacgttgctggcagattactactga

SEQ ID NO: 498015 - DNA, 2487 bp, Stenotrophomonas maltophilia
atggcattcgctctgtcgggactggcgttacctgcccacgcggagaccgaaacgggccttgaattcagtgacggcttcctcgtgggtgggcgaaccatcgatatgcgtcgctatgtgcgcggcaaccccatgcccgcaggcgactaccgcgttgatgtgctggtcaacggccagtacctgcagacacgcgacatcaccttcgtagcgggcgacgaccctgaccgggcgggtgcctgcctgtctgcggatctgctgcgggagctggaactgcaggccacctatcgaatggcgctggagcgggcaacgggttgtatcgacctgccgtccgtgatcgcgggggcaacagtgacattcgacagcggcacgctgcagctgctgatctccgtgccgcaggctgcacaggcgagggcggcacgaggcctggtgccggttgagctacgtgatccaggcatcaacgccctgttcgtggactacagcgccagccatggccgtagtgcaggcgtcgatcgcagccacctcggcctgcgcatgggtgcgaacatcgggagctggcgcttccgccatcgcaccgccttcaaccatgcgcgggggcaggtgcgccgtaccaccatcaacagttacgcccagcgtgacattcccgggtggaacagccagctgttgctgggtgagggcaacaccagtgggcagctgtttgacagtgtgccgttcacgggggtgcgtatcgccagtgatgaacggatgctgcctgattcactgcgcggatatgcaccggtggtacgtggcattgccgacagcagtgcagtggtgcgcatcgagcaggacggtgttgtcatccatgaagtaaacgtcgctccagggccgttcgcgatagacgatctgtatcccaccaactttggtggtgacctgcaggtgatcgtagtggaagccgatggccggcagcagcagttcaccgtcagcttctcggcggtgccacaggcgctgcgcgcgggtacgtcccgctcaagcgtgaccgccggtgcactaagaggccgtcacgtcctgcagcggctgggcttcgccgaggccacccatgcgcatggactgaacaatcgactgacagctctcgggggattgcagctggctgaaggatacggtgccggcctgctgggggtggcggtcaacactcctgtcggcgcgctgggcatggacgtcacccattcgcgcgcccgccaggcggacgggcggcccctgatcggcaacagctaccgggtgaactatcagcgctacctggcagaaagtggcaccaacttcgggcttgcggcgtatcgttacagcacccggggcttcctcacgctgcacgatctggcaacggcccgcccggacgagtggcatccagtgggacgtgcgcgccagcgctaccagctgaacttctcacagaggatcggggagcgcagcagcctgcatctcgacggcggccacgtcgcgtactgggacagcacgcagcgccagaatgatctgcagctgagcttcaataccgttgcggggaaggtcaactacggcgtatccgtcatgcgtttccggcagggaaacggtcgtcaggacacccgctacgacctcacggtcagtctgcccttgggatcccacggcagcacgcagcggaccagcacccgcgtgggtcgctctgacggtggaggccaggcccagctgagcctgacaggtgcggtgggagagcgtcgcgcgctcaactattcactgtctggagagcagcgggcgggcggggtacgcagcagcactgcattcgccgattatcaaggccgctacgcacatctcagcgcgggcttcacccgagccgggcatttcagcagtcacacgctgggggccgctggcagcatcgccttgcaccgtggtgggatcaccctggggcagccagtgggagagggatttgcgctggtgcaggcgcccggcgcgcacggcgcccgcatcggagccggtgctgatctccgtgttgatcgccgtggttatgcgctgctgccgcacatcagcccttaccgctggaaccgcattgatcttgacccgtccggtttgccgctggaagtggaactcctacagacctcccggcgcatcgcgccgacagcgggcagcatcgtacgtgttccgttcgaagtgcgacgcgagcgctccttgttcatcgatgcgacggacgcgcttgggcagccgttgccgtttgccgcgcgcgtgcaggaggagaacggcacgccgcgcggagccgttgggcaggggggcgtgattcatctgcgcggtgcccaggatgaaggagcattgatcgtcgatgccgatggccccagccgctgtcgactgctgtaccgcatgcccgccaagcctgacgcctatggcctgtcctggacccaggcgctgtgcacgccaatgggcgacgccgggttgcgggtagagaccgcgattccaggtcctgacattcaatcttcgcttgctccaggagaatctccatga

SEQ ID NO: 498016 - DNA, 504 bp, Stenotrophomonas maltophilia
atgatcgatcagtaccgtcatctgccggccatgcttgcattgctgatggccgcatcgccggccagcagccagacactttccatcagtggccgagtgttgccgggtacctgtgcgctggccacccccgccatcacgctcgacagcgtcaaggccgatgcactcaatgtgggcaacaacaatctcaagaccagcaatctgaatttcaccggatgcatcggcgtcaccaaggcactgctttcctttgacgggaccgctgcggagggcgatgccctgcggtggaaaaacacggcgacgagcgagcccgccaagggcctttccattgtgctgctggcaggcgcgagcggatcgacacctctgaagaagggagacaaggacattcctgtcatagtgactggcgcgacggccagctacacgctgcgtgcgggctactacctgccctccaccagtggtatcaacgcgggctcggtgcagaccgagatcaccatcacagcaacctaccagtag

SEQ ID NO: 498017 - DNA, 2001 bp, Stenotrophomonas maltophilia
atgctgccggatcgctcgctactgaccacgcgcatgtccccttccgaacgttcgcacaacactgccatcgacggcctgcgtgcagtggcggtgctggccgtcgtcgtcttccacaccaacgccacgtggctgcccggggggttcaccggcgtggacctgttcttcgtggtgtccggtttcgtgatcagccagtcgctggcctcccgcacgcatgcgtcgctgggcgcggtgctgctcgacttctatcggcgtcgcgtgctgcgcctgttgccggcgttgctggtgatgctgatggcgaccttcgtgctgtcggcactgttcattccccgcgcgtggcgcaatgagcagttcgaccagaccggctgggccgcgctggtcggcctcagcaacatcgtgctggccggccagcaggacgactatttctcgcccggtgcggaactcaatccgttcctgcacacgtggacgctgggcgtggaggagcagttctatctggtcttcccgctgctgttcttcgtgtggctgcgcgggcgtgagcgctggccgtggtcgcgttggctgttgccggtgctcaccctgctgtcgctggcgtgggcaggctggcaggcgcagacggcaccggcggcagcgttctacctgctgccggcgcggttctgggagctggctgcgggcgcgctgctgtaccagtggatgcgcacgcgtacgctgggccggaacggtgatgcggttgcagtgatcggtctggtgctgctgggtgcaggcgtggtgatcgcaccgcagctggcgatgccggttccgggcgtgctggccaccgtggccggtacgttgatgctgttggcgagcgtgtcggcaccggatacatcgcgcattgggcgtgcgctgggctgcgcaccgctggcctacttgggccggttgtcctactcgctgtacctgtggcattggccgctgctggtgctgctgcgctggacgtatggcctgcatggcgtcgcgccgtggctgtatccggtgctgctgctggcggtgtcggccgcgtcctaccacttcatcgagcgcccgctgcgcagtgcggcgccgctgctgcgcctggcaccggccaaggtgctggcgatggcgctgccagtggtcgcgctatgcggcgcaggcgcctgggccatggtggagtaccacgagcaggtctcgctgagcgttacccgcgacggatatgcatggcaggcgcgccgctacccggcctggcgaccgctggagccggtgagtgcgccagcgcttgaagggcggcgcctgttcgtggtgggcgactcgcatgcagcggcgtatcgcaccatgaccagcatggtcgcgcgccagaccggcatggaggtgcgccagcaggatcgcggtggttgcagcttcgtcaacctgctgcgggccagcccggccgactgccaggacttcattgaggacgcgctgtcgaccatcgagcgtgaggcacgcccgggtgacatcgtgctgcttgcggcattgcgcatgccggagctgcgcggattcgactggcaacagcaggatgcgcagcaggtctatcgtcaattgcttgccgagcgtaccccaaccgatgcgcaggcctcgcgcgatgaggctgatcatgttcttgggcgtttgcagacgctgggcgtacacgtggtgatcgacgcaccgctgccgctgttcaagaccggtgcgtaccgctgttcggactggttcaatcgccgcaatccggcttgtgtcggcggtctgagcatgccgcgtgcggatctggaaatgctgcgcgtgccgcagatggcactgctggcggacctggccgcacgttacccgtcactgaccgtgtgggatccgctgccgttgctgtgcgggccagacacctgttcggcggtggaagacggtgaacccctgttcttcgacaatgaccatctgagcgggcacggcaatcgcgtgctgttgcccagcttccgccagaccctcatcgacagcgtaggcagcgcgccccggtag

SEQ ID NO: 498018 - DNA, 1047 bp, Stenotrophomonas maltophilia
atgccggattcctcctcgacggtacgcttctggctgctcaatgcgctggtgtgggtgctctatggcgttgccggaatcggcctgcgccaggcctatttcagcgatgccggaagcgcaggcgtgttgatcacgctgggtctggcgttggccctgttcgggtgcagcggtgccatccgcgcgctggcgctgcgtgccgactggtgggcgcgtggcacggccgggctgttgctgcggctggctctgtcggtggcattgggcgcggcagtggcgcagctgctggtgaacatcgcgctgcactcggcgctggcctggaactgggtgagcctgggacggcagacggccgacttcagccccaaggcgctgctgctctactggtacaccactgcggtgatgctggccctgtgggcagcgctctgggcaggcctgcacagcctgcgccggatacgcagtgcggaactggcccgcctgcgcgccgaggccgagcgcagcgcgctggagcgcgatgcactgcgtgcacggctcaacccgcatttcatgttcaatgcgctgaacaacctgcgcgcgctgatcctggaagatcctgagcgtgcgcgcgacatggtcacccgcctgtcgcgcacgctgcgccaggcgctggcacacaaccgcagcgagcaggtcaccctggccgaggaactggtggtcgtggacgactacctggccatcgaggcagtccacttcgaacagcgcctgcaggtaagccagcacattgatgccgatgccatgcaggcacagctgccggcgatggcgctgcagctgctggtggagaatgcgatcaagcatggcatcgccagccgcccgggcggcggtgaggtgcagatccgtgccacgctggacaatgatgtgctgcgcctgcaggtggacaatccgctgggcagcgccaacgagcccacccatggccatggcgttggccttgcctacctgcgtgcgcagctcggcacgcagggtcgtttcaccctgcagccggtcggcgaccgcatgcaggccctgctggagattccgcaatga

SEQ ID NO: 498019 - DNA, 1518 bp, Stenotrophomonas maltophilia
atggatgcagcatgcgcattgccccgttccgcccaccgtcggcagtggccgatcgtactggtcatcctcctgctggcgccgccattgctgttcgccgccgctctgctctggccgctgtcggctccgccgttgcccgagccgggcaacagccgcgtgatcgtcaacgcgcgggtggtggacgtggcgcgcggccaggtcagcgaacccaccaccgtgacagtgcgccacggcaccatcactgccattggggaagatccgcaggacgcgcggcttcccgtgctcgacgccggcggccgctggctgctgcccggtttctgggacatgcacacccacgcactgcaattgtcgccgcagctgcagttcccgctgatgctggccaacggcatcaccggcacccgcgacatgatggactgcccgcagaccactgatccgctgatcgcctgcgtggccgacaagcgccgctggaccgcacaggccattgccgggcagcaggttgcaccgcgcttcgtacagatcgccagtttctacttcgaagatccgtcactcacgccggaggccgccgctgcgcgtgcacggacgtacagcgcgcgcggggtcgacgcgttgaaggtctacaaccggctgcgtgcggacacctatcagcggctggccaccgaggcgcagcagctgcgccgtccgttggtcggccacctgcccaaggcggtgcctctggacgacgcggtgcaggcgggccagcgcagcttcgagcacgcccatctgttcgtgcgccactgcttcgacaacgcggcggcatggcgcggtggcacgctcgacggcgaagacccgatcgtattggccgaacgcatggttgccagctatcagcccacgctctgcaacaaggcgttcgctttgatgcaggccagcggtgccgcgttcgtaccgacccatgtcacccgcgaagaagatgcacgcgcaagcgaccccgccttcgtcgacgatccgcgcctggcctatctggacccgctttcacgctgggcgtggcgtgatgacctgcaggccaccgcagcgcgctatcccggccgacgcggccaagacgcactgaagacctacttcgagcatggcctggctctcaccggtgcggcccatcgtgccggcgtcaccgtgctggtcggcaccgataccggattgggcggcttccgctaccacgatgaactgcagtggctgcgacaggccggcctgagccaggccgacgtgctgcgcgcagctacgctgcaggccgcacgtcatctgcaacggcaggcatcgcatggaagcgtcgaggtcggcaaagccgcagacctggtgctgcttgatggcaacccgctgcacgacatcgccaatacccgccgcgtgcatgccgtgctgctggccggccacctctatgaccacccgcggctggatgcgctacagacttatgcgctcaggcaggcacgctcgcccgcagtgatggcacgcctgctgtggggattcatcaccagcccggtcagtgccgagctgtag

SEQ ID NO: 498020 - DNA, 558 bp, Stenotrophomonas maltophilia
atgtccatcgtcctcacccatttcgcccgtccccgcctgttcccgcgcgtgccgcgtggcaacaccatccaggactgcactgccgagcagttcgaggcacacctcaatgcgcatgcgccactgaaggtactcgacggctacgccccgttctgcaagctgttcgtctacgagaactggaccagcacgcgctgcctgaccgtaccgatcaccgaggccaaccgccacctgctgcgcagtggttacgaagcgcgcaaccgcgaggaactaccggtgctggtgcgctggttcgagggcgtggaatcaccgcgtgcgaactacctggtggtgatcctgtacagcgccgggcagctggccagggaaggctcgccgatcgaggccgactggggcatcgtcggctgcatctacaccgccgaaccggaagaggtaccgatggcgccgatcacgatgatgcgcaatgcgctgggcgtggacgagggcggatccggcgtgccgctggaccgcgaagcctaccggcgttccgtcgagttctgggagaacaacgcgaactggcggccgtga

SEQ ID NO: 498021 - DNA, 486 bp, Stenotrophomonas maltophilia
atgcgctggccgtggtctgcagcgccgataccccggctcgacgatgcacaggccgatgtgctgctgcaggacctgttgtcgcgcgacgcaacgcgcatcaccgatgccgcccgcgtcgtcgcacgactgttcagtgcctcatcgttggacgcgttgagcgcacatgtggatctgatcgaacaacgctgccagggcatcgcgcttggcggcatgctgatcagcaaccaggcgtatctgaaggccgccctgcgtcggctgcgttactggcgtgcacgcgagggttgcctgtgcgcgctcaaccccggctacccgttcttcgatccccgtcgcctgattgaacaaggacagatgcagctgctctcggtggaagaggctgagggctgctggggcgactgccacaccgttgcctgcacgcaatgcggccagcattggcaggccatcgaccgcgagtaccattacccgtggtgggaatggaaagctgcctga

SEQ ID NO: 498022 - DNA, 186 bp, Stenotrophomonas maltophilia
atgtccgccccgaagcccgaaccgatttcccacactgccgaaatggtgatcgccaccgtggtcggcgtgggcgtgggcctggggaccgacaacctgctgctgggctgcgtggtgggtatcggggtcggcatcgtgctgagcatcgccaagaccctgtacgtggaccgcaagcgccgccgccgttga

SEQ ID NO: 498023 - DNA, 330 bp, Stenotrophomonas maltophilia
atgaatacgaccacatcggcgcgaggctggccctggggcctgatcgccctggggctgtccgtgttgacctggatcgccctggtggtgggcgtactggccttcaccgccggtttccggccgccgggggacgggaacaacggcgtgcaggccacgcaatggtggttgctgggcgcactggtcacgatggtgctgtccttcctgggtagcccggtggcgatggtgctggcctggcgacggcggcgtggccccatcctggcggcggttgctggtgcattgctggtgatgctggtgtcgatggtcctgatcgtgatcgggtccagctggggctga

SEQ ID NO: 498024 - DNA, 366 bp, Stenotrophomonas maltophilia
atggcaaaactcctgctcaatctgcgcaatgtcggcgacgacgaatatgccgatgtctgcacgctgctcgaccagcacggcatcgcctggtatcgcaccgaacccagcccctggggcatctccaatggtggcctgtggctgcgcgaggacgctgatcatccacgtgcgaaggcgctgatggcggaataccaggccgaacgcgggccgcgcatccgtgccgagcgtgagcaggcattgcgagatggcacggcggagaccttcggcagcctgttccggcggcggccggtctacgtggtgctggtactgctggcgatggccggtgcggcggcgctggtattgctgccgttcgtgctgttgcgggggtaa

SEQ ID NO: 498025 - DNA, 435 bp, Stenotrophomonas maltophilia
atgcgccgcctgctgcttcccctgctgctgtccctcgccgccgctggctgcacaaccgaaccgtccggcccaccgcccggcggcaccctgaccaccttcgagcgcatcgataccgtgcccggcaccggtaccgaagccgttgccggcagcaaggtcaccgtgcactacaccggctggatctacgacaaccgcaccgaaaccaagcacggcaagaccttcgacagctccttcaagcacggcgaaccgttcaccttcgcgctcggcgccggccaggtcatccgcggctgggatgagggcgtggccggcatgaaggtcggtggcaagcgcaccctgatgatcccgccggattacggctatggcgaccgccgggttggcccgattccggccggttcgtcgctggtgttcgatgtcgagctgctcgatgtcaaaccgtaa

SEQ ID NO: 498026 - DNA, 1248 bp, Stenotrophomonas maltophilia
atgtcaaaccgtaatgccgcaccgcttccgcgggtcgccgtcatcggcggcggcccggccggcctgttcgccgccgagcgcctgcgcgccgccggtctggaggtggacctgtacgaggccaagggttcgcccggccgcaagttcctgatcgccggcaagggcgggctcaacctcacccattccgatccgcgtccgctgttcgacagccgctaccgcgagcggtccacgaccgtgggccgctggctggatggcttcgatgcgcaggcattgcgcgactgggccggcggctttggcgtggagacctatgtgggcagctccggccgcgtgttcccggtcgaccgcaaggccgcgccactgctgcgtggctgggtgcgccggctgaaggaacagggtgtgcgcctgcatgccaaccaccgttggatcggctggggcaacgacggcgcgctgcgcttcgccaccgaagccggcgagatcgatgtccacgccgatgccaccgtgctggcgatgggcggcggcagctggccgcagctgggcagcgacggcgcctgggttgcaccactgcaggcccgtggcgtggacatcgcgccactgcagtcagccaactgcggcttcgacgtggactggaccccgttcttcgcccagcgcaatgccggtgcaccgttgaagccggtggtcgcgcactggatcgacctggccggacagccacagtcgctgcagggcgaatgcgtggccagcgagtacggcatcgaaggcagcctgatctatgcgttggcggcggacctgcgcgagaccatcaaccgcgatggccacgcgatgctgtggctggatctggtgccgggccgcgacgaggcgcgcctgctggccgatctgtcacgcccgcgcaagggccgcagcttcggcgagcacctgcgtcgccaggcgggccttgatgcggtgaaggccgcactggtgttcgagattctgggtaaggaagccggcaacgacctgcctgccgtggcggctacgctcaagcgcctgccgctgcgcctgctgcgtccccggccgaaggccgaggtgatcagcaccgccggtggcgtgcgcctggatgcgctggatgatggcctgatgctgcgggccgtgcccggtgtgttctgcgccggcgagatgctggactgggaggcgccgacaggtggctacctgttgaccgcgtgctacgccagtggcctgcgcgccgccgagggcgtgatcgggtggctggccgggcggtga

SEQ ID NO: 498027 - DNA, 210 bp, Stenotrophomonas maltophilia
atgaccgaattctggaacaagcggcaggtgcgtgcgcggctggggttccagaccgatgcggagctggcgcgcttcttcggcatcagccgttccgcggtatcgcaatggccgaaagacttcccgatccccgctctgcggcagtacatcctgcatcagcgctacccgaacctgttccccgcaacgggcgccgccgaagttgaatccgcctga

SEQ ID NO: 498028 - DNA, 213 bp, Stenotrophomonas maltophilia
atgcaatccgccttcccgggcgggttgcagggccgtgacgaccgcgcgctaccccgcctttccttggggaatgcggataatcgacgcggtgacgtgcggagccatgccaccagcgtagagcgccgcctgtacggcccgcaatcccctgcggcagtgcagcgcgcgcaacattccgctggcatctatgctcggcgccattcccgcatggaatga

SEQ ID NO: 498029 - DNA, 1077 bp, Stenotrophomonas maltophilia
atgcgccccttgcttcgatgtgccctcgcccttggcctgctgcatgcttcgtcggcatcgctggcagcaccaaccacggcaccacgcacgctcagcggcgagctgcagggcgccccctggcggctggatgtaccggcagactggaacggcgacctggtgatgctggcccatggctatgagcccgtgggcgtgccacgcaccacgccaatggccgccggtgacagcaccgcagcactgctgggcgcgggctacgccgtcgcgcagagcgcgtattccagccaaggctgggcggtagccgaggcgatcaccgacatggaacacctgcgacagcattccctgggtgaactcaagcgcgtgcgacacacctggatgctgggcttctcgatgggtggtgccgtaaccattggcagcctcgagcgtttcccgcagcactatgccggtggtgtgtcgctgtgcggcgccaatctcagtggcgaacagatcgcggccgacctgctgaccacactggtcgcgttcgattatttcttccccaaggctgaggggctgccgggcaccgggttggcatcgcgcgaagccgccatgctgccgcagggtgagctgtaccagggtatcgccactgcattgcagcgcgacccggcgcatgccgcgttgctggcgcagcggctgcaggtttcccccgatgaagtggccggcacgatcagcctgcacgccctggtcctgcacgagctggccacacgcagcggtggcatgccggtcggcaacaggggcatggtctacagcggcttcggcgatgacgccgcattcaacgccggggtgcggcgcatcgatgctgtacctgccgcgcaggccagggtgcgcgcgacgctggcgctgaccggcgcactgcagcgcccgctggtgatccagttcaaccacaacgacccgaccatcgtgccgcacatgcagacggtgtatccgaagttggccgcacacgccggtgcgcggccagcgccacgggtactgccatcggtgggcgaaggacattgtggcttctctgaagcacaggttgtcgatgccttgaagacagtgcaacgctga

SEQ ID NO: 498030 - DNA, 720 bp, Stenotrophomonas maltophilia
atgccacaatggggcatggtccacacctccggttcccttgtcagtgtcggtgccctggtcggggaccaggcgcgtgccgccatgctgctgcagttgatggatggacgggcctacaccgcgatggagctggcgcgcgtggccggggtaacgccgcagacggcgagcacgcacctgcgcaggctggtcgagggcgacctgctggtggcggtggcgcaggggcgtcatcgctaccaccggctggcatcaagcgaggtggcagagatgctcgaaggcatcctgcgcgtggccgaccgtaccccttcgtgtaccgctgcggccgcgcgcagcatgcctgcactgcgcgaggcgcgttcctgctatcggcacctggccggcgtgcacgcggtcgccatcaccgatcgcctgctgcaggcggggcatgtgctgccgtacgaagggcattggcagatcagcgctgggggcgccggattccttgccgggctgggcctgccgttgcgcgagctcctgcagcagccggtgacggccaagccggcgcgctactgccgtggttgcctggattgcaccgagcggcggccgcacctggcagggctggtcggtgaggcgatgctggacagtttcgtgaacaacgattggctgcggcgcgtcgagggccgccgcgaactgcggctgacgccacctgggcgcgaggcgttgtggcggctcttcaacctggcgacctga

SEQ ID NO: 498031 - DNA, 648 bp, Stenotrophomonas maltophilia
gtgaagaccgcttcgatccatcgccgccgcatcaccccttcggtcctgtacccaggcacgcccgtgctgctgatgaccacgttgaatgacgacggcagcagcaacatcagcccgctttcttcgttctgggcgctgggcaaccgggtagtgctgggtctcggtacgcagggccagggctatcgcaacctgcagctgcgcagcgagtgcgtgctgaacttcccctcatccgcgcaggccgcacaggtcgaggcgatcgcgcgggcaaccggctgtaacccggtgccgaccgccaagcaggcgatgggctacgtgcacgtgcgcgacaagttcgcactgggcggattcactgccgccgtgtcgacgcatgttgctccgatggccattgccgagtgcccgctgcaggtggaggccaccgtcatggcgatgcatccacccggcgaggatgatggccagggcttcgtgatcgtcgaaggccgcatccgctgcgtgcatgcgcacgaagacatcaccgtggacggcacccagcacatcgacgtggcgcgctggaaaccgttgatctacctgttccggcaatacctgggtgtaggagagccggtcgggcgcaacttccgtgcggaaatgcccatgcgcgcgtctgcctcgcagtga

SEQ ID NO: 498032 - DNA, 546 bp, Stenotrophomonas maltophilia
atgaaacggaaggtagtgatggcgatgatgctgctggggtgtgccccgctggcatcggcccaggtctacaagtgcaagggcgcttccggggaaacggtgtacagccagaatccctgtgctgccggcgctgaacccatgaagctgcgttccagccgttcctccacggaaacggcgggggaggcatcgaaccgcgcggcggtgtaccagaacaccgaactggccgacgccggtatcgccgagcgcaactgcgtgcagggcgagcgctcgcgcatctacggtccgctggagtcccgcagccagcaggttggccggcaggtcgccgagctgaaccgtcaactggccgcggcgggcaccagcctggccggcgcaacacaggactccggcatccgtgcgcagatcgccagcctgcagcagtcgctgagcgctgagcgtgttgcagcagatacgcagatgtcgaatgcgcgcgaacagtgtgcatcggtccggcgcgaacgtgagcggacggtgcgcgacaagttcagcagttcgaccgcccctgcgaattga

SEQ ID NO: 498033 - DNA, 510 bp, Stenotrophomonas maltophilia
atgcacgttcaggtatgccgctggcaaagcgtagcgccggaacaccgtcagcaggcggtggatctgctccgccaggctttcccggacatgcagggcgagggctacgccatcccggggccggtcgctctggtcctggcgatgggaggtgatcaggttgtcgcacatctcgcgctgtacgaacgcaacgtactgctggacggcgagccggaacgcataggcttgattggcggcgtggtggtgcgtgccgacgttcgccggcagggcgttgcctcgcggttgatcgaagcggcccatgcagagttgcgccggcacggtatcgatttcgccgtgctgttcgccctggatcatcggcactatgcctctgcgggctatgtgccgatgcagaacgagacctgcttcattgaagacggccatgcacgccggttcgtctatcgcggcggcatggtggccatgctgggggcgcgccgctggaccacggccgtgctcgatctgcagggcgaaacggtctga

SEQ ID NO: 498034 - DNA, 498 bp, Stenotrophomonas maltophilia
atggtcatccggcaacttggcgctgacgacgccgacattctctggcaggcgcgcttgcaggcgcttcgtgagtcgcccgctgcgttcctgtctacgctggccgaggcgcagaatgagacggcagacgtgatgcgcgcccagcttgctgatcccggtacgcgttacttcggcgccttcatcgacggcaagcttgcgggcttcctgcgctacgtacgcccggtgcggatggcgcgacggcatacggcggaagtgcacagtgtccatgtgggcaccggccaccgtggccagggtatcgcccgccagcttcttcttgctgcgtttgcatctgcgcgcgccgagggcattgaatcgctcaccctcacggtgctggaggacaatgctgctgcgcgcgggctgtatgaatcgctgggtttcagcgtactcggcagggagccgcgcgcagtcaagcgcgagggcatctacacggatatcgtctcgtactggatcacattgcactga

SEQ ID NO: 498035 - DNA, 405 bp, Stenotrophomonas maltophilia
atgactgaactgcagattccccgcgttggatgcggcgccgtcgtccgtgatgccgacggccgcatcctgctgatccagcgcggacgcgatccggagcgcgggcattggggcctgcccggcggcaaagtcgactggatggaaacggtggaggctgccgtggtccgcgaagtccgcgaggagacggcgttggaagtgacgctgctgcgcctgctgtgcgtggccgatcatttcgagccggcgcttgcgcagcactgggtcgcgccgatctacgaggcgcgggcacctgcgggtgccgaggcttccatccaggagccaggtgtgcagaccgggctgggctggttcgccgtggattcactgccccagccgctgacgcaggccacggtgcagacgctggccaggctgtag

SEQ ID NO: 498036 - DNA, 354 bp, Stenotrophomonas maltophilia
atgactccccgacacatcgtggaaacctggatcgagcgcttcaacgcaggcgatgctgctggcttggcggagctgtatcaccccgacgcgatcaatcaccaggtcacccaggacccgatcaagggccgcgatgcgatccgtgccaccttcgagcgtgaattcggcactgctgaaatggtctgcattcccgaagtcatccatgaggccggcaatgtcgctgcgctggaatggcgcgaccctcttggcctgcgaggatgcggtttcttcacggttgacgaaggattgatcacgttccagcgcggctactgggacaaactctcgttcctgaagatgcacggtcttccgatcgagtga

SEQ ID NO: 498037 - DNA, 906 bp, Stenotrophomonas maltophilia
atgctgccgctggaatcgttgaatggcctggtcacgttcgtcaccacggcccgctcaggcagcttcaccgaggccgccgacgcgctgggcatctcgcgctcggcggtgggcaaggccatcgcccggctggaagcgcggctgggggtgcgcctgttccaccgcaccacgcggcgcatcgcgctgaccaccgatggcgaggcgtactacgcatcgtgcgcggcggcgctggaagaaatctccgccgccgaggcctgcctgggttcggccggcctgcccagcgggcggctgcgcatcgacatgccatcctcgttcgggcgcctggtggtgctgccggtgctgttgcggctgtgccggcagtacccggacctgcagttgacgatgaccttcaccgatcatttcgtcgatcccgtcgaggaaggcatcgacctgctgatccgcttcggcgggctgcaccaggccgagcatctggtggcgcggcggctggggcgccagcgactggtcacctgcgcatcgccggagtacctgcaggcgcacggcgtgccgcgcacggtggaggaactggcgcggcaccgcagcattgttggcttccgccacgggcaaccggtgtggtggcggatcggtagcgaggaggacgaagggacattcatcccgaatgcgccgtatcaactcaacgacggcgacgcggtgatcgaggcggccatcgccgggcttggtatctgccagatgccggtttcactggtgcgccgccacctggattccggcgcgctgcggtcggtgctggatgcgcacatgcaacggcacatcgatatccacgcactgtggccaccgacgcgccacctgcggcccaaggtgcgctacgtggtggatgagctgacccggttggcgggtgagggattgttcgattga

SEQ ID NO: 498038 - DNA, 360 bp, Stenotrophomonas maltophilia
atgggctggttcgatgccctgcgccggccgcgtgcggaagacccgcgcgcggccctggtggtgccgatcgagcaggcgttgcgtgcgctgggctgggtcgacggcgaggtgggaccgccgtgtgcggtgacttcggccttcggcagcgacgatggcatgccgttcgagcagtggcttgcgcaggtattcctgccgcgcctgcacgaagcccgcgccgacggccagtggccaccacgcagcgacgtggcggtggcggcgtatcgcaacctggacggccagcctggcgtcgaatcattgctgcgcctgctggcacagctggatgaacggatcaaccaaggcatccacgccgggcgtggataa

SEQ ID NO: 498039 - DNA, 1446 bp, Stenotrophomonas maltophilia
atgccggtagtgctggcgctgctgtatgtgctgtgccatggcctggtgctggccctgtggcctggccccgccggggtaggctccttcgttttcctgaccggcgcaccgctgctggccgccgccgcgtgcctggtgcgggcgcaacgtgaccgcgccgctctgggctggcgttctaccgcgatggcactgctgctgtgggccggcggcatgacgttcaacatggtggatgcgctgggtgccggccgggctgacttcaccccacgcgtcagcctgttgttgtacgtgctgtatggcgtgcccctggtgttcatcctggcgcgggcacgccgcgagcgcctgagcatcagcctgatcgacgcggcgatggcggcgctgctgggtgtgctgttcttcgtgcacaccgcatcgttcgccgcccgtgtcgaggtcgacgcccatgcgatgtccaacatgcagcgcatgttcgacatccagaacctgtgtatcgccgcgttcgccgtggtgcgatggctggccggcgacgtgcccgaacggcgcaggttcttccgcgcactggcgctgtacgcgatggcctatctgctggtggcctactacatcaaccattacacgtccgacgatgcattcggtgcgttcaacgatctgctgattgacatacctttcctgctgatcgcctgcctggcgctggacacggcgccggacgcaggcacaacgccgcacccgcggctggcgaggacggtgcaggccgccggtccgatcatcctgccattgctgctgctggtggtcggcacgctggtggtcgatcatgcgcggccgttggccgttgccggcttcgtcgtagccacccttggcttcggcctgcgcagcgtcctgctgcagaccgatcttctggaacgccaggcagcactggatcaactggcgcggcaggatggcctgaccggcgtggccaaccgccgcgagttcgacgcacggctgacgtccgagtggaatcgcgcacggcgcagcggcaccgagctgggcctgctgctggtggatatcgaccacttcaaggccttcaacgaccagcacggccatccggccggtgatcgttgcctgcaggcggtggccggggtgctgaaggccatagccggtcgcggtggtgacagcgttgcgcgttatggcggtgaagagttcgccgtcatcgtgcccggaagcccgttgtcgggcgtgctggcgctggccgagcggctgcgcgaagcggtcgaagcgctgccattgccggaaggcccggtcagcatcagcgtcggcgtgggttacctgcatccgccggctctggccagtgccgatcagttgctggcagacgccgatgccggcctgtatgccgccaagcgggctggccgcaaccaggtgatcctgcatgcgcatgtgctggacgacgagggcagcacgcacggaacgatggactgctga

SEQ ID NO: 498040 - DNA, 918 bp, Stenotrophomonas maltophilia
atgcccctgccggacctgaacctgttgctggcactggacgtgctgattgacgaatgcagcgtggccgccgccgcgcgccggatgaacctgagcgcgccggcgatgagccgtaccctgggccggatccgcaacgcgctgggcgacccggtgctggtgcgtgccggccgcggtctggcgcccacgccccgcgccctgcagctgcgcgagcaggtccgcgatgtgatcgagcaggcccaccgcgtcttcaacgccggtcgtgaagtggacatgcgcgtgctcgagcggaccttcagcgtgcgtgccaatgatgtgttcgtcggggggttcggcggacgcctgcgcgagctgttccgccagcaggcgccgcgcgcagtgctgcgcttcgtgcccgaaggcgataccgatgacgatgcgatggcgcagggccggatcgacctgtacatcagcacggccggcaagcatgcgcccgataccaaggtgcagaacctgttcagtacctcgttcatgggcgccgcgcgcgaagatcatcccttgttcgatgaggagatcagcgccgagcgttttgccgcctgcgaccacatcgcggtgtcgcgccgcggcttgccgcgtggtccgatcgacgatgatctggccgcgctgggcctgcagcggcgggtggcgctgatcagcccgaccttccacggcgcgatcttcgcggcggccgaatcggacctgatcctgccgcagatgccgagcgtgatgctggagcggatcgtcagcatgcgcctgccgctgcgcctgttcccgctgccgatcccggtgcggaccgccgccatcgtgcaggcctggcatccacgcctggacaacgacgccgcccaccagtggctgcggcggtcgatcaagaccatgtgcgaaagcgcaggggaggccccgcgctga

SEQ ID NO: 498041 - DNA, 1413 bp, Stenotrophomonas maltophilia
atgagcgcagtcaccgtgttccgcaccttcgttgcggccagcctgtgcacggccctggctgcctgcacgatgggtccggacttcgtacgcccgcaggcggaactgcccagccactggcagggtgaggccgtcgccggcaacgccatcgaccaggacgcggcctggtgggccggtttcgacgatccgctgctggggcagctggccaaccaggtgctggcggccaacctggacctgcagctggcggccaaccgcgtgcagcagagccgtgctgcacgcggcatcaccgccgccgatcgcctgcccagcgtcagcgcgagcgccagtggcgtgcgtgcacgcaacagcgaggtgggcctgaatgatccgtccggcaacggcggccgtgatgactacgggctgttccagaccggtatcggcctgagctgggaactggacctgtggggccgcgtgcggcgccaggtggaagcggccgacgcgcgcgtgcagatggccgaggaggatgcacatgcagtgcgcatcgcgctgctggcggaaaccgcgcgtgattacctgcagctgcgcgcgacgcggcagctgctggcgatcaccgaggacaacctcagcatcgcccacgacatcaaacgcctgaccgaagcacgccaacgccagggtgtggccagcacgctgcaggtgtccagcgcggccgcgcaggtggcatcgctgcaggcacgcatcgcgccgttgcggcatcgcgaatcgcagctgcgcaatgcgctggcgttcctgctggcgcagccgccgcaggcgctggacgcgcagctgcaggatgcacgccgtgactggccggcgttgccggccgtagcggtggggctgcccagtgaactggccgagcgtcgcccggacatccgtcgtgccgaagcggcactgcatgcggcaacggcaggcatcggcgtggccaaggccagtttcctgccgcgcatcaccttgaatggcgacgccggcttccaggccaagcagctcgatgatctggatggctggaacgcgcaccgtttcagcatcgggccgtcgatcagcctgccgatcttccagggcggacggctgaaggccaatctcgcgctgagcaggctgcagcagcaacagtcggccctgcagttccgccgtaccgtgctgcaggcatggcacgaagtggatgacgccatggatggctacagtgccgagcagcagcgcacggtgcagctgcacgtggcagtggatgagagcgagacggcactgggggcggcgcgccggcagtaccaggccggcgtggtcgacatgctggacgtgctgaccacccagcgcatcgcactggacaaccaggccgcgctggccaacagccaggccaccgccgcgatcgcgcgtgtagagctgtaccgcgcgctgggcggaggctggtag

SEQ ID NO: 498042 - DNA, 3594 bp, Stenotrophomonas maltophilia
atgactgctgcaaagctctgccgttcgaccgtttcgcgccgttctttcctcccctcgccgctggcttcggcgattgtcggttcgttgctgatggccaccgcgctgccggtactggcccaggacagtgacgacgccctgacccgttaccagttgcagcgcagcctgcagtcggcgttcgccgcgccgggcagggtgtcggcctctgctcctgcaatgatcgccccctcggtagcgatcccggtggcggcgctggctcccagcgtcggttcttccgtcgagccggtcatgggcaagcccggtgatgctgcgagctggcgtaccagtgaattcaacctcgactggggcctggccgcgatcaatgccgacgtggcctatgcgcgcgggctgaccggcgccggcatccgcctgggcgtgttcgacagcggcacgggcctggaccatccggaattcgccggcaaggacaaccgcagcatccgcatcgcagacctgatggccgacggcacgcgttgcaccaacaccagcgcagtgcgcgggccggcggcctgcttcgccagtgatggtgatgacgtccagatcagctatgtcggctacaacgccaatgtccccgacaacatccgcaggatcatcgagtcgggtccctatgtgcagccggggatgcagttcgagatccatggcacgcacgttgccggcaccatcgcggcgaaccgggacggcaacgggatgcagggcgtgtccttcggctcggacctgaccgttggccggttgttctccgacagcatcagggagtggcagcggaccgcgacgggctattcggtggtgacgctgggcgcgatcggtccgaaagtcagcgccttccaggatctgtatgctcagatgaacgcgcagggcgtgcgtgccatcaaccacagctggggcctggtcacggaaccgtcgacagcgacggacatggacgcgatctacaacgacccggacgaccgccagtacctgaacacctttgccgacggatcgcgtgcgcgcgggatgatccaggtgtgggcggccggcaataccagttcggtcattccgacgcctgcgcagagccccatcgccggcctctacgccacgctgccgcgcgcgttcgccgacatcgagccgtactggttgagcgtggtcaacgtcggtaccaatctgaccctgagcaatcgctccaacaagtgcggcctgagtgccaactggtgtcttgccgcgccgggttcggacatcgtatcgaccgcctatggtgatgattccagcctgtccggcagcatcggcatcgacgccaacggcaacgtcagcctggacatccagcagcgcgtgcctacctatggctatgcactgctgagtggaacgtcgatggccgccccccacgtcaccggcgcgctgggcctgctgtttgaacgcttcccttatctggacagcgctcaggtgcgcgatgtgctgctgaccacgaccaccgatctgggcgcgcccggcatcgacgacatctacggttggggcctgttgaacctggccaaggccatcgagggatacggttcgctgcgcgtggacaccaacgtggtgatgaaccagcgtgcaggtggcctgaaagtgtgggaaggcgatgcctgggacaactggaccaacgacatcggcggccccggcaagctgaccaagagcggcatcggctggctgcgcttgagcggtaacaacagcttcaacggtgcgttggtgcgcgagggcatgctggaactggatggcgtcaatacgctcaccggagcggtggacgtggccggcggtagcttcctgctcaatggcacgttgaagaacaccgcgctgaacagcctggggggcaccagccaaatcaatgcccgcggtgtgctggatggctcggacctgaccgtcaacggcggcgtggtgaccttcgacggtgcgcagcgcggcgcccacaccttggtggccgagcagggaacgttcgagttgaacggaaggctggacagcagcacgttgaccagcctgggcaacagccgcgtgaacgcgggcggcgtacttgcgggttccgacctgaccgtcaacggcggcgtgctgtcgttcaacggcacacagaccggtggtcacaccctcgttggcccgaagggcacgctgaagggcatcggccagctgggcgataccaccgtggccggtatcgttgcaccgggcaattcgatcggtacgctgaccatcaacggcaactacgtgcagaccgccaccggtgtgtaccaggccgagctggctccgggcgggcgcagcgaccagttgcgtgtcaccggtaccgcgaccctgggaggcaccctgatcgcgctaccggaagcgggcacctattaccttggggagcagttcaacttcatccgtgccgacggcggaatcagtggccagttcgccaccactgacttcagtgcgttctcgccgttcctgaagttcggcctggcctacggcacgggtggcgcgcgcattgaagtgacccgtggcaatccgcttgccagtgccgccagtaccgacaaccagcgtgcggtcgccactgtggccgacggcctggcggtcaaccagggcctgccacgaccgctgaccctgctgttccctcagcaggtgggcgctgcactggatggcctcagcggcgagctgcatgcggccaccgcaatggccctggtcgagggcagccgctacgtgcgtgatgccgcgctgtcgcgtcgcgtcggtgcgcgtgccccgggcgcagacggcgaagccgccacgggggtctgggtacaggccatcggtggcagcactacgctggacggcaatggcaacaccgcacgcaccgaagccaacagcagcggcctgctggtaggcgtggaccgcgagatcaacggttggcaggtgggcgtgctggccggtaccggacgtaccgatgccaagcagcaggaaggacgccgtgcgcgtgccaaggtcgacaacacgcacctgggggcctatgccagtcacgactggggcgccttcggcctgcgtggtggcctggcctggagcgagcatgaggtgaagagcacccgcgagctgggcttctccggctacaccgatacgctggcggcccgctatgacggccgtacccggcaggcgttcatcgaggcgagctatcgcttcggcgaccgcgaggcggggctggaaccctacctgcagctcgcacgtgtggaagtggacatgaagcgcatcaacgaacgtggtggcgctgccgcactgcagggcgaggtggacgatctccgtaccacggtcgccacggccggtctgcgattcgacaagggcctgaaggcttcgttccaacaggacagctggctgcacctgcgcggtggcgtcgggtaccgccaggccagcggtgatcgcgacccggcggcccgcttcgccttcgccacgggtagcgacagcttcgtggtcagcggcgccccgattgctgacaggacggtggttgccgaactgggcctgtcggcatggttgaccgcgcgccagcagctggagctgggctatagcggccagtatggcgacgaaagccgcgatcacagtgcgaacctgcgctggtcggtacgtttctga

SEQ ID NO: 498043 - DNA, 333 bp, Stenotrophomonas maltophilia
atgggccggggcgacagcgccaccatcgatctggcgccattcgtggtcgctgggaggatcaaggggccctctggccagatctacaccgacgcgtccgggcgaatcatcaaaggcattacgctgcggctgagcggcgcctgcatctcgcgaaagcagatgggtcgtcgctaccccgacttcaatgtcctttccgtgccgtcagggcatagcctggacgagtcgacggtgttcggcacagtagtgaacggcatccagatcgggttctcattctccgaacatgaccgcgactgcatggaccagctcaaattgagctggcctggggagcgcttctga

SEQ ID NO: 498044 - DNA, 669 bp, Stenotrophomonas maltophilia
gtggtgatcaccgccaacgtgcgcgagcgcgatctgggcgggttcgtcggcgagttgcgcacacgcatcggccaggatgtcgcgcttccagagggctactggatcgattacggcggcaccttcgagcagctgatctcggccacccaacgcctgggcgtggtcgttccggtgacactggcgttgatcttcgctctgctattcatggccttcggctcggccaaggatgcggccattgtgttcagtggcgtgccgctggcgctgaccggcggtgtgctggcactggctctgcgcgggattccgttgtcgatctctgccggcgtgggcttcatcgcgctgtcgggcgtggccgtactcaacgggctggtcatgatcgccttcatccgccgtctgcgcgaacagggcgatccgctagacgacgctgtgcgcgacggcgcccttggacgcctgcgaccggtgttgatgaccgccctggtagcctcgctgggcttcctacccatggccttgaatgtcggtgctggctcggaagtgcagcggccgctggccactgtcgtcatcggcggcatcgtctcatccaccgcattgaccttgttggtgctgccggtgctctatcgttggctgcatcgcgaccgagctccccgcgccggtagcactgctttggagtccccatga

SEQ ID NO: 498045 - DNA, 1098 bp, Stenotrophomonas maltophilia
atgtccagcgtgccatcacctaaccgggtcctgctctcggcagccggctcgggcaagaccacgttgctggtccggcaggccttggagcgacctgagcgccgcatcgcgattgtcacctacacgctggaaaacctggaagagatccggcgctcgtttgaggcccacgcaggcgcggtccccgcgcatgtcaccttgcacagctggtatggctttctgctgcgccagtgcattcgcccgtaccaggctgcgctttgccctgagcctcgcatcgagaccatcctgttcgtagaaggtgtcaccaacaaccgcgccccacgcacccaggtggcgcgccactacctggcgggcaaccggatgtattcggaccgagcggccgatttcgctgtgcgctgcgatgagctgacccaaggccaggtcgtggcgcgattggcggcgatgtacgacgagctctacatcgacgaagtccaggatctggccggctttgatctggatctggtcgaacggctgttgaagagcgagattgccatcacgttggtaggcgatacgcgccaagccacgtatgcgaccaactatgcgcaaaggtacagccaataccgtggtccgaatctggcagcgctgtttcagatttgggaggccgacggcttatgccggctggatcaccgcctcaccagtctgcgctgcgtccaggccctgtgcgatatggctgacacgctctatccgcagatgccgcggacccaatcaggcaatggcgaggtcaccggacacgatggcatctacctcgtcgctccaggggatgtggccgcgtacatgcaggagttcgcccccaccgtgctccggcatgaccggcggcaggcgtgcgacggactgccggcggtgaactttgggcagtgcaagggccgcacctacagtcgggtcctcatctttccgaacgggccgttgacgcagtacctgcgcacggccgatgcagcgcgtatcaccgcgccgccgaaatactacgtggccttcacccgggcgcggcaaagcgtggcctttgtgtatgccggcgcgtgcgcgttgccgggtcatcagctctatgcgcctgccagcgcagacgcatag

SEQ ID NO: 498046 - DNA, 1581 bp, Stenotrophomonas maltophilia
atgccgatcgaacgtatcgtcatcgacaacttcaagtcgtttcgccatctggacctgcccctcaatgcccacatgaacctggtggtgggcgacaacgaggtcggtaaatccaccctgctggaggccatccacgcggtggtcaccggccagctgcatgggcgcaatcttgcctacgagctcacgccctacctgttccaccagcccacggtgcaggagtacttgggagcgcttgccacgggcacgccggcctcgccgccacggatctccatcgaagcctatctgggcgccgacgccgcgctggcgtcgttacgcggcaccaacaactccctgcgtctggataccgccggcatccggctgctggtcgagctcaacgacgactaccgcgaggagttcaacgcctacctgcagcagcaccagggcgcggtcagcctgccggtggagtactacacggtgcgctggtactccttcgccaacaatggcgtcaccgcccgtagtattccgttcgactcgaccatcatcgacacgcacggcatcaagaccttgtccggtgccgatcgctatatcgccggcatcatcgagcaggcactgacgcctgcgcagcgcgtctcgctgtcgctgagcttccgccgcatgcggcagagcttttccgaagaagcggatgtggcagcgatcaatgcctacttgaccgagcacaccggggacatcagccacagggcattgacggtaggcgtggacacatcgccgcgctcaacgtgggaaaccagcctgtcaccctacctggatgagctcccgttcacccaggccggcaagggcgagcaaagcgcggtgaagatgaagctggcgatgcacgcggccggcgcggctcacgtgctgctgatcgaggagccggagaaccatctgtcctattccagcatgacccagctgatcgacaagattgcggccctctccaccgcccagcaggtgatcatcgccacccacagcagcttcgtgttgaacaagctgggcgtggacaacgtgatcctgttcagcgcgcaaggccagatgaagctggaccagctgcccagcgatacccacgactatttcatgaagctgccgggccacgacacgctgcggttgatcctggccaagcaggcgatcctggtggaaggcccttccgacgaactgatcgtgcagcgtgcctacagtgaccatcacggcgtggcgccgatggctcacggcgtagacatcatttcggtcaagtcgttggcattcaaacgcttcttgcagattgccgatcgactgaggattcaggccaaggtgatcaccgacaacgacggtgatatcgcagttgtgcaagagcgctatgccgagcacatcaacgcgatctattacgattccgacgagagcgccccttcgctggaagagcagctgatcaaagccaactcgctggccgaactcaataccgtgctgggcaaggcctttgccgatgaggtggcgctgctcaagtacatgaagggccataagaccgatacggccttggcgattttcaatagcccgcactcgatcaggttcccggactatgtccagcgtgccatcacctaa

SEQ ID NO: 498047 - DNA, 1053 bp, Stenotrophomonas maltophilia
atggcgcgcgcaggactctataagagtgacgtccagaaggcgcgcgacgcgctgctggcccaacgcaagaagccgtcagtcgacgcggtgcgagtggccttgggcaacacgggctccaagaccacgatccaccgctacttgcgtgaactggaaggagaggaaggcggcggtccggcgaggacggtagccgttagtgatgctttgcaggacttggttgcgcgcttggcctcgcggctccaggaggaagcagaggccatcctcacccaggagcgtgagcgccatcaggctgagctccacagtcggcaacaggcgctttccggtgcccaagaggaggctgccgccttgagcagtcggctgcagcgcaccgaagcaagcctgcaccaagagcaagctgctcacgccctccttcaacagaatctaggtgacaggatcgcggaaatcgcccagttgaacgagcgcatcgctggcatgacggtgcggctggctgatcatgaggcgcatacgcgttctctggaggacaagcatgcccatgcccgggaagcgcttgagcactaccgcacttcaaccaaagagcagcgtgagcaagagcttcgccgtcacgagcatcaggtccaagagctgcaagtagccttacgtcaggccaatgaagccttgggcgcgaagaatcaggagctgttggtgctgaaccgcgacaatggtcaatggctggagcgccacgggcggattgagcgtgagcttgcccagctacgacaggcccacgaaggccaacacagcgaggtcgtggcgttgcgccagaccgcgacggactatttggcactgcaggagcgctggaagactgacgccaagaccttggataccatgcgcaacgagctagctcaagttcaagacacccttgcgcgggagcgtgagcgccgcgagagcgctgaagccgatgcgttgcgtgccaatgcacgtcttgaagcgctagagcctctactgaatcaactgacgccagcacaaaatgcggtgaagaaaactcggcgcggccatgcgcaagatgggggagccgactga

SEQ ID NO: 498048 - DNA, 741 bp, Stenotrophomonas maltophilia; identical to SEQ ID NO: 494233

SEQ ID NO: 498049 - DNA, 210 bp, Stenotrophomonas maltophilia
atggtcgccatgcccagtgccagccttttcaatcgatgtggcatcgggatgatgctcagcactgtgatgggcgaagcagtcttcgtcgacttgcaccgcggcagccacttcgctggcctgctcttccatgaccgggttcatactgacggacgcaaacgccgaccacgcgccgttaagcacgagcatggcgatcaggaacagtcgcagtag

SEQ ID NO: 498050 - DNA, 330 bp, Stenotrophomonas maltophilia
atgctcattgcgggatcgtctagacgtttgcagactatcgccttcccctcccctcctgtccagactgctatggcctccgcgatcacacaaattcttggtcgccccaatgcttgcgagaacgcacttgagatacgccgcggctacctcaaggcgatggaagatgcgctgcgggtttcgcttctgatccaccaagatccaaggcttctgttcgacacgtgggccagactgctccccttgatcgctcaaagccacgagagtgacggcagccagccatttgcgaccgggatcgtccgctcgcgcgatcatggatcccggcggttggctggctga

SEQ ID NO: 498051 - DNA, 2967 bp, Stenotrophomonas maltophilia
atgccgcgtcgcttgatcctctcggccacggagcggggcaccctgctcgcgttgccagaaagccaggatgacctgatccgctactacaccttcaacgactccgacctgtcgctgatccgtcagcggcgcggcgacgccaaccgcctcggcttcgccgtgcaactctgcctgctgcgctaccccggctatgcgttgggcactgacagcgagctgcccgaaccggtcatcctgtgggtggccaagcaagtccagaccgatccggcgagttggacgaagtacggcgagcgcgatgtgacccgtcgcgagcacgcccaggaactgcgcacctaccttcaactggccccgttcggcctgtccgacttccgcgccctggtgcgcgagctgaccgaactggcccagcagaccgacaagggcttgctgctggccggccaggcgctggagagcctgcggcagaagcgacgcatcctgccggcgttgagcgtgatcgaccgggcttgctcggaggccattgcacgggccaatcggcgggtctaccgcgccctggttgaaccgctcacggactcgcatcgggccaagctggacgagctgttgaagctcaaggccggcagcagcatcacctggttgacctggctgcgccaggcaccgctgaaacccaactctcggcacatgcttgagcacatcgagcggctgaagacatttcagctggtggacttgcccgaagtcctgggccggcacatccaccagaaccgcctgctcaagctggcccgcgagggtgggcagatgacgcccaaagacctcggcaagttcgagccgcagcggcgctatgcgaccctggccgccgtggtgctggagagcactgcaaccgtgattgatgagctggtggatctgcacgaccgcatcctagtcaagctgttcagcggcgcgaagcacaagcatcagcagcagttccagaagcagggcaaggcgatcaacgacaaggtgcgcctgtactccaagatcggccaggcgctgctggaggccaaggaagccggcagcgacccctatgccgccatcgaggcggtgatcccctgggacgagttcaccgagagcgtcagcgaagccgagctgctggcccggccggagggcttcgaccacctgcacctggtcggcgagaacttcgccaccctgcgccgctacacgccggctctgctggaggtattggagctgcgcgccgccccggccgcgcagggcgtgctggcagccgtgcagacgctgcgcgagatgaacgccgacaacctgcgcaaggtgccggccgatgctcccaccgccttcatcaagccgcgctggaagccactggtgatcaccccggaaggcctcgaccggcgcttctacgaaatctgcgccctgtccgagctgaagaacgccctgcgctccggcgacatctgggtcaagggctcgcggcagttccgcgacttcgacgactacctgctgccggccgagaagttcgccgcgctcaagcgggaacaggccctgccgctggcgatcaacccgaacagcgaccagtatctggaagagcgcttgcagctgctggacgagcagttggccactgtcgcccgcctggccaaggacaacgagctgcccgatgccatcctcaccgagtccgggttgaagatcaccccgctggatgcggcggtgccggatcgggcgcaggcgctgatcgaccagaccagtcagttactgccgcgcatcaagatcaccgaactgctgatggacgtggacgactggacgggcttcagccgccacttcacccacctgaaggacggggccgaggccaaagaccggacgttgctgctgtccgcgatcctcggtgatgcgatcaacctcgggctgaccaagatggccgagtcgagccccggtctgacctacgccaagctgtcctggctgcaagcctggcacatccgcgacgagacctattcggcggccctggccgagctggtcaaccaccagtaccagcatgccttcgccgcccactggggcgacggcaccacctcatcctccgatggccagcgtttccgggctggcggccggggcgagagcaccagacacgtcaacccgaagtacggcagtgagccgggacggctgttctacacccatatctccgaccagtacgcgccgttcagcacccgcgtggtgaatgtcggcgtgcgcgattccacctatgtgctcgacggcctgctgtaccacgagtccgacctgcggatcgaggagcactacaccgacacggccggcttcaccgatcacgtcttcgccctgatgcacctgctgggcttccgtttcgcgccgcgcatccgcgacctcggcgaaaccaagctgtacgtgccgcagggcgtgcagacctacccgacgctgcggccgctgatcggcggcaccctgaacatcaagcacgtccgcgcccattgggacgacatcctgcgcctggccagctcgatcaaacagggcaccgtcactgcctcgctgatgctgcgcaagctcggcagctatccgcgccagaacggcctggccgtggccctgcgcgagctgggccggatcgaacgcacgctgttcatcctagactggctgcaaagtgttgagctgcgccgccgcgtgcatgccggcctgaacaaaggtgaggcgcgcaactcgctggccagggcggtgttcttcaaccgccttggggaaatcagggatcggagcttcgagcagcagcgctaccgggccagcggcctcaacctggtgacggcggctatcgtgctgtggaacacggtgtacctggagcgcgccacccaggggttggtcgaggccggcaagccggtggacggcgagctgctgcaattcctgtcgccgctgggctgggagcacatcaacctcaccggcgattacgtctggcggcagagccgcagactggaagacgggaagtttcggcccctacggatgcccggaaaaccttag

SEQ ID NO: 498052 - DNA, 561 bp, Stenotrophomonas maltophilia; identical to SEQ ID NO: 96023

SEQ ID NO: 498053 - DNA, 990 bp, Stenotrophomonas maltophilia
atgagcgctttccggccggatggatggacgacgccggaactggcccaagcggtcgagcgcgggcagcttgaactgcactaccagcccgtcgtcgatctgcgcagtggtgggattgtcggcgcggaagccctgttgcgctggcgtcatccgacgcttggactatttccaccgggccagttcctgcccgtggtcgaatcgtccggcctgatgcctgaaatcggcgcttgggtgctgggcgaagcctgccgccagatgcgtgactggcgaatgctggcatggcgaccgttccggctggccgtcaatgtttcggcgagccaagtgggaccggacttcgacgggtgggtaaagggcgtgctggctgatgccgagttgcccgccgagtatctcgaaatcgagctgaccgaatcggtcgcgtttggtgatccggcgatcttccccgccctggacgccttgcggcagatcggtgtgcgcttcgccgccgatgacttcgggacggggtattcctgtctgcaacatctgaagtgctgcccaatcagcacgctcaagatcgaccaatcgtttgtcgccgggctcgccaacgaccgccgcgaccaaaccatcgtgcacaccgtgattcagcttgcgcacgggctgggcatggatgtggtggctgaaggcgtggaaacatcggcgagtcttgatctattgcgacaagcggactgcgacacaggacaaggcttcctgttcgcgaagccaatgccggcggcggcattcgccgtcttcgtcagtcaatggaggggtgccaccatgaatgcaagtgactcgaccaccaccagttgctgcgtgtgctgcaaggaaatcccgctcgatgccgccttcaccccggaaggcgcggaatacgtcgagcacttctgcgggttggagtgttatcaacgcttcgaagcgcgtgccaagacagggaacgaaaccgatgccgatccgaacgcctgcgactcgctaccgtcagattga

SEQ ID NO: 498054 - DNA, 237 bp, Stenotrophomonas maltophilia; identical to SEQ ID NO: 96025

SEQ ID NO: 498055 - DNA, 366 bp, Stenotrophomonas maltophilia; identical to SEQ ID NO: 96026

SEQ ID NO: 498056 - DNA, 1686 bp, Stenotrophomonas maltophilia; identical to SEQ ID NO: 350724

SEQ ID NO: 498057 - DNA, 276 bp, Stenotrophomonas maltophilia; identical to SEQ ID NO: 325094

SEQ ID NO: 498058 - DNA, 351 bp, Stenotrophomonas maltophilia; identical to SEQ ID NO: 331798

SEQ ID NO: 498059 - DNA, 435 bp, Stenotrophomonas maltophilia
atggaaaacaatttggagaacctgaccattggcgttttcgccaaggcggccggggtcaatgtggagaccatccgtttctatcagcgcaagggcttgttgctggagcctgacaagccctatggcagcatccgccgctatggcgaggcgaatgtaacgcgggtgcgcttcgtgaaatcagcccagcggctgggcttcagcctggatgagatcgccgagctgctgcggctggaggatggcacccattgcgaggaagccagcagtctggccgagcacaagctcaaggacgtgcgcgagaaaatggctgacctggcgcgcatggaggccgtgctgtctgagttggtgcgcgcctgccatgcgcgaagggggaacgtttcctgcccgctgatcgcgtcactacagggtggagcaagcttggcaggttcggctatgccttag

SEQ ID NO: 498060 - DNA, 279 bp, Stenotrophomonas maltophilia
atgatcgatccgttcattgccttcgtgctgctggcggccatcgttgccgtatccattggcagcgccaaactcgtttcgtggtgcctcgaccggcggggggagtccgcccgtcgcagcgcacacgaagcggccttcatagcccaggcacgcaccgaactggccgcaactggctggaccccgaatcacgaaacgctctatcaggccgaaatcgccgccaccaagcgcggcgatctgctcgctgccgctgagctggccgaagcacaggagcgagtcgcatga

SEQ ID NO: 498061 - DNA, 177 bp, Stenotrophomonas maltophilia
atgaacatccattcctttgccgccgaacttgcgcagaccgatatgggccttttcgcatgcgctgtgctggtggtcgtctgcctcggcggcgcaatcgcttcaatcgtgattgagcaggcatggcttgggatccgtcgcctgtggatgctctggaaggggcgcgccaatggtcggtga

SEQ ID NO: 498062 - DNA, 1152 bp, Stenotrophomonas maltophilia
atggcttgggatccgtcgcctgtggatgctctggaaggggcgcgccaatggtcggtgatcgcgcggtgccgggcgggtcgggactcccctcgtctaacaggggagtcagtgaattcaggaaccgagggcaccctgacggtcggcattgactggttctccgcttccatcgatctgcgcgcagcgctggacgaactcgcgttccgtgatggcgacagcttcgaagaggtccgccagtggattgagttctccccggagaatgcgcgcattgcggccctgcaggtgttctgctggttcttcgccgggcttggcctagaactggatgaagccgtgggtggcggtcgcttctacacgtggcgaatcaagatcatcgacgcggcaaagaagttcgtcggcatgatcgaattgggtggcgaagattgccgccgtgccgatggcacgtataccgctcgcatcgagctaactggtgatggatgcaaggcgataggcgcagcgcgctgcggccatgcgcagcggtggctggagcttcgagcgaagctcgaaagctgcgccggaaggatcacccgcgtcgatgtgtgcgccgatgacctggtgggcgactacccattgcgcatggcgcaaaagtggtacgccaatggcgacttcgacaaccgtggtcagcgccccaaggcgcagttggtggacgactacgacagcggtgacggcaagaccttctatgtgggcggcaagaagtcggagaagcaactgcgcgtctacgagaagggcagggaacaaggcgacaagagttcgccgtgggtgcgctacgaggcgcaattccgcaactccaaccgcaaggaattgccgctcgacattctgcgtgatccggcgtcctacctgctgggtgcctatccggtcctgtcctttctgcgctgtgttgctacgcgcatcgaaatcacgaaagccgccgttgaggcgacgtggaagagcgtccgtcgccacatccgccgccagtacggcgcggccctcaatttcatcgccaagaactgccctgacgatcaggcgttgcgggcggtaatcgaatcctgcacttcgccatcgctgccgaagtgggtcacaggtgacacagcagcgcaatggcccgaaatcgcggccgtacagcaaacctcaaaggggtaa

SEQ ID NO: 498063 - DNA, 300 bp, Stenotrophomonas maltophilia
atgatcaaggtcaccgtactggattcgcagatcaacgagcgtggcggcagcttcaccaacgaccgcaacgagaacgttgaattcaccacccgcaagcagcgcgccaagctggaggcggacggtttcgcctatccgttcgacgtgcgcctggacaagggtcagccgggctatcaggcgggcgagtacgagctcgacgtcccggccatgttgcaggtcaacaagggcgttgcaaccctgagcaagttcaccgtgctgcgcccgctgcagaaggctgcgccacgcccggcagcgcaggcctga

SEQ ID NO: 498064 - DNA, 2331 bp, Stenotrophomonas maltophilia
atgaacagcagcgaactcacgcccattgacgccgaccgcgtgcaggtcggcgactgtgtcattaccttgtcctcgcgtgaggtcgaggttgaaggcgcgcgccgtccgcggcggctgacgccgaaagcgctgggcgtacttcgcgtgttgatgcggcagcctgggcgcgtggtcacccgtgaagagctgtttgccgaggtctggcccgatacgttgccgaccaatgacgtgctgacccaggccgtcacccagctgcgcaaggcgttcgccaacgacgatgacaatggccaggcctacatcgagaccatcgccaagagcggctatcggctgctggtaccggtgcaggcgctggacgacttcgagccggtggcggaagtggacgcgctggccattgcggatgtgatgccgtcgcaggacggtgccggcatgattccggcgctggccgtgccggcagcgccttcacgccggcgcggctggcgccagctgcgccgccagctgttgtgggtgctgggtgtgatgatgctggccgcgctgctggtcatggccacattgttgctgcggcgcgggccggatccgagttcaccggtggatgcagcggtcgagaacggcgtgcgggtgatcggcagcccgcagcgtccctatcgcctgatcaccgccaccagtggttttgaaacctatcccacactttcgccggacggctcccaggttgcctacgaaggcgccaacgaggatggcgccggaggtggtgtgatcaaggtgcagacctcgggcaatgcgccggcccggcagctggcgctgccgcccaagggggccagtgaccgtttcccgagctggtcaccggacgggcgcgagatcgcttttgcccgctttggagccgacggcggttgccaggtgctgatcgccagcgccactggcggcggcgtgcgccaggcgacccgttgcgatggaaccgagctgctcagcttcgactggacaccggatggccgcggcctggtctttggcagcatggtgggccgctatgcccatcgcggcatccgtgtgctcgacctggccagcggccagtggcgggcgttggactacgcggtcgatcaggatgattttgactacgcgccacgctactcgcccgacggcaagtggctggtgttcgtgcgcaatccacagatgggcgacctgtggcggatgccggccggaggcggtgagctggagcagttgaccaacgaatccgccgaacagcgtggctgggcctggctgggcgatgggcgcagcatcgtgttcggccggcgcgtggacagcgaggtgcggttgtactacctggacgtggagcgccgcaccttgcgtgatgccggcctcgacgacgcacaatggcctgcggtgtcccgccacggcgacgtgctggccttcgttcaccgccgtgcccagttcggcgtgttcaaggtgccgatggccggcggcagcgccgagcgcctgttcgcgtccagtgggcgcgacgggcagccgatggcggcgcccgacggtcgccagctggtcttcacctccgatcgttccggcagtttcgcgctgtggtgggcggacatgcagcggcccgactcactgcggccgatcgagggcctgcgtccggaggggcggcaggcgccggactggtcggccgacagccgccagctgctggtggtcgggcgtgacgagcatgggcgtaccgttgtctacgagatcgccccgcgcgacgagcacctgcaaccgctgccggttccggtggatcagccgctgcaggccctgtacggggcaaccccggagcagctgctggtagtcgagcgcgatgcggagcaacgcacccggttgagcctgttcgatcgcagcgtgaccccctggcgccgcctggccagtatcgacggcgtctcccaggcgcgtttcgatcgcggcgatggccgcgtgctgttcacacgcctggcgtccggcggcttgtggtcggtggatgcggcactgtccccggccagcgtgcagcaggtcagtgaagaccggcccagccgatggcgctatcgcacctggacggtggcgggcaccggtggcatcgggtatctcggcaactcaaccgaatgcggtacgaccttgatccatatccaggccgggaccgaagctcccgagcgctgcctggaccggcagcggctcagcgcgggcaacggcatcagtgccagcgccgatggccgggacctgtacgtcgccctggcggtcagcgatggtgccgacatcggcgtcatgcagctgccccagtcgacgccggcactgttcccggcctttctcaagtcattgatcctgaagaaaaatatctcttcgtga

SEQ ID NO: 498065 - DNA, 2964 bp, Stenotrophomonas maltophilia
atgaacgttcgcacccctgccgtgcggctgggcctgctgcccgccggcatcgcgctggcgctggcaccggcatttgcttccgcacaggaagccagtgccccgaccacccttgatcgcctggaagtcaccggttcccgcatccgctcggtggatgtggaaacctcccagccggtcctcaccgtaagccatgaggacatccagcgttcgggcctggtcagcgtcggcgacctgctgcagaacctgtccgtggcaggcacccagaccttcagcaaggcggccgtgctggcgtccaacccggaacagggcggccagtacgtcagcctgtacaacctgggggagcagcgcacgctggtgctggtcaacggcaagcgctggagcaccagcctggccggcttcaccgacatgtcgaccatcccgacctcgctgatcgagcgcattgaagtcctgaaggacggcgcctcggcgatctacggttccgacgccatctccggcgtggtcaacatcatcctgcgcaagaacttcgatggcgccgaggccagtgcctactatggccagaacagccacggcgacggttccaagacccagtacagcctgaccctgggtgccagcggcgagcgctcctcgatcgtgttcggcgcgaactacatcaaggaagatccggtgtgggccaaggatcgtggcctgaccaagtactcctatggccagggccacaaggaagacggtctgagcccggctggcccgtggggtcgtttcaccgatccgcgtgccgaaggcaccgccggtgctggcgaatacaacaaggctggcaagtgggtcccgaacacctgggtggtcaaccacaccggttcctgggacaccccggtcggcgttggccagccgtcgaacaacttcaacaactaccacctgattggtctggacgactactacaacgcctcgcagcagatgatgctgaaccagggcgctgagtcgaagaccatgttcacctcggccagctacgacatcaacgacaacctgcgtctgaagtcgacggcgatgtactccgagcgcgattccaagcgccagatcgccggctacccgctgaccggcacctcgcagccgcagttcccggtggcgatcagcaaggacagcatctacaacccgctgggcaactgggccaacccgggcgccggcgttgacatcggtggctggggccgtcgtatcttcgaactgccgcgcatcacccagaacaacgtcaagtcgctgcacttcgacgcggccctggaaggcaacttcgacttcaacaaccgtccgttcgactgggatgtgggcatcaactacaaccagttcgacgtgacccagaccagctcgggcaacatcaacctgctggccctgaagaacgccctcggcccgtcgttcatcaacgccaacggcgtcgcccagtgcggcaccgctgccaacccgatcgcgctgggcaccagcccgggcagctgcgtcccgttcgacctgctgggcggcgccagcgccgcgaccccggatgcgctgaagtacatcaacaccctgctgaactcgaccggccagagcaagagcaagcagtacttcgccaacatcaccggttcgctgttcgacatgccgggcgatgcgggcgagttcgccttcgctgccggttacgagcatcgcgaagtgtcgggctacgatcacccggacgcactgtcctcctcgggttacaccaccgagctggccgcgcagccgaccgaaggcaagtacaagaccaacgagttctacctggaactgatggtgccgctgctgcgtgacctgccgggtgccaaggagctgtcgctggatatcgccagccgctactcggactacgacaagttcggcaacacggtcaacagcaagttcagcgtgacctggaagccgatcgacgacctgctggtgcgtgcgacctacggcgagggcttccgtgccccgaccctggacgacacgttcggtggtggttcgcagaccttcgacaagttcaccgatccgtgtgatgccgtgttcggccagcgcagcaacccggccgttgcagcccgttgcggtgctgaaggcctggcgtccgacttccgtcagaccgacgctgccggtcgtccgatcagtgcccgtgacacccagggtaacaacccgttcaactcgggtgtgggcaacgacaagctgcagccggaaaccagcaagacccgcaccgcgggcctggtctggagcccgagcttcgtcagcggcctgaacgtctcgctggactggtacaagatcactgtcgacaacgtgatcaccgcgctgtcggcgaactacgtgctgaaccagtgctaccagaacggtgtgcaggccttctgtgaccagtacagccgtggcgacgtcgccaacggccagcaggtcaccggcctgagccgcggcaacgcgaacctgggctcgctggaaaccgaaggctacaacttcggcgtcagctaccgcatgccggaatacagcttcggtaccctgtcgttcaacctggacaccaactacctgaccagcttccgtcagcaggctaccaagggtgctgcatgggatgactacgcaggctactggaactacccgcgtgtccgcggcaccctggccagcacctggaccaagggcgacctgtcggccacctggaccatgcgttactacggcggcttccgcgacttctgctacgaccaggaaaatggcctggagtgcaaccagccggattactacaccgagaacggtggctggagcggtggcctgggtgccaacaagaagggcgcgatcgtctatcacgacatctcggccacctggcaggccccgtggaacggcagcgtgaccgtcggtgcccgcaacgtgttcggcaagaccccgccgatcacctacgcggtgaccaacgccagtgccgtgcagctggacccgatgctggattacgaccgcttcctgttcatccagtacaaccagcgcttctga

SEQ ID NO: 498066 - DNA, 207 bp, Stenotrophomonas maltophilia
atgaacaacgcgatgccacgtatgtttgctgctgcagttctcgccgtcctgagcctggccggcagtgtgtcggccggtccgctggtgtgtgccaatggccgttattgcgcggaggtgcgcagcaactgcatcaaggccggtgaggatgcggcgcactgccagttcctgttcgagcgctgcgtgtacgaccactgcgcgcagccctga

SEQ ID NO: 498067 - DNA, 474 bp, Stenotrophomonas maltophilia
atgaaagtgtctgccctgccgttcgccctgttctgcatgctgctggttgcgccgttggcccaggcctctccttacgtcgacctgatcgactacccgcggcaggaagccaactgggaccgcttctttgccctggagggacgtctgcagtacgggttcgacgcgatctgcggcgataccttctgcgaaggcgagtacagcgatatccgcgccctgcgcctgcgctgctcggtggacgcggtacgcggcacggtgcatgagtgcctgtgggcatttgccgccagtgacctggctgtgtcgcggcatgacggtgcgatcgtcgcccggcaaccgacctggctgtgccgcctgccgctggagcctggcgcaccggtggaggccttccatgccgcgctcgccgcccgcaatccactgcatgacccgttgccggggacctcgcagagcgtctatgacgggctgaccgggtgcatccattga

SEQ ID NO: 498068 - DNA, 936 bp, Stenotrophomonas maltophilia
atgagcccgccgaacacgctgcccgccgccaatgacgatgccctggccgaacaggcccggggctggattgcgtggctggcctcgggtgacatcggcgagggacgcatgcacgagttcgagcgctggctggcagagccggggcaccgccgggccttcgagcacgagcgagcgctgtggcgcagtgtcgggccacgcccgcaggcccggtccgccgaacgccgccgcccgcatcgaatgcgctgggcgatggccgctgcagctgtgctggcgatgctggtggcatggccggaggcctggttgcggctgcaggccgaccatcgcagctcgcacgtcgtgcagaacgtaacgctgcccgatggcagccgcgcagtgctggatgcggacagcgcgatcgccgtgcgcttcgatgcgcacgcacgcgaggtcgagctgctgcgcgggcgcgtctggttcgaggtcagcccggatgcgcagcggcgtttcagcgtgcgtgccggcaatggcgtggttgaggacatctccaccgcgttcaccgtcgcgcgtggcgatgaccgggtggaaacccaggtcgggcaaggcagggtgcgtgtggccagcccggccgacggtggctggacctacctgcaggtgggccagcgcgccgtctatggcgagcgcagcggcgtgacgcgcctgcaggatgtggcggccgacagcgtgggtgcatggcgccagggcgagctgctgctggagcaggccagcgtcgccgacgccgtgcaatgggtggggcgctatcgtgccggcccgacgttcgtgcgcggtgatctgtcgcgactgccggcgatcagtgcggcgctgcgcatcgatcgcccggaacaggcgctggacgcgttggcggcgacggcaggtctgcaggtcacccgcctgccgctcggcgtcgccatcatccatcagtag

SEQ ID NO: 498069 - DNA, 684 bp, Stenotrophomonas maltophilia
atgcgccgttcccgcctgttgctgcctgccctggggcttgccctgctgactgcctgccagggccgttcgccggaacccggcaaggagccacccgccggtgacgcgcccagcgcggagaaggccgccgccgacggcaagatgcgctggagcgaggccgtggtctgggatggcgatctgaacgcatgccgccagggcgagaatgccgccacccgggattgcctgcgcgatgcgatgcgagcggggggagcaagcgccgaggcgatcaccgcggccgagcaactgtccagcgccggggaactggcgtatgtgaccgcctggcatgagaacgaggggctgggcattgccacggtcgagtatcccttccgggccaacaccaacgaaggcacccgcctggtcgacgccagcggcaagcgcatcgatgtggatgccgtacagctggacgacacgctgcgtgccgacccggccgtgcaggagctgttgaaggccaacccgcaggccacgccattcgcgccggcgcaatcggccggagcgacaccgctggagggcggcgggatccgcctgctgtaccgcacaccgctgcgcgactgccacgcctgcccggacgtgggccagctgcagatcgcctatgacttcgatgccaaacgcaacttcatcggccagcaggtggtgccggcgacgccgtaa

SEQ ID NO: 498070 - DNA, 1290 bp, Stenotrophomonas maltophilia
atgaagcggctgttcctgtggttgtggtttatcacgggtgcctgcttcctggtgtcggtgttcttcctcaaccacatcctggacggcatctacacgcccgtgcaggatcgcgtcttcgtccagcaggtgcgtggtcaggtgtacgccctgcgcagtggcctggccggcctggatgccgaccagcagcgtgagcgcctgaagcagtggcagccacactacggcatcgccctgaccctgctcgacaaacctcccgcactcgacgcgcaggaacaggtggccgtgaaggccgatggtttcatcgtgcgcgatcaataccagcaggtcctgctgcccatcgagggcagcgatggccgctggctgcacctgcgcctgcctggcgcggtgcagatgacgacgtacatgaccatcgccgcctacctcagcatcctgctgctggtgggcgccagcctgtacgcgtgggtgcgcctgctctggcgcgacctggaagcgctgcgccggcatgccgaccgcatcggttcgggcgatctgcaggcacgtgcgcaggtctcgccacgctcgcagatccgggtcatcgtcgaccactccaaccgcatggcggcacgcgtggccgaactggtgcagcgccagcgcgacctgacccatgcgatctcgcacgagctgcgcacgccgatcgcgcgcgtggccttcggcctggacctgatgcaggacagcgatgaccgcgaacgccgtgaacggctggcgcggggcctgcacggtgacctggccgagctcaaccggctggtcagcgaactgctggcttacgaacggctggagcatcccagcgagggcgaaccgatgcaacgcatcgaagccaacgactggctgcaggcctgcctggccgatgcgcgccgtgatgccgaacgtgccggcgtgatactgcgcgtgcagcccagcgcgttgccgcgggtggatgccgaaccacgcctgctgcagctggcactcagcaatctggtgggcaatgcgctgcgccatgcgcgttcgcaggtggaagtctcgctggtcggtgtcagcggccgcgcctgcctgcgtgtggatgacgacggtcccggcattgccgaagccgatcgcgagaaggtgatgcgcccgttcacccgcctggacgacagccgcagccgcgataccgggggcttcggcctgggcctggccatcgtcagccgcattgccgtccgccacggcggcgagcttcgcatcagacgcgccacgttgggcggcgcgcgcatggaaatgcactggccgctggctgccagctga

SEQ ID NO: 498071 - DNA, 738 bp, Stenotrophomonas maltophilia
atgcagccatccccctggacacccaccgccaacggtaccccgacccaggtcttgttggtggaggacgaccgtcgcctggccgaactggtcagcgactatctccacgaacatggtttcgccgtgcagcatgtggcacgcggtgaccttgccggcgcggcctgccgccagcatgcgcccgagctggtggtactggacctgatgctgcccggcctcggcggcatcgacgtgtgccggcagatccgcagtttctccgacgtgccgatcctgatgctgaccgcctgcgaagacgacatcgagcaggtgctgggcctggaatcgggcgccgatgactatgtgcacaaaccgatcgagccacgcctgctgctggcccgcctgcgcgccctgctgcgccgccgccatggcagcagcaacaccggtacacccagccgtctgatgcatggcgaactgctgatcgaccgcatgcagcgcgaagtgcacctgcacggtcaaccggtcgagctgggcaccacggaattcgagatcctgtggctgctggccagccagccggggcagatcctgtcgcgcgaccagatcctgcaggcggtgcgcggcatcggctttgacggcctggaccgcagtgtcgatgtcagcatcggcaagctgcgccgcaagctcggcgatgatgcgcgcgaaccgcggcggatcaagaccgtgtggggccgtggctaccagttcaatccgtcggcctggacggcatga

SEQ ID NO: 498072 - DNA, 516 bp, Stenotrophomonas maltophilia
atgaagcttcccgacattgacgtagtgattcaggcggtaggccaggacacgagttctgcttccatttcccggttgctccttgaactggaaatcggcgaggtcgacttccgtcgctatccgttcaacttggccggaaggcgaatatggaccgacagcgagggttcgctgcagttggaattcaaggacatcggcctgctgaaggacattccatatcacgatttggacgatggcccatgggtgctgaccgacgcgatcttctggggagtcaggaaaaacaagcgggcctacgctggatctctaccccacggactgagcttttccatgccgcgtccacatatcagggaccgacttggcgctttgggtgcagggaacgctgtcgagatgggcttttctggagaagtggatatctggtgggtcagcggtctggagcttgcggtggatttttctggtcccggagattcgattcgctgcgcctccgttggcattccggtggaccgtcctgatcgccgggcgtaa

SEQ ID NO: 498073 - DNA, 498 bp, Stenotrophomonas maltophilia
atgaatcatccagccattgaagagttcatcgctgcgatcggcagcgattcagaatcgcaggagctcgaaaccatattttcgaggatcggaatccagcttcagaatctggatgattaccgcatgggtgtcagtggtcaccggatctgggcagatgacgctgctggactgcagcttgaattcaaggatgccggtctggtctcagagaccgcctatcacgacatcgatgatggcccctggatgctcaccgacgtgatcttctggggctggcgaaatgacaccggcacccagtatgaagggccgatgcctttcggcctgaacttcctgatgtccagggaccagatcaggtcggacgcatctgtcgatctgggggcgccaacggtgtttggtctgtctggcaatgtcgacgcatggatgctcggaaagctggagctggctgtcgactacgacggtgaaaggggagtccgctgcgtcagcctggggctgccacaagaggaatga

SEQ ID NO: 498074 - DNA, 1008 bp, Stenotrophomonas maltophilia
atggacctacaggcgataacagccctgtttggcagaagcgccactgacccagccgtctcaacgatgctgcagtcgcttggcgtcaggcgaaggccagagctggcccggcctgccaaaagcccttacgaggcgattgtgcgtgtgagcgcgcggggcatgctgttctccttcagcgagcgcaactactggaacgggcgatccattgcttcgcacggcaagagcggtgagctgatcttcaccaacgttgcggtgacggccggcattccggatgtcatgcgcaggtacgaaggcgacctgctgtttggcctgcaatgggaggacgataggacgacagcgcgcgaaaggctcgccacggcgggctttggggacagcttgcacgccggcaggcgtgacgcgtggtggttgcctgactaccgcatccgtctgacgtatcaggctggatgcatcaaacaggcaggagcgtgtgggatctttgatatcagcttgggaattcccatgcatccattggcttgcgcaccggcaacgcgcgagtacccttcggcggagcaggtgctcgctgtcctcggcagatcgaccaatgaccccgatttccaggtcgcgttccgggaccttggtcttgcgagtctgatggcggaggcgagcagcgaggtcgttgatagagccgacgagcatggcttcatcctttactttgacagtaggcagggcgtgcccggtagccatccggtatgcaccggcatcagtttcgtccgcgatcgactgggaaactcaagagcctgggctgggccgctgccattcggccttcaattcgatgatccgccgtccattctcgaagagcgcatggatcaacgagccagtcgttggcttgatgaaggaacgtttggcagcgcgaggtggtcgctgcctggtcttcaagtgagcgtgaattttgacagtctggacaactgtctcgagtctgtccgtgtgatcgtagaaggtcatcgcacgtccaattgccagccgcgcggctga

SEQ ID NO: 498075 - DNA, 1182 bp, Stenotrophomonas maltophilia
atgttctccaaagaaatcttggtcgagatcaacgagaagagttggaagaagaagtctgtaccaccatgggggttgaaggcgcagccaaagcaaatagtcgacattggtcagtccctgcttctccttggtgcgctaacttcgccaaatgggctgtctgcagggtcgccagagaggtactgggcatgcgtcagatatttttctgcatgcgctgctaccgacgatcttcgaataagtcttccgttcacaaatttggatcctcaccagcgagggattctcagtgatgactttggagttgccctgtctgtaaattggctggtcgaacaactcggtggggcgaaaaatattgttgatggccgtcagttcatagtcaacatgggggtgaggaagagtaagaagaagatccctaaggttggtcctgggaagtgtccggattttgtcattgaagataagaatgggctcatgcatgtactcgagtgcaaaggtacccagagcggaagatcctatcttgatcgggctatggctacgggtaaggagcagaagaaggggatccgcattgagggagggctgcgtggggaaagccttgtcatcggtgtgctgctcagtgatgaaagaagtcgatcctcgtcgaggatagttgtggttgatccagagccgccggcactcactgttgttaatgcaagaaataaaggcagggctcaggaggtcatgaagcgacttagctttgctaaggcgattaatttgtccggattctcgcgtcttgcgttcgaagtagcttggccggattcgcaaggtatgggtgacactgagatgaaattacttacgccaatggagcggcgtagtgccatgtctgatccagatgatcgctggcgggcggttcaggcagaattggatctggagttggaggggctcaggcaggaagatcagggggcgttctcagtgaagaccgtgcaggttgaaatccctgcgattaagttggactcaggggaaattgcccgtcgcctaacaatacgcagaggtatcagcgctcctgcagtgcttgagttttctcaggacaaaagggatgtccgaagtgtgctggaacaagtggctccaggtgagcaggcaatttccatcgtcactgaaggcaatcattcgcgccttgattacggtgacctattcttcagtgaaatgatatttgactga

SEQ ID NO: 498076 - DNA, 2862 bp, Stenotrophomonas maltophilia
atgattcacctgcatcaccgcccgttggcggttgccgttgcgctgtgcgtgacggccctggcaccgttgggtgccgctgcgcagtccaccaccaaccttgatgcggtggaagtgaccggtacccgcatcaagcgcgctgaagtcgaaggccaggtgccgatccagacattgacgcgcggtgacatcgaacgcaccggcctgacctcgatcggcgaagtgctgcagcagctcaccggttccggttcggcgctcaacgccaagttcaactcgtccggcaacttcggtttcccgcccgatggcagtggcgtgggtgccggctcggcgcaggtcgatctgcgccatctgggggccaagcgcgtgctggtgctggtcgatggcatccgctgggtcaatgagtcgtccgcctccggcgtcggctcggccaccgatctcaataccattccgctggccatcgtcgagcgcatcgaggtgctggaagatggcgcgtcgtcgctgtacggctccgatgccattgccggcgtggtcaacatcatcacccgccgtgacttcgatggtgggcaggtgacgctgaactacggcgagtacagcaagggcgacggcacgcagaagggcgtggacctggcctggggcaagagtggcgaccgcttcagcctgttcctgggcgccagctggaccaagcaggatccggtattcgccaaggaccgcgagcagtcgcgcttcccgattcccggcaccggcctggcgttcggcagcggtggcattccgcagggccgtttcatgttcaccgacccgaacaccggtgcggtgcagaacatcgtgcccaataccggcgtgagcaatccgcgctacgacggcagcgccggctgcagccgcacggatgactaccactgcttcaccaccgccgaccgcttcaacttcgccgaatacaacatggtgctgacgccgtcggagcgcaaaggcctgttcggtcagttccgcttcgacatcaccgacaacgtgcagtggtacgtcaaggcactgggcaaccgtcgtgagtcgaccaaccaggccggcccggagccgctgttcttcggccccgatggcgcgaccggcaatccgctggccgacaacatcgtggtctcgcgcctgaatccgtacaacccgttcggcttcgatctggtttccggtgacaacatgagcctgatcggtcgtcgcccggtggaaggcggtgcgcgcgtgttcaagcagaaagtggacaccacttacttcgccaccggcctggtcggtgacttccatgccgccgaccgcagctggtactgggatgtcaacggcatgtacagcaagaacaaggccgaacagaccaactacggcagctatgacatctacaaggtgaacatggcgctgggcgatccgtccatctgtgcggccacgccgggctgcgtgccgctgaacatcttcggcggcgtcggttcgatcaccccggacatgctgaagtggatccagccggtggtgcgcgaccgcagccagaacgaactgagcctgttcaccgccaacctgtccagcgagctgttctcgctgccggccggtccggtatcgttcgccaccggcttcgagtaccgcaagtacaagggctcctaccagcccgatccgctgacggtgatcggccactacaacggcgcaccgtcgcagccgacctccggttcctacgacgtcaacgaggcctacctggagttgagcgtgccgatcttcgccgattcctcgttcggcaagaagctggacctgagcctggccggccgctattcggactactccacctttggtggtgaattcacgcccaagtacggcctgcgctggcaggtgaccgatgacttcgtgctgcgcaccacctacgccgagggcttccgcgcaccgtcgatcggtgaactgtacggctccgcggcgcgtgccgacctgcagctgttcgacccgtgctcggtgggtctgggcggcactccgccgcgtggcagcgccgccaactgtgccgcgctgggcgtgccggccggcttccagcaggccaactcgcagatctcggtgaccaccggcggcaaccgtgagctggagccggaacgctcgcgcagcttcagcgccggcttcgtgtggagcccatggttcggcaacaatgcgtcgtggtcggagcgcttcgacgtggaagtgaccttctaccgccacgccatcgatggtgcgatccaagcgatcaacgcgcagacccagctggacctgtgcgtggatacgctggacccggtctactgcgatggcatcacccgtgccagcaccggtgcggtcagcagcttcaacaaccgcctgaccaacctggggtcgatcaagaccgacggctgggacgtggatctgttctggaccctgccgcagacctccatcggccagttcaagctggcgtggaagaacaccttcgtcggccgttacgaggccaccggcgcggccgggcagaagcagccgcagaagccgggcgtggaagtggccgacagctcgattccggagtggaccagcaatgccagcatcggctggacgatggatcgctggagcgccaactggacggtgcggcacatctccgagctgaccgagaactgtggcgatgccgcggccttcccggtgtgcagcaaccaggcagcgggcaccaacacgctgtcggccaccaccttccacgacatgcaggtgggctacaagatcgactggatgaaggggttgcagctgaccgccggcctgaacaacgtgttcgacaaggatccgccgatctgcctgtcgtgctcgttgaacggctacgacgcttcgacctacgacatcccgcgtggccgctactggtacctgcgcgcggatctgcggttctag

SEQ ID NO: 498077 - DNA, 759 bp, Stenotrophomonas maltophilia
atgtcaggctccgggttggcggttgtaatggacttcgaaaaagcccgactgagcgccttcgaagttgaatatgatcgcgagatcagaaagtggcgcgcactttcgacaccggttcccgcacagattcaaatggccttcctacgaattctggatgcgacgtcagcctttcgagcgtcacctgaagacgcccacgcgatggcaggaggcggatcagtagtcgtgctgcatccagacaaccccggaaacaccaatggagtgaggtttcccgagtcttacaagtcctccaataccttcgacatcgtcgcctcagccacactgagaaccagacttggccagtatctagccacagaactggcaggagccaatacgggaagcccaacctggaacagcattgcgctctcgattcaacaagcggccctgaactgggcaggtctcaaaggtggcggatccatagcaataatgatcacatggcgtgacgggtcaaagacgctttatcgagtaacacccgacaacgtggccgaagccaagtatcagaagggcgaaagtcgcgacagcacaggcaacaaggttcctgacgactccatcgccgacccgatctccgccccttcgtacgccggacaatactatttcggccagcatcgtgacctggacaactgggtcagatccgcacagatgtatggagtccccgtccagcgcggaagcagcagccgcatctcgtgcagttgggatggtcgcacagtctactgccagcaatactga

SEQ ID NO: 498078 - DNA, 1221 bp, Stenotrophomonas maltophilia
atgaagatctatcttgtcggcggcgccgtacgtgaccgcctgctgcagcgccccgccggcgaccacgactgggtggtggttggcgccacgcccgcgcagatggaagcgcagggctacaccgcggtcggccgcgatttcccggtattcctgcatccaaagaccggtgaggagtacgcactggcgcgcaccgaacgcaaatccggccgcggctatcgcggctttgtggtcgatgccgacccgggagtgacgctggaagaagacctgcagcgccgcgacttcaccatcaatgcgattgcctgcgatgaggagaccggcacgctggtcgatccttacggcggcgtgcgtgatatcgagcagcgcgtgctgcgccatgtcggccctgcgttcgtggaagatccgttgcgcgtgctgcgcgcggcgcgcttcatggcgcgcttcgcgccgctgggcttcaccgtcgccgaagagaccatggcgctgatgcgcgagatcgccgccagtggcgaactggacgcgctggtgccggaacgcgtctggcaggaactgcgcaaggcgctggtcagtgagcggccctccgccttcctgcgcacgctgcacgatgcacatgcactgggcccgatcctgcccgagctggaagcgctgtatggcgtgccgcagcgtgccgaattccacccggaagtcgataccggcatccaccaggaaatggtcagcgacatggcggcgaagctggcccccggcgatgacctggtcggctttgccgcgcttacccacgatctcggcaagggcctgaccccgccggaggagtggccgcgccacatcatgcacgaacagcgcggcatcaaacccctgaaggcactgtgcgcgcggttgaagattcccgccgagcaccagcagctggccgaagcggtctgccgggagcacttgaacgtgcaccgcatcgacgaactccgcgatgccaccgtgttggaactactgggccgctgtgatgcgctgcgccggccggagcgcgtggcccgcatcgcactgtgctgcgaggctgacaaacgcggccggctcggcttcgaggacgccgactacccgcagggcgaaacgctcaagcgcctgcaccaggcggcgctgtcagtacaggcgcgggacctggataccacccatctgaagggcccggccatcggtgaagcgttggccaaggcgcgcgtaaaagccatcgccgccgcccgctga

SEQ ID NO: 498079 - DNA, 639 bp, Stenotrophomonas maltophilia
atgctgaaaccctccccctccctcactcacgtggcgttgatcgccttgatcacactggccgtttccggatgcaacaaggaacgctcatacccggtctatcgcgagaatcctgcacccaaggatgcgctaccgattgtgatccgggtccacgatgcgcctgtggagctcactctcccgaaggttttcgtctcctacgagatagacccgctctgcctcccaccgatcaacaactacgagggtgtgcagtacgccccccaacggcactcagtagagttcccagtacaacgcgtcagtgcaaccgagttcagcagcaccgtgttcgaggacggcatggcagtcgctgactattacgggcgcgggccatgcgaatggaaacccagcatcattcgagcttcattcccagtcatttccgagggacgcgaaggcttcatatcagttgccgtccaccatctcgaactgaagaaactactcacgtcggtttcgtacgcagacagtcaaatgaccctgcaaacaaagagttcgacgcctgggtgggtgcgaacgcagtcccagtatagctacaacagattgtctgatatcgagaagcagaagtactttgccatagagatatcgtctccttcgaaaggaatcgtcccatga

SEQ ID NO: 498080 - DNA, 1485 bp, Stenotrophomonas maltophilia
atgagacctctaaccaatgcagccctagccaatgcagcctactccccaccgtcacatccagctccaggcgataaggaatcgctgcgcgttgatggtgaagacttcgaagttctagggcgacgtgacgcagtcagcggctatcaaggcgttgtgtaccggaacatcaagaccaacgagatcatcatcgcccaccgaggcaccgagtttgatcgccaggccatgcttgatggcggcgtcgacgcagcgatggtcagcgccagagtcaacgcacagattgatgatgccctcgtactgaccaagcaggcaatcaagcaagctgaggaaaacggatatggtccggtgtacgtcactggacattcactaggcggcgcactctcgcagatcactgcccaccactacaatcttcctggcgacgccttcaatccctacggcgctgcggggctggcgtatcgcctgcctgaaggccagccggccaatgcggcgcccttcaccaaccatgtgatggcgggcgacctggttagtgcggccggccctcattacggcaaggttgagatgtacgtgctccccaaggaactgggagtcttgcgcgatgccgagcagggccagcgcatcgcctcgctcgtatcgcttgggatgaaaagcggccatgtcatgtccgctgcggttgcggtccagttgggtgattcccatcgaatggttcacttcattgaccgtatgaccgacaagggcccagtgcagtccgtactggacgaccccggggcgcggatcactgatgccgaggacctacgccggatagcggagtatcgcaaagacatccaccagttgcgcctgggggcgaccgtacttgtcggcggtggccctggactcctgcgcgacggggtcaattaccttcgcggcaccggggaagccggagcgtacgcccgtcgcgaagccgaagccgtgcagcacgcagaaagtgcattgaaggctggggagcgtccggtccaagaggcaaccgaaaagggctcgccctctctgagcaacccaggcttcgctcccaagagcccattgcaggagagcatagaatcaaccttggacaaggcaggcctggatccccgaaaggaaggccaccccgaccatgcgctctaccggcagattcgcgacggtgtatcggccgtggatgccaggcacgggcgcggcttcgatgaaaccagtgagcgcgtgacggccggcctgcttgcaacggccaagcgcagcggcctggaacgcgtcgatcatgttgtcttgggcaaccctcccagcgatggatcaggacctcgcatgttcgtcgtgcagggagcgttcgacaatccggcacacctgagggcatcgattgcggtcagcgaggcggtcaatacacccgtagatcagtcgctcgccaaggtcgagcagatttcgcaggcacagcaggtcgctcagcaagagcaaacccaagagcagacccgaacagcgatgcgcatgggctag

SEQ ID NO: 498081 - DNA, 138 bp, Stenotrophomonas maltophilia
atgccggccagcggccggcactacctggcatcagccctgcgcttcggccgctgcgcggaagaccagctgcatctgctgcggctggaacaggcgatggacgccctgccgcgtttcccctgggaaactgccgaacggtag

SEQ ID NO: 498082 - DNA, 3162 bp, Stenotrophomonas maltophilia
gtgcgccgcttcaatctttccgagtgggcgctggccaatcgcccgctggtgctgtttgcgatgctcgccttcgccttgatcggcgcgtggtcgtacaagcatctgggccagtccgaggatccaccattcaccttcaaggcgatggtggtgcgcacgctgtggccgggcgccaccgccgaacaggtctcgcggcaggtgaccgagccgatcgagaaggcgctgatgaacaccggcgagtacgagttcatccgctcctattcgcgccccggcgaatcgcaggtcatcttcatggcccgcgacagcctgcgttccaggcagatcccggacctgtggtaccaggtgcgcaagcgcgtgggcgacatccgtgcgacgctgccgcgcgagatcgtcggtccgttcttcaacgatgagttcggcgacacctacggcaacatctatgcgttgaccggcaagggcttcgactacgcggtgatgcgcgactacgccgaccgcatccagctggaactgcagcgcgtgcccgatgtcggcaagatcgacctggtcggcctgcaggacgagaaggtgtggatcgagctgtccaacacccgcctggccacgctcggtgtgtcgatgcagcaggtacagcaggcgctggccgaccagaatgcggtcaccggcaccagcttcttcgagaccgccaccgaccgcgtgcagctgcgcgtgaccggccagttcaacgacatcgaagcgatccgccagttcccgatccgcgccggtgaccgcaccgtgcacctgggcgacatcgccgaggtcaagcgtggcttcgccgatccggcgtcgccgaagatgcgcttcatgggtgaagaggccatcggcctggcagtggcgatgaaggatggcggtgacatcctcaagctcggcgccaatctcgatgccgagttcgagcgcctgcagaagaccctgccggcgggcatgcagctgcgcaaggtgtccgaccagccgcagtcggtggaagagtcggtcggcgagttcgtgcaggtgctgaccgaagcggtggtgatcgtgctgctggtcagtttcttctcgctgggcctgcgcaccggcctggtggtgggcgtgaccattccactggtgctggcgatgaccttcttcgtcatgcactacttcgacatcggcctgcacaagatttcgctgggtgcactggtgctggcgctgggcctgctggtggacgatgcgatcatcgcggtggagatgatggccaccaagatggagcagggttacgaccgcctgcgcgcggccagtttcgcatgggaatccaccgcgttcccgatgctgaccggcacgctgatcacggcggccggcttcctgcccatcgctacggcggcctcgagcaccggtgagtacacgcgttcgctgttccaggtggtgaccatcgcgctggtggtgtcgtggatcgcggcggtgctgttcatcccgtacctgggcgacaagatgctgccggacctgttcaatccgcagccgccgaagccgggcagcgtgtccgcgcgctggcacgccaagcgccagcagtgggccgatcgttatccggcgctggccaacctgatcgcgccgccgcagcacgggcacgaccacgacccgtaccagcgcccgttctaccgcagcttccgtcgcttcctcgatggctgcctgcgccaccgctggtgggtgattgccgcgaccatcgccctgttcgtgttctcgctgatgatgttccgcttcgtgccgcagcagttcttcccggattcgacccggccggaactgatggtggacatcgagctggccgagggcgcatcgctgcgctcgacccaggcccaggccgagaagctggagaagctgctgtccagccgcgagggcatcgccaattacgtgtcctacgtgggcaccggttcgccgcgcttctacctgccgctggaccagcagctgccggccaccaacttcgcccagttcgtggtactggccaaggacatcaaggcgcgcgaaagcacccgtgactggctgctgcacgaggtgattccgaagttcccggacgtgcagatgcgcgtgacccgcctggagaacggcccgccggtcggctatccggtgcagatgcgcatttccggcgagcacatcgagaaggtgcaggcgatcgcgcgccaggtcgaggccaaggtgcgcgagaacccgcacgtgatgaacgtcaacctggactggagcgagccgagcaaggtggtgcggctggtgatcgaccaggagcgtgcgcgggcgctgggcgtgagcagtgcccaggtcagccagttcctgtccagttcgctggccgggcagtcggtgagcgtgtaccgcgaaggcaaccgccagatcgagatgctgctgcgtggcccggccgatgagcgcaaccagctggagctgctgtccagcctgtcgatgccgaccgccaacggcggcagcatcacgctgtcgcaggtggcgacgatggagtacggcttcgaggacggcatcatctggcaccgcaaccgcctgccgacggtgaccgtgcgtgccgacatcagcgatggcatgcagcccctggacgtggtgcatcagatcctgccgacgctggatggcatccgtgccgagctgccgaacggttacctgctggaaaccggcggtaccgtggaggattcggcacgtggccagaactcgatcaaggccggcatgccgctgttcctggtggtggtggccacgctgctgatgctgcagctgcgcagcttctcgcgtgcggcgatggtgctggtgaccgcgccgctgggcatcatcggcgcgacgttgttcctgctgctgttccgcgcgccgttcggcttcgtggcactgctgggcacgatcgcactggccggcatgatcatgcgcaactcggtgatcctgatcgaccagatccagcaggacatcgatgccgggcatgaccgctggcattcgatcatcgatgcgacggtgcgccgcttccgcccgatcgtactgaccgcgctggcggccgtgctggcgatgattccgctgtcgcgcagcgcgttctacggctcgatggcgatctcgatcatgggcggcctgatcgtcggcacggtgctgacgctggtgttcctgccggcgttgtacgcggcatggttccgggtgaagccggacgaatccggggcgtaa

SEQ ID NO: 498083 - DNA, 1218 bp, Stenotrophomonas maltophilia
atggacagcgacagcagccccggcatcgatgagcccgggtacggcgatcgccttgtggtggtggcactgaccttgctgctgggaggcggcgtggtcgcgctggtcggccagcacaccgcagcccaggcaggcccggccatcgtcctgagcctgctgctggccgcgctgggcacagggccgctgctgtactgcctgcacgttctgaaccagcaaaggcccgctgccgatggcctgcatggcgtggtgcgggactgctggggaggcgtgccggccgttctgctcggtggcgcgctgctgctggaactggtggtgactgccgctggcgttgcgcagtccgtcgccaaccatctgcatgtactgctggctggttgtggaatcgaggccagcaacgggatgccgggtcaactgatggctgctgccagcctgctgttgcttgcagtggtcggattgctgcggccacaccgtgtggtgctggttgcctgcgtgctgctgacggtgaaggtcggcgccggcctgctgttgctggtgctggcagcccgccatgtgcactacgcgtactggattccatggctgccgccagcaacggcaccctatcgcttcgggatcggcggtgtactggcggcgagcgtgccgctgtacggtgtgttcgccaccgttggcctggcgctgggatttcctggcatcggcaggcaggcgagggcacggccgccgctgctgccggcgtgcgtgctgctggccatggtgctgctgatcgtactggccgcgttgcaggcgggcctggtcgaatttccggctctggccagcacgcggcctttgtcggtcgccctgcagcatcacccgcagttgtactgggtgatgcccttgctgccgctggcgggagtggcagggttggtggcgctcatcctggtactgctgatgttggctgcgcgggtggcgatgcagctgtggccgacggcaggtgaccgatccctggagttccgggagagactggtgccggttgccgtcgtcctgtcggcggcattgctggcgttgtgggcgcccatgggcagcctgccggtactgcctggtccggcaaccctgttggtgatgggggccgtgtgcgtggccgtgctgcgcggacgggcaccgcgatcacgcgccctgccggtgctggctcccgtcgccatcgcactgtgtctgctggccgcagtcgaacggatgcgggtctggcccggctga

SEQ ID NO: 498084 - DNA, 411 bp, Stenotrophomonas maltophilia
gtgccggtgttcaacgcgatacagcgcctgcaggcatcggacatgacgaccttcaccgtgttcgtgcagtgtgattcggccgatgacatcgctgccctggaggccatcacgctgccaggcatcggcatggtcgaggactggacggccaccgtgcgccggctatgccgccgctgcagctacggcacgccgcaccagcatggtgatgaggcgccagatgaagaccaatggagacgcgaacgtgacctcggcgtggccgcacagggccgggctgcggtggaaaagctcatggcggtgtggggcgctgcagcccccagccgggtgctggaggccatcgaacagcgcgagcacccgatgagcgccccggagccaggccaggtctggtggctgggggaggacgaagaaggcgcgtaa

SEQ ID NO: 498085 - DNA, 582 bp, Stenotrophomonas maltophilia
atggacatgagcaccgaccacaacgacattgacgacggcgacctgctggacgacgaaatcctcgacgaacaccaggcactggaggcacgcgcctacgccgttttccgcgagggcgacctgcagcaggcagtggctctgttcggcgagctgatcgcactcgctcccgaagtgccgtatctgcattacatgcgcggattggcgcacaaatacctgcgcgactgggctgcctcgctgcaggacaaccggcaatcagaacagctgcgcggcgagttcgatgaagccaccgcgtggaatgccggtatcgccgccaccggcgccggtgactgggccgaagcgcgccgccaatgggcccgctgtggcatcaccctgcccgagggcgaaggtccgatcgagggcaacttcggcgtggcctgtgtgcgcttggcaccgtggtccgatgccgaagtggtgtatatgagccgcattgatccggtgcgtgcacgcatcgacaacgtaccgctgcccgaaagcggcttccgcttcggcgacatcgtgctgcacgacggcgcatcaaccggccatcgcacctacggcgagcgctag

SEQ ID NO: 498086 - DNA, 1191 bp, Stenotrophomonas maltophilia
atgttccgccagaccgtggctgtccttgccgtgctgattgccggtgccttgcccattgccgtgcatgcggcgcccgcgcagccaccgatcttcggtgcctactaccccggtggttcggccgagcgctacccggtgtcgagcattccggccgagcgcctcacccatctgttctacgcgttctccaccatcgaggacgggcgctgcacgatcggtgccgaagcgccgaagaatttcgcggcgctggccgagctgaagaaggcgcacccgcatctgcgcacgctgatctcaattggcggatggggcgcaggtgggttctccgatgcagcgctgaccgaggccagccgcaagcgcctggtcgactcgtgcatggcactgttcttcgatcgccatgccggcagcttcgatggcgtggatatcgactgggaatttcctgtcagtggcggcccgaaggagctggcgcaccgcccgcaggatcgcgccaatctgaccaggctcgcgcaggcgttccgcgtggcactcgacgcgcacgggcgcaaggagcgacagccgatgctgctgaccgccgcactggccgccggtcgcctgcagaccgatggcccctacgatccggccgccagctacgacctgccggcgttggccaaggtgttcgatttcatcaacctgatgagctacgacatgggcaccggtttctctgcggtgtcgaccttcaatgcgccgctgcatgaagtgccggccgatccgctggccccggagctgcggcgctggaacaacgtggccggcgcggtgcagtactaccgcgagcacggcgtgccggccgagaagctggtgctgggcgtaccgttctacgggcgcggcttcaaggtcaccggcgatgcagcggatggtctgtaccagtcctacagtgcgccggccgatgccggcgactggcgggtgatcaaggcgcgctatctcgatcagccgggttggacgaaacactggcagccgcaggcgcagagcccgtggctgtacaacgccgggcagaagatcttcatcagctatgaagacccgcgctcgatcggcctgcgtgcgcagttcgcccgcgagcagggcctggccggggtgttcatgtgggagctgaccggcgacgacgaacaggccagcctgctcaacgccatgctgggcccgtggcagaaggcgcgcatcggcgattga

SEQ ID NO: 498087 - DNA, 264 bp, Stenotrophomonas maltophilia
atgtggccgcgcgccttcgctggcgtcgtggccggcttcttcctggccgcagccgcgaccggcctgctggcatgggtaccgcccggcccctggcagcgggcgctggtgccgaccctgatcgctttcatcccgctgtggatgctggccgccctgtgggcgttcagtttccgcagcgcgctgcgcgcctggctggtgctgggtggcagcgccgctgccggcttcgccatgctcgggctgctgcgcctgaccggcgcggtgcaatga

SEQ ID NO: 498088 - DNA, 441 bp, Stenotrophomonas maltophilia
atgaaccggacgtcctcttctccgcacctgcgcgacggcattccgcaggacgcagatgccttgatcgcgctcgacagcgtggcagccactgatccacggcggatcatgcagattgccgactggctggcgcacggcgtcgtgcaggtcgccgagcaggacggcaagatcgtctgctacctggtcatccatcaccacttctttggcgaagccttcattgaaatgctgatggtggcgcgcgaacagcgcagccagggcatcggcgccatcctgctgcggcacgcgatcacgtggcgcggtggcggcaagctgttcacctcgaccaatgcctccaacacgggcatgcaacgcctgctcgctgccgccggcttcgtgggcagcggcatcgtgcatggcctggatgaaggcgatccggaactcatctaccgcttcgcggaagactga

SEQ ID NO: 498089 - DNA, 354 bp, Stenotrophomonas maltophilia
atggaacgatggtatctggcgacgttgcttgcgttgatcctgcatcagatcgacgctgcgttctggcaggaatgggccatgttccatgtccccggtggcatccagggcttcctgctgttcaacctgttcgcagtcggcgccgtgctttggggttatcgccagatcgtgctgggcacatccacggcgcgcagctatgcactggcgtgcggggggctcggcattggcacggcactgatccatctggcctttgccctgttcggtcgcagtgaattccacctgccgctgtcgattgccgtcctgctcgcctgctttgtgtcgggtggcggcctgttgctgaagctgcgcccgcgatga

SEQ ID NO: 498090 - DNA, 510 bp, Stenotrophomonas maltophilia
atgacccttcgcccgctgctgccgatcaccggcgccgcccttgccctgctgctggccgccaccgccgtggccgcccaggactacgacactgatcacattccagcgctgcgctgcgaatcccagttcaacaagaccgagcaatgccccatcgagggaccgatgcgcctggccaggcagctgtcggtgacccgttgcgtggaagaccagaactggggccagagccggcgcatgctgtgggtgaccgacggctgccgcgccgagttcgttgccgacgaacacggccgctggccgggacgtggccgcagccgtgatcgcgacaacgagggcgaacgcctggtctgcgagtcctacgagaacaaggacaaggagtgccggattcgcgtgcgccatgaggtacggctggtcaggcagaaatcggtgacagcctgcatcgaggaccgcaactggggctgggaccgccgtggggtgtgggtcagcgacggctgccgtgccgagttccgggtgtattga

SEQ ID NO: 498091 - DNA, 882 bp, Stenotrophomonas maltophilia
atgccacgcctgcccttgacctgcctgctcctgccgctgctggccagcgcctctgccggcgccagcgactggcgccagggctgggggatgctgccgaaggcgcctgcccccgccagcgccgacgcaaaggccccccttccgatggcccagctgcgcctgcagtcgatcggcgaacagtggcaggcccggatcgacaacaccctggccgggccgttgcagatcgaactgcgcgccgcccctggacacccggtcgacggcttgccggtgcagtcactgatacagggcgacagcagcctggtcgtcggccacctccccgcgccggtcaacggccggatgctggacctgcgcctgcagtcggtaccaggcaaccccgccgcacaggccgaggatgtggcctaccgcctgcccttcgatgatgcacgcccgcgcgtggaccaggcgccgcagggccggttcagccacgacgacgaggaaaaccgcgacgcggtcgacttcgcactgccggagggcacactggtgctggccgcgcgcgagggcacggtgatgcagatccaggatggcttccgaggcaacggccaggaccgcgaacatgatggtgcccgcgccaacttcatccgcgtgctgcacagcgacggcagcatggccctgtacggccacctgcaggccggcggcatgcgcgtgcgtcgcggccaggcggtgggcgccgggcagcccatcggcctgtccggcaacagcggcttcagcagcgcaccgcacctgcacttcgtggtacaggtcaaccgcggcatgggcctgcgttcggtgccggcacgcatcttcgccgagcagggccagctgcagttcgcccgccagggcgaggccgagggcggcatcgggcgctga

SEQ ID NO: 498092 - DNA, 750 bp, Stenotrophomonas maltophilia
atgggggcagggggagagcagcacaaggtggaagctgtcgtagaaggcccacgccgcaggcgctggcgctggaaacggctgctgtggctgccggtgctgctggctgctttcagctgcctgcaggtcctggtgctgcggttcatcgacccgcccgtgtccatggtgatgctgtggcgctatggcgaggcgctgggcgaggccgattggtcctatcgcctgcattaccagtggcgcgaccttgaccagatggcgccgagcctgccgatttcgctggtggccgccgaggaccagcgtttccccgaccacaacggcttcgacctgcaggccatcgagaaggcccgcgaccacaatgccaagggcgggcgactgcgtggcgccagcacgatcagccagcaggtggccaagaacctgttcctctggcagggccgcagctggatccgcaaggggctggaggtctggtacaccgtgctgatcgaagcgctgtggccaaaggagcgcatcctggagatgtacgccaacatcgccgagttcggtgatggcgtgtacggagctcaggcggcggcgcagaagttctggggcaaggacgcggccaggttgagcccggccgatagcgcgcggttggcggcggtgctgccggcaccgcggcgctacaacgccgcaaagccagggccgtacgtgcagcggcgcgccgcctggatccagcgccaggcacggcagctgggcggggccgcgtacctttcggaagagtga

SEQ ID NO: 498093 - DNA, 2958 bp, Stenotrophomonas maltophilia
atgaagttgaacagcaacaagctgcgcgatgcagtgtgcgttgcgctggccgccagcgccgcatccgttgccggtaccggggtggcgtctgcccagaccgccaccaacctggaccgcatcgaagtcaccggttcgcgcatccgtaccgtcgacgtcgaaaccgcccagccggtcctgaccctcaaccgcgctgacatcgagaagcagggcttctcgtcggtcgctgacatcctgcagaacatcagcgccgtgggtacgccgccgatcagccgtgcccagcccctgtcctcgggcgaagccgtcggcggcacctacatcagcctgcgtgacctgggcgccacccgcaccctggtgctgctcaacggcaagcgcctgggcatcaccaccggtggcctgcaggacatctcgaccgtgccggtctcggccatcgagcgcatcgaagtgctgaaggacggcgcttcgtcgatctacggttccgatgccatcgccggcgtcatcaacatcatcacccgtaccaacttcgaaggcgccaccggcagcgtctactacggccagtacagtgaaggcgacggtgccacccgcaccatggacttcaccatgggcgtgaagggtgagcgcggttcgctgaccatcggtgccgagtacgccaaggaagacaaggtgcgggcggccgatcgtccgtacggtgcgttcccgcgcagctccaaccacccggatttcggttggaccaccgtgggtgagttcggcggtttcgtcagccgtccggccgatggcctgccgggcgtcacctatccggccgccagcccatccaacccgaaccgcgaagtgcgcgtgatcctgcgtgagggtggcaacgcgaacaacaaggccgactacgtcgcgcagaacgtcaacagcttctccaccaaggacaagaccaacacgaacctgcagaccgacctgcgtaccccgcaggaacgccgtgcagtgttcgtcgatggcatctacgacctgaccgacaacgtgcgcctgcgcaccaacatgctgtacagcttccgcgattcgaaccgccagatcgccggctacccgtacggcgcactggccttcggttcgccgatttcggccagcagtgcgttcaatccgctgggtgctgacatcgccaactggtggcgtcgtacttcggaagtgccgcgcaacacccgcgccgagctgaccaccttccgcttcagcggcggcctggaaggcagcttcgagttctccgaccgcctgttcgactgggatgtcggctacctgtacaacaacaacaagctggtccagaccagcaccggcgacctcaacctgaccgcgctgcgtgcggcggtgggtccgtccttcatcaacagcagcggcgtggcgcagtgcggtaccgtggccaacccgatcgggctgaaccagtgcgtgccgtacaacccgttcctgcatgccggcatccagagcaacggtgccaacggcgcattgaccggcaacaccgccctgcagaacctgctgttcccgtccgcgcactccaccgccgagaccaccaccaaggtcatcaccgccaacctggccggcagcctgttcaccctgcctgccggcgacctgggcttcgccgtgggtgtcgagcaccgcaaggaaaccggcagcttcagcccggacgcgctggtgcagtcgggcaacacctccggcctggccaacttccccaccggtggtggctacaaggttgacgaagtctatgccgagttcaacgtgccgatcctggccgacctgccgggcgcccgcgagctgagcctcaacgcggccacccgccattcggactacgacaccttcggcaccacgctgaacagcaagttcggcttcaagtggaagccgatcgactcgctgctcatccgcggtacctgggcggaaggcttccgtgccccgaccatcgccgacctgtacagcggcggttcgcagtcgttcgacttcttcaccgatccgtgcgattcggtctacggtgcggcgcgcaccaatcctgcggtgcgtgcccgttgcgccgccgcactgccggccggcgtaaatgcagccaacttccgccagcagcagcagggcttcaccccgaccaccgctgcatcgtcgcagaccccgctggccttcgtctccggctccaacgaccagctgaccccggaaacctcgacgtccaagaccctgggcttcgtctggagcccgggtttcatccagaacttcaacatgtcgctggactggtgggaaatccgcgtcgagaacaccatcatctcggacacggccaacctgatcctcaacgactgctacatcaacgacatcgcggcacgctgctcggcgttcacgcgtgacccggtgaccggcatcgtcaacaacctcaagcgcaccggcatcaacgccggttaccgcgaggtggaaggcttcgacctggatgtcagctaccgcctgccgaccgatcgtttcggcaacttcagcgcgcagtggaccagcacctacacctcgcgtgatgacctggtcaccaccaagaacccggtcacccacccgaatccccgcaccggcgtgggctgggcgggcggcgccttccgcgtgcgttcgaacctgaacctgggttgggaaatgggtgacttcggcgccagctggaccgtccgttacttctccggcatgaaggaatcgtgcctgagcgccgtgacgttcccggaagagtgcaacctgccgaactacgcttcgccgaacaaccagggcgtggcggtgggcagcgcgaccaaccagcgtggcgcgaccgtgttcaacgacgtccagctgcgctggaacgcaccgtggaatgcgaccgtggccgtgggtgccaacaacgtgttcggccgcgtgggcccgaccatgtacagccagccgagcgcgaacgtctcctactacggtggcttcgacatcggtcgcttcctgtacatgaagtacacccagcgcttctga

SEQ ID NO: 498094 - DNA, 480 bp, Stenotrophomonas maltophilia
atgtccacgcccctgctctcgctctacaaccgcctgcagcgctggcccgccggcaactggttgttctcgcgcgcggtgtgcttcaaggcgccctacttcgccagcatcgcgcccatcatcaccgcactggagccaggccgctgcgaaggcgtgatccgccagcaccgccgcatcaacaaccacattggcacggtacatgcgatcgcgatgtgcaacctggccgagctggtcggcggagtgatggtggacgccagcctgccggcagacatgcgttggatccccaagggcatggaagtgaaataccaagccaaggccttgggcacgttgaaggccgtggcgacgccaatgttgtccatcgtcagtgctgcggacggctacgacctgccggtgggggtcagcgtgaccgatgcggcagggaccgaggtgttccatgcgaccatcgcaatgtgggtatcgccgcgccctccgcgcacaggctga

SEQ ID NO: 498095 - DNA, 405 bp, Stenotrophomonas maltophilia
atgacaaccacagaactactggtgcgcctggcaggcattcacagtctggggtttgccgccttccatctggcgttctggcggctgttcggctggaaacgcgagctcgcccagctcggcacagccaaccgcgcgatcatgcagatcctcaatctgcgcgtgatctatgtgttcctgggaatggggctgatcgcgctgatctttgccccggacctggtcgacactcgtctgggggtggtcctgctgggcttcatggcggtgttctgggtgggccgcgcacttgaacaattcgtcttcctgcgcatcaacgactggcgcgtacacctgctgacgggcctgttcgtgctgggtgcggcactgcatgccgtgccgatgtggctgggcttcatgcgcgccatcagccgctga

SEQ ID NO: 498096 - DNA, 924 bp, Stenotrophomonas maltophilia
atgatcaaggggagcgcgaaggaccacgttctggacgaggctcagttggaagcatgggtgttttcggtactggagctggtcagccagctacgaaatgggaacctggagagaacgctcttcgccaacgcccttgatgaggaggaggatgtcggaggatggctcaagggcaacctcgggctgatgaacttctcggcgcgtggatttggcggtcggctcatctttccgcacgttatcggccccagctcccgagcgttggcgagggtggtcgatgcagcccgacgcgatctggaatttgatgttcttacccgcaccacacacggaaagttgaacgtccttcgccgcagcaatgacctgaagccagacgcctggttgagtgctgttccccaactcaccgcggggcggttgaaaggcgggtctcgagccggcaggggaggtcagaagaggcggcagggccctggcggaggcgaggagcaactccgtcatgccgatcagtgtgcagggtacccgcacaagcgatcggtctaccacgactcggagttcctgctgctcaactactttgatctggcacttcggcggctctaccggttctcccattggaggcggatggagggggtgttgtatctttttacggagcgacgcccttgcagtgattgctgccatgtcatcatccaattgctgcgtcgctatcgcaggatccagttggtgatcgtgcgggcaacaggagggcgcggctctgacgagaacatgctggaacggttgtcgcagcatccaagggttcatctgcggaaggtggtggtccagccagtaggtgtggaactctcctcgccattatccgtcgtggagacggggccattggcgcttccgtaccctgatgggacaccgcgtagaggttggtcgcccaagggtgcagaaatgcggcgttga

SEQ ID NO: 498097 - DNA, 807 bp, Stenotrophomonas maltophilia
atgcattcgatcttccgttggaccaccgcgctgctgctggcgctgggtgtggccctcaccgcgcatgccgatgacaccgccgcgcagatccgccagcatgccggtgagcaccgcctgctggtactgggcgaattccacggcacccgcgagaccccgttgctggtacgccagctggtggacgactacagccgcaacggcccggtcctgctggcgctggaactgccacgtgccgagaaccctgtgctgcgcgactatctggaatccgatggcggggccagggcgcgccggcacctgcacggccgcgcgttctggaccgtgcgcgatgaccagcatgatggtcgccgcagccgcgacatgctggcgatgatcgaaggcctgcgtgtgctgaagatgcaggggcgcgtgatcgaattggttggctatgacgtcaatgccagcagtggcggcaaccaggcgcgcgatgacttcatggcagccgagttgcgacggctctatcgagggttgccagacaatgcacgcatgctggtgctgactggcaatgtccacgccatgctgcggcggccggaaggtatgccgccggaaatgcagaggcagccgatggcctcccagctgcgggatctggatatctacagcgtgcggttgggtgcgctgcgtggccaggcgtgggcgtgcgcggaccgttgcatggcgcggccacttccagagcaggtggccccgcggctgcggggcgatacccatgcggaacgggcgtacgacctgtgggtgtggatgccggagctgagcgtcggcacgctcgtggatccgtag

SEQ ID NO: 498098 - DNA, 237 bp, Stenotrophomonas maltophilia
atgcataacgagagcccgctgccgatcggtagagtcgactgtcagtcgactcgcgaagtgcagccgactaacagtcggctctaccaaagccaaagccaaagccaaagccagaccgaagcccaacgccacggcatcgaacagcaacgccagcgcgccaggcgcacggcgatgtgggtcggcgccatcgccgtgctggtctacgtcggcttcatcctcagcggggtgatcggccgatga

SEQ ID NO: 498099 - DNA, 1353 bp, Stenotrophomonas maltophilia
atgcaaaccgcttccaccattgcccgactgaccctgctggccgtcggcgttgccggtgcgctggccgccgccgatgccaatgctgccgccttccagctgaaggaaaacagcgccaagggcctgggccgcgcgttcgccggctccggcagcgccgaaggcgacgcctccatcatcgccgtcaacccggccggcatgcgccagcttgatggcaccctgattcagggtgacctgagcgccatcagcttcaaggccgagttcaaaggccaaggccgtaagccgaccggcgccgcgcagaccggcggtgacggcggcgacgctggaatgatcgccccggttccggccgcatacttccatatgccagtcggcgagaaggcgcacttcggtgtgtcgctgactgctccgtttggtttcaagacccagtacgacaatggttgggtgggtcgctacagcggcctgaagaccgatttgaaggcgatcgacctcggcttcgccgcatcctatgacgtcaacccgtacgtttccttcggtgcgtcggtgttcgtcgagcacctgactatcgagctgagcaacaacatcgatttcggtactgcgctggcccaggcccgcgtgccgggttacgccccgggcagcgccgacggcaagctgaccgttgaaggcgacaacaatgcagtgggctggacggtcggtggtctgttctcgatcgatgagaatacccacatcggcctgagctaccgctccaaggttacgcacaagatcaccggtggcgatgccaccttcctgatgccgaacgacaatggccgcaccgcgaccatcctgggacagactcagccgggccagttcgtcagcaccagcgggaaggcaaccgtaaagctgccggcgtcggcaaccctcagtgtgacccacaaggtcaacgaccgctggactgtgatgggtgacgtcacccgcaccgcttggtcgaccgcattcgacgctgtcaccatcgactacgcttcggcccagaaggactctgtgctggacttcggctatcgcgataccaccttcgtgtcgctgggtgcggactacaagctgagcgataccgtcaccctgcgcggtggtgtcgcgctggaccagaccccgactaccgacgctcatcgcgatgtgcgcgtgccagataccagccgcaagtggctgtcgctgggcgtgggctggaccccgtcggctaacaccgaatacaacttcggctacacccacctgttcaccagcgacccgaacgtgaacatcaagccgactaccaacaaccagggcaactcgctggctggcaagtacaaggttcgtggcgacgtgctggcagcttcgttccagtacaagttctga

SEQ ID NO: 498100 - DNA, 432 bp, Stenotrophomonas maltophilia
gtgaccgaaacaaacgtgatgcgagcgctcgtcgacatccagcgcactcaaattctgctcgccaagctcgccaagccaacggcagaccttgtgcccagctcgtacgcatacgcgctcgacaaacggttgtgcccggtatttgacactgaagatggccatccattcgatgagggctacgagatcaagcggggatttgccaactctgtcttgacgtattgtgatcagaagtggttggctggcgaagcgctctccttctacgacctcgaagctcattttggccgcgagcgcgttgaactaattcacatcctgcgctacgcccacctttcgcgccggttcgacgacgcctttttcagcgcgatcttggctaactgccccagcgaggcgcacgggctaaatgatccctttgatccgagtgagttaggtgtcgtctaa

SEQ ID NO: 498101 - DNA, 828 bp, Stenotrophomonas maltophilia
atgcgccaaggccccttctctcgcccgaccgtcgttgccgcgacggaactgctcgaacagcacacacaggcgcggttcaatcaaatggtcgtacgccttgcgctcgaggacgaggtgtcacaggacacgacggtcagcgtggggaagaaggtcgcggtgctgagcagagtagtggtggcgcgagctgaccaggtgctgcagaccgtcgacgggcccgtgacgttggcggaggcgcttgtgcgcgaagcggcgcaactagcgaaaccggtctcgacagacgcgcttcatacggacttcctgcgcggactggcgcgggacggcttcgtgcttgtgccagccgcgagtagcgcccagcgtgcgtcgatccgagccgcgcttcctggcgagatccagctacctgccacggatgacgaagtacaccacttgctgaagcagtttggcttcgccacgcccctcggccacctcgaccaggcaatcgatgcccacactcggggcgactgggccgcgtgcaacggacagctacgcgccttcatggaggggttgttcgacgacatttccagacatatcgattcaccacaggccgcgcggctacccaccgcggagaaccgtcgagggatgctggggaccatagggttcctggatgccagcagcaacgagtggtcgggcgacggcaagaactacgtcaacggacttttcaagatgctccatacccagggcgcgcacccgggactgtctgatcaggaccacagcaccttccgattgcacgtggtgcttgttaccgccggcatgtacctacggcgcctcacaaggcagcgactgctcccgtaa

SEQ ID NO: 498102 - DNA, 1134 bp, Stenotrophomonas maltophilia
atgagcgtagatatcaaccaacgtttgcgtgcgctcgatgcccgtcggcgtggcctcgatcgggcctccttggttttcgactccgccgcagagttcagtgctcaacggagctttaaggagagttacgagaagcggagctccggccgatacactcgatatgcgctcggagcgatgcaggaagtggagcgcagctatacagcgcttagcttccaagaagctgagcgagtgcagtcgcaaatctcgactcgatttgccaaagttggcctgggctgcacgtttcgtatgcagggctctgtgcctggcaacatccacattcgaggcattagtgacgtcgacttcctggtaatggagcagcgcttccttcactacgatgccgccggagttttggcgcaggccggattctataatagcccataccgccgatctgccgcagacacgctactcgatctccgacaacgcctcgaagctgcattgaaggacgcttacccagcagtagatgtcgactgctccggagcaaaggccattcagctttcgggcggatctctgcgtcgcgacgttgatgtggtgccggcctcttggaatgacacgtgcgagtatcagcgcacccaaattgaagactatcggggcgtgaatgttctcgataagccggcgcatgagctgattcacaacctgcccttcctctatctgcgccgcttgaaagagcgggacgaggaaacctggggggggctgaagaaggcaattcgactgtgtaagacactcaaagctgacgcaatcagcgatggcaaagcggtggatatcagtagctacgacatcgcctcagcactgtggaacgcgcctgccaacaccctccgggtgggtatcgttcatgagctgagcatacttgcctccgcaactgacttcttcgtatatctgacggccaatcccaactacgcgaagtctctgcagaccccagatggttcgaggaaagtgtttgatagcgaggtaaagcttcgcgctgtggccgttctggcacaagaactgctgaacctctctcgtgacgtcagcgccgagcacgtgtcggatacggccagtgtccagttgcgagacgattggttgaacactctcaagcgaacctcagtgccggtaatcgattga

SEQ ID NO: 498103 - DNA, 636 bp, Stenotrophomonas maltophilia
atgcaacatgagtatgccgttttaggaggcctcaatcgcgcgaacgtcggaaggtgggtgatgggcacttcggttgcgctggccgccgcagtcagcgcactggccggcttaatagtcgccttggtggtggattttggctttgaagtccccagactattgctttggcctgttaccgctggctcgatctatcttctcctgtatgccgtctttgaccgatggatctggaggatccctcaactctcccgttggctgcgggtgccagacctttccggtagttggatttgccaaggtcagagtcttcatgcctcggacggccgcccattggtgacatgggaaggtgagatcgaaattgcgcagagttgggacaagattcagatccgtttacgcacccgccagtccgtttcaaagagcctttcagctgctctgctgtatgacagcaccgatggataccgtgttctctacaactatcgcaacgaacccggcattggtgaatcaggtctcaatgcccaccgtggatgcgcggagttgctgtttcactccgatctgacagctgccaccggtgagtacttcaatggccacggccgatacacatacggaacactcactctcactagaaaggagaccaaagcatcatga

SEQ ID NO: 498104 - DNA, 228 bp, Stenotrophomonas maltophilia
atgcgtattgaggtttaccaagaccgcgctggagagtggcgctggacgttctacgcaaccaacggccgcaagattgcggactctggtgagggctacgccactgagtacaacgtggtgcgcgctgcccggcgcctgaaggaacttgcaccgaccgcgccgatcaagcgtcgggacggcacggtgctgaatgagagtgcccgtgctggcatgggctctgatccgttctag

SEQ ID NO: 498105 - DNA, 894 bp, Stenotrophomonas maltophilia
atgacttccggaatccattcactccgctggggccaagcgcgtcgcatagcgttcattgacctccgactgcagtacgacggccgcctgaaccggaaggatcttattgatttttttgggatttcagttccccaggcgtcctctgatctggccgaatacgccaagatcgccccagacaacatggagtacgatgccagcgcccgagcttacatagcccggcctggattcacgcccgtgagcggtcgagcgacctcgagccattacttgtttgagttgtacggactggctcgcgaactgttagctcgagacgagagctttataggctatgcgcccgtaaccggaattgtggctacgcctgcacgccccctggcggcgaccgagatagccgaatgggttcgcgccattcgcgacggcgacgtcgtagcgggccgctaccaatccatggatgcagacatgccgcggggtgtgcgcgtctccccccacgcactcggatatgacggcctcaggtggcatgttcgagcctactgccacactcgctcgttgtttagagatttcgcgattggaaggtttgaaatcctgaaaaccgagccaggctccgcattgattgatgcgactagcgaccttggctgggttacggaagtcggcgttcgattggttcctcatccaggattgaccgccagccagcggctagcggtggccaaggactacgccatgcaagatggtgtgctcgttctacgctgccggaaggccatgctcttttacacgctgcgccatctgaacttggaatcgctggagattcaatctgatcctgcacgccaacacgtcatcgtcgaaaaccatcaggaggttgcgcagtggatacttgaggatcgtcagggtttggccacagctggttga

SEQ ID NO: 498106 - DNA, 3015 bp, Stenotrophomonas maltophilia
atgataggccgtcgttcacattttgggggaagtgtgggttacggtgatatgcaggaagcaggcgctgtcgacagggacagagcggcaggttcggaccttaagtcgacgccagatgagcagacggccgcgttggcccttccactctttggctatcaccaaggtcctcaaccgagagctggttgccacgttcgactgcgccggtcactgcgaacggccgtcgcacttggtactcttgccgaccacacgttgcttgtggctgacgacgaagacggccgcgtgtatcgcacgtcgtcccccagccttaccaccaatcgccaagctggccggttgacgctgaaccagtatctagagctagcgaagaagctcgctctagccggcaatcggcacgggttgtcgatattggccgctcattttcgcggcatcaatggcagctcgtatgcctgtttctcagcctatgcttggtgcgttcgcgcaatgtgcgcaggccatttttttagaagtcgaaccgctgaggttgaggcctggctgcggggccagttcgattcattgttggagcctggcgtggagctccctccggctgctcggccggaggagttgggcttatgggctagcaaacgaacagaggcgaatgcgaatgcaatcacggaaacctcgcttgtcgcattggacaaggcgctggaacttggagcggattcgctcaccaggacgctcggcgatattgagctccagcgcaactatggtgaaagccaaggcaacaggctggcgatcgatatccagtccggcctacaagtggtggtgttgggttcaagtaatagcgagataactgagggttttgttgacgtcctcttcttggataacctcgatgcagacgcccgtcatgtaagtggcctaagcactggaaaagagtcgatagatccaggctggctgtgggaagtcgttaccgatgctgctcggcacgggaagtctccactgtgcatcgcgctatggcttgcggggtcggacgtcggcccgtctggccaatccgaaccaagcgtggaaagatcgctaacgagagttcttggtgcagcttacggtgctcgacactttgctagcgagcgaccagcgcagtccatgaagtggttacgtcttgcgaaagagaactggcgaaccctgccgaaatcagagcgatcacgtgtggctgcgctagtgccggagatcgtatcgtcaggtggaaagcggcgtctgtcgaggcaagatgcttcactgcgagctgccttccgtacgacaatcgaggcgctagttgcgcgacatccagttcctctgatcgagcgcaactcgctttttccagcccgttcgacagtagaaatcggcgacgttgatgccgtcgatcttgtggaaagcggagctcctccgacacaggcgaccgcaatcccgcgagctagcaatgctcaggtgcggcagcgtgtaggtgccgttaaattcggcaggtcgcagcgtgctctcagatttgatctatccgactaccctcttttgtcgtccgagtgggctttggtggcaaaagactcggcacatttggaggctgtgacatcagcgctgggctggctcgagggacgaatgggcttgagcctgcccaaaacatggcgggagggtgcccacgagatcgagaggcagggcgtgtcgctccaattggagtcaggagagggaatatttgcgtttaggctggatcatccggacacgactcatcccactcgttggtggcggatggaaggcactgtcttggccggaattggtggagttggtgggatggtcggagtgcggctgagtgctcgtgatcttgtggatctgccgccacccccaaccttggttcccaccattgtccgggaatgggctcgctcgccaggattggtcattgccggagctgcggccggcgctcccaccttcgtgcgtgatgaagccagcctctctaggctggtcggcgcagttcaagatctcagccgcgacgcgccgttgtggatatcaggggcgcgctttgagttaactaagcccctgcagggtttggcaaggctgtacgtcattgacgaggtgatgcggccgcactacgcaattcatgtcggcactttgctgccgaacacggtccacgtatacggcaaggctggcaccccctgcgctgaagttgacttaggtctccaacacgggttagagcggcttcggcagattacggtcgacgctcggcagcggcccgaggtgccagcattccgcgacattcgcaacgcagtcgctgaagctcggctgcgtgcaatagctctgcgtacggactccgaagcagcggagattgagccccccttgcctgccccaactgcagaggacattcgagccctagtctcgagggaagttcgggactatgaagaactgctacaagtcgcagaagaagaacggaatgcggcgctattagaccgggactcggcactgcacgatctggaggccacatccaacgaaaatgttgagctgaaacgtcgattgcatagtgcacaaatgaggcttggcgcggcggggttcagcgacgagccctcgacggaacgcatgccgccgccagcaacgctcgcggacatcgcggcatgggctgtatcgctacgaccacgagtagagttccctgacaagacgctgcgctacgctagccgcgtaacgcacaatgagcccgccctgatatttgcctgcctggaacaactatctgacagctattggcgatcccgctgggccaaggacgagacggcacgccgtgaggcacgcgaggagtgggaagatttcttgaagtcccataggctccgctggtccggagttggagttgtagctgcgcgacaccagagcgagtacagaggaatcgtaggtggcgcgacctacacgatggacatgcacattgctggaagcaacgcccacgatccgctgcgctgcttccggatctattgcttcgccgatgagccgaatcagagagtgattgtcggacatttgcccactcatctaaccaatggcttgacctag

SEQ ID NO: 498107 - DNA, 1176 bp, Stenotrophomonas maltophilia
atgcttcagcgccaactcccaccattgcccggcgagttctaccaacaccgctggcgcatcttccaggtccgggcgcgctggctgcagacgcgtgctatgaagcacaattccacatcctcgaccttgcctgcgacgaccgcagatctggttttgccagagcaactggcccagcaagctgccgaggcggtgcgcgagttgctggccgaggcggcggcagccaacaccacccgcagctatgccaccgccctgcgctactgggccggctggcactggggacgctatggggtcgagctggtgcttccggtcagcgaagctgtggtgatccagtttctggtcgaccatattcaacgtcgaagcaaggccgagctggtgagcgagctcccgcctgcgctggatcagacgctggtggccgcgggcctcaaggccaaggttgggccgctgaagctgtcgaccgtggttcagcgggtggccgtgctctcaaccgcccacaagctcaagcggctgaccaacccctgcgagctgcccagcgtccgcaccctgctcagccgggctcggcgtgctgcggtcaaacggggtgagcggccaatcaagaagaccgcgatcactcggaccgaactcgaggccatgctagcgacctgcgatgaaagcctagagagcctgcgtgatcgcgccctactctgctttggctttgccagtggtgggcgccggcgcagcgaaatcgcggctgctgacatgcgcgatctgcgcagggtcggcgatgacggctacatctatcggctggagtactccaagacccagcaggcgggcgtcacggcggattcgatgccggacaagccgatcctggggcgaagcgccgaggcactttcggcttggctggatagtgcgggcatcattgagggggcgatcttccggcgggtctggaaggggcgtgtcggccccgccctgctgccggggtctgtggctgcgatcgtcaagcgacgggctgccatggctggattggcgggagactttggggcacacagcctgcgctcggggttcgtgaccgaagcaggcaggcaaggagtacctttgccggcggtgatggccatgacagagcaccgatccgtggcgagtgtgattgggtattttcaagctggcgccgctgaggacaatccggctgcccgcttacttaagtag

SEQ ID NO: 498108 - DNA, 1533 bp, Stenotrophomonas maltophilia
atgggacacagctggaaaaaagatcgcaccaagaagcgcattgccacccgttacgccgaagtccgcgacgtggacatccgcgattacaagcgggaaacctcgctggtggatattccagtcaatcgcgcctatcgcgtccaaggggcgcatgtctacatcgacatcgtcaatctggcggacatgcttagctgcactgacatcgaaggcgaaacctgccacaagcgggcccttcgattcctgaatcagcactaccgcgccgtccatcgcatcctcgttgaaagtgatgccatccgtgtggactttcacaaccagcggctgcatgcggttgtgaccaagccgtacggcgatgccaacgaacgcgcccggatcgagcgcgcggttgcgatcgcccagctcgccatcgatgtgctggctgaaacgggcgactcggacgcgcacatccccaatgcccaggttcgtgtcggcattgacagcgggatggcgttggccgtcaacaatggtcgtcgcgccagccgagaacctcttttcttaggctccccagccaatcaggcggccaagtgtgccgggcatggaggggctgaaggcatctacctgacgcacggcgcacgtgccgtgcttgaactgcctaccttgaccggcaacaaggaccgcaccacttcgctgaccgatgctcagatttccgcatgcgtcgaggccgctgcactcggcatttccaagtcgcgcatcatcgaactctggaaagatgaacaggccgagctccctatcggcgaattcaagttcagtcgaccgacgcctccgctttctgatctggacttctccctgctcagcgcggcgaactcaaggcgatttgatggcgtttcgatctatgccgacattgacggattcaccgacttcgtggacaagcacttagaggaggatcccgaacatctggttcgaacactgcacgtattgcgctctgagctggatgcggtcgtacacgaggattttggagggcgtcgtgtccgttttattggcgactgccttcatggggtgctgctggagggcacgtcacagacgacagatgcgcaggacacggtcagcaccgctgcccagtgcgcgggtgcattgcgcagcagtttctccactgccctggagcaactgagcgccgaaggcgcggaagtggcagagctgggattggccattggcttcgaacttggcccccttgccatttcccgcctgggcatgaaggggagccttctgcggtgtgccacggggcgagcggtgttggaatctgaagcccaacaacgactctgcgacggtgtggagacggccattggtgaaaatgcctacaaggccgccagcgccgcgatacggaccgtctttaccgacaagcgaaaggcggcgaacctagactatgccgcagcggtggaggaactcgccgcatccggggaccgcgtggcgaaggcaacactggaggcacactacgctgaagtggcacccgcagtggctcctgcgctcgcgcagccgatccgtcctcatgtggccgcgacgtga

SEQ ID NO: 498109 - DNA, 1029 bp, Stenotrophomonas maltophilia
atgaacgacctcgacgccgcagcccgctatcttcagggtctactacccgacatggtcggtgagctcgagccctggcccagctccaagacgcgcggcttaccccacttcctcgccaccctattcggcctggccgagcttgacctgctcggccacagggtgctgctggccaccgtcccggcgcagacggaaccgttgccacctttgcggctgatcgcgcaggtgcatcgattggcggaaaaggccggcttgagggtcattctcgtgctctccggcgtttcgccctacattcgctccaagctcatcgagtctcgggtggatttcgttgtgcctggtagccaactgttcgctccgagcttcctgatgagcttacgcgagcgcgattcgtctccaagggtgctcacatccgctggggagcggttgagccatccggcacaagcggttctgatcgcggccctgttgcggcccgacttggaggagcgcggcatccctggcagcgtcccgtgggtgccgctcgacctggcgcgcgaggcaggctactcacgcatgactgcctcgcgggtcgcccgtgaactggtggcggctaacctcgtcagcgcccagcgcgaggggcgggagacgaagctacggttcttgaaagcgcgccgctccttgtgggcggtcgcgctgccgcggctgcgctcgccggtgctgcgcaccacttgcatcggcaaaagtggcttggacatgctgctggccgatcattgtcgtgctgcgggagaaaccggcctgtccgttctcaccgaactggcggcgccatcgcgtccgatcgctgcgatcggacgagactgcttccgtcggcatccggagccggaatggtttcccgtggccggcgagggctatgcagacgtgcagcattgggcgtactccacccgcctgggtggcgcgggcaccgtcgtggacccgttgtcgctgtacctgtccttgcagggacagggcgacccgaggctgaacggcgcgctgcgggacctgctcgatgaggtcttcgtctga

SEQ ID NO: 498110 - DNA, 624 bp, Stenotrophomonas maltophilia
atgcaacctaagtggagtcgtcgcaaggaggcgcggccgctcgagattgtagacgctgcggtagatgttttccttgagaacggctttgctgccgcaaagctctctgatatcgcgaagcgcgcacgagtcgcgaagggcacgatctacctctactttgaaaccaaggaagagctgtttcgagccgcagcgcgccagttgatctccacaaatctggaaggccttgagacggcacaggcgaccttcgacgggtcgattgaggagctaatcccgacgctcctccagcgagcggtctcatcaggtggcgatgcccgcttgtctgcagcattgcgaatggtgctatcggagagccgaatgtttcctgagcttgcgaggatctggcatgacgaagttgcatctcgcatgatccggctggtggcaagcgctgtcgagcgggcgcaggccaaggggaccgtccgcgccggcgactcaaatctcatggccttttcaatcatggctccgatcgtaatgggtgtgctgttccacgagctgttcgggacctcgagtccgcatgcacctgcgctggacaaacttgcgtcccagcatgcttcaatgatccttcatggcatcactgtggatgcgatgtaa

SEQ ID NO: 498111 - DNA, 354 bp, Stenotrophomonas maltophilia
atgatcaacgttgtcttccacgtgatcccgctgattctcggggtcggctacggcgcgggaacgctaactgcgatcatcatcttcatccccctctgcgcttggatgatctacacatcctttggcgcgggtcgtatgagctatcgagcactagcccttttggttggtgcgggagtgttgttccatgccctactcactattccgatgattctcctgctgcaaggtgcaatctcagagacgtccgtagtcatgattcaggtagccaacccctttgtgctgatggtcatcttgtcggcggcggagcgctcgcgcttgagcatgccggcaaggcagcgtcggccaagtgcctctcgctag

SEQ ID NO: 498112 - DNA, 1155 bp, Stenotrophomonas maltophilia
gtgcttgctcctcttgctctccccaaagccccgtttatgtctgccctgtttagcccattcgagctcaaaggtgtcactcttaagaatcgtatcgcggtgccgcccatgtgccagtacagtgcggaggacggccgtatcaacgattggcatctcagccactatgccgcgcttgcgcgcggaggcgctgggctcgtgattgtcgaggctaccgccgtgtctccggaaggacgcatcaccccgggatgtgctggcctgtggggtgatgagcaaattccaggaatggcagccatcgcttctgccatcaagcaaggcggtgccgtagctggcatccagatcggccacgcagggcgcaaggctagtgcaaatcggccatggcaaggcgatgaccacatcgcagccgatgatcccgcaggatgggcgatccttggtccctcgccgatcgcctttggcggctcgctcgatagagttcccaacgagatgacggttgaggacattcatcgcgttcaagcggatttcgtcgctgcagccaagcgtgcgcttgctgcaggatttgaatggctggagcttcacttcgctcatggctatctggcgcagagcttcttcagccccgacagcaacaagcgggaggatcgctacggtggcagtgcggagaacagagcacgcttcctgctggagacattggcggccgtccgtaaggtttggcccgagcatctgccgctgaccgcgcgctttggagttgtggagtacaactcgcgcgatggccaagcactggtcgactccattgagattggcaaagaaatgcgagagttggggcttgatctgctcaacgtgagcattggcttcagtgctcttggtggccgcgtcccatggggtacacaggcgttcctggcaccccttgctgagcgatttgctaatgaaactgggcttccggtggccacaggttggtgcatcgatgatccacagactgccgagcgcgttgtagcggactgtcaggttgacctagtgatgatcgggcgggcccacctatccaatccgcactatccgtaccaaatggccattgcgcttggccaggagctcccagccagcgtgctacccacgccttacagctattggctgagcagatacaaaggcccgggcaaggcgtcggctcaatag

SEQ ID NO: 498113 - DNA, 909 bp, Stenotrophomonas maltophilia
atgctgaatgagcattggctccgatcctttcgggctatcgcagaggtcgggagctttaccagggccgcaggccagctgcagctcacccaggctgcggtcagtcagcatgtacgtcatcttgagcaacagctgggtgccctgtttctgcgcagaccacgatttattgagctgacgccggcgggaatggctctattgcagtactgccaagagatggattcggccgatcgccggcttcaagccaagctcgcgagcgcggacagcgatcagggggagtttgcgctgataacccccgggagtgttggccttgctctttacccggtgttgctggacttccagcgcacccatcccggcttgatcattcgtcatcgcttctcgccggacccagaaatcctatcggcggtactggagaagaagtacgaggtgggtctacttgcacttcggccggatgaccctcggctgcgggctgagcccttcaccgaggaggcgcttgagctggtagttccgagaggtgcctgcgcggacagctgggcggatcttcaaaagttgggtttcgttgatcatccagatggccaggctatggccacccgccttctcgcccgcaagttcccaggaaatccaggcgtacgcgcgcttcctatacacggcttcaccaatcaggttgcgctcatccttgagccggtatcgctcgggctgggattcactgtcattccgcgacacgcccgtgaatccttcgctcggcaagacgcaattgaggtggttgactgtggatctccggtggttgacaccctctggatgatccatcgatccgaatggccactgtctgggccagctaaatggttgacccaacagcttcgaggcctgcctcgattcagcgggaggagggctccacctctcgctggagcggactga

SEQ ID NO: 498114 - DNA, 804 bp, Stenotrophomonas maltophilia
atggcaatggaccccgtcccctcgttcagctccatccctggagacatctacgttcggcaagggactttgcctccctccgactgggatgctcgtgtgcatccgtgggggcagttcaactatgttgcgcagggtgtcatggagttacaggtaggcgaggactggatggtgtcccctacccactatgcgatatggattccgcctggtgttcaccactcatcccgaaaccgtggtgcggttgcttatcgatccgcatacctttcggtcggcgcgtcggcgcagatgcccagcattccgactgcgttagcggttagctcgttgcttagggagatcttggacgaactggcccgtcgtgacatcggcgaggccgttaagccagaagaccggcgactctccgcggtcgcccttgacctgattctggccgcgccggtgatgtcgagcttcctgccgctggccagcggtgacgtgctaaagcggattctgagctatgccgagacctcccttcaggactctccgtcggcacttgaggtcgcagagcgccaccacattagtgttcgatcacttgagcgcttggcaaagcgcgagctagggatggggttcggagagtggcgcagtcggcttcgttttctgagggcaattgatgccttgggttcagaccgatcaattacgcagattgcagacgatctgggctatgcaaactcaacgtctttcagtgagatgttcaagcgacactctggccggaccccagaccagtatagaaggggcctcagtccgctccagcgagaggtggagccctcctcccgctga

SEQ ID NO: 498115 - DNA, 909 bp, Stenotrophomonas maltophilia
atgtactacctgctccccctcctggcctgccttctctggggcgccaacaccatcgttacaaagctcgctgcagggaccgtcggcccggtcgatattagcttctggcgatggcttgctgcggccatcatcttgctcccattcgccctgccgcgcctgaagtcgaacctagcggtcctgaaagccaattgggcacgcttcctcgtgctcggtgctttgggcggtgtcatgttccaatgcctggcgtactacgccgcacatttcacttctgcgaccaacatgggcgttatccaggcactcatcccgttgatcgctcttgccttgtcgcgcatcttcatgggtcacgcagtccgcggtggcgcagtgattggttcgatcatctccttggttggggtgatagcggtagtgtcccatggtgactttgaagccttagtttcccatggaatcaacaaaggtgacgccctgatgctgctgggcgctttggcttttgccacctacaatttgctgatgcacaagtggcgcattcccgtaacgctgatcgaatccctgtttcttcaagccatgtctgcaacgatcctgctgctacctcttttccttgtcgcaggcactggcgtccagggtggcgcagccatcggctgcattgcattcgcagcaatcggcgcttcgatcatggcaccgttggcatggatgaccggcctgcatcggctgggctctgctcgcgtggccgggttcttcaatctcgtcccgatcgtcactgcattgcttgcggtggtggtcctcaaagagtctctgagcacctgggtcgtgggtggcggtttgatggcagtatttggtgtggtactggcggagtacgcagctcgcaagaagcctgacgaggtcatggtcgtggatgacacctcgaccaagcgctga

SEQ ID NO: 498116 - DNA, 279 bp, Stenotrophomonas maltophilia
atgagcgaacagccataccgcttcatcaccgcggccagaagcagagcaacactgatcctggcagcatcagcactgctagctgcctgcagcggtccgacagacaagaagatggttacgaatggaacccagcagcaataccggcagtcaattgacgctatcgacgcggaactcaatgcccacgaaagagcggccttcaactgggcagtcgctgggatgaaccttgaagagggtcggcagggaatcattacgtacagggccaaaagctgcctaagcgactga

SEQ ID NO: 498117 - DNA, 207 bp, Stenotrophomonas maltophilia
atgatcatcctccacaacgtggaaggcatgagccggaccttggccgagatgaggaaggaggggattgaactgacgcccgagatcctggccggcctgtcgccttatcggaccagccacatcaatcgcttcggcgactaccacctggatcttgaaagggaagtggcgccgctgagctacacagccaaggtgcttgaacagaccccatag

SEQ ID NO: 498118 - DNA, 1038 bp, Stenotrophomonas maltophilia
atggctgccgaccagggtgttggtctcctgcaccatcagcccgtactcgccggggaagacactggcgtcgatgcgataactcagttcgccggcatcgtgacggcgggccatttcgcgctggcggccgatgaccgcatgcagctgctgctgcatgccggacatggcctccagcaggcgaccgggttcgtcatgcggctgcgggccgatatggctgtccagcttgccattggcgatgccttcggcgacggcagtagcctgcttcagcgggcgcgcgatacggttgccgatgacccagctcagggccagcacgatcagcaccagcacaccaccggagatcgccatgatggcggtgaacaccagcgcctgccgctgcacgtcgtccatgtagacgccgctgctgaccacccagttccacggcgcgaacaggccggcgtaggcgaccttctcgacctcgcccttgctgcccggcttggcccatcgatagttgacgaagccaccgccggccttggccgcttcgacctggtcgtaatagatgcgcacgccgtcgtcggtgcggaagtccttcatgtccttgccgaccaggtccttgcggaacgggtgcatcagcaggcggtagccggtgtcgtagatgttgaagtagtacgtatcgttctcggcgcgcatcacttccagggcctgcaacgcggcgctcttcgcggcgtcctcgctgagttcgccggtgccggccaggcggtggtagtgctggaggatgccgtagctgagttcgacctgggtcttcagcgcggtcttgcgggtctcggtgaggtccaggtactgcatgcgggcggcgatcaccgagagcgcgatcacgccgagcgcgatgagcagcgtcagcaggttgagcttgcgccggacggagagattgctgaagtagtgttgccagcgatgcaggagattcatcgagcaggaccaagtcgaaacgggcgggcggcgccgagccggtcagcggcgggatacgccgtgacaaccccgttatcggccgctggggcgggggattga

SEQ ID NO: 498119 - DNA, 1053 bp, Stenotrophomonas maltophilia
atgcctgacgcgccatcccgatcggcccctgccgagcgcattggcgtcgcgctgtgcacctacaacggtgcgcgctacctgcaggcgcagctggacagcatcctcgaccaggatcttccggtgaacgaagtcatgatcggcgatgacggttccagcgaccagacgctgcagctgctgcaggccttcgtgccgcgtgcaaaggcgctgggcatccgtgtcgagatcgtccagcacgcgcgcaatctcggctatgtgcgcaatttcgccgatgcactgatgcgttgccaggccgacatcctgttcctgtgcgaccaggatgatgtctggcatccggggcgtgtccgccgctacgtggagcgcttccacgccgatcagggcctgttgctgctgcacagcgatgcatggctggtggacgcgcagggcgcgctgcttggccagcggctgctggaggtactggtggtccatccggccgaggtcgagctggaacgctcgggccttgcgatcgacgcgatcctgctgcgcaacttcatcaccggtgccacctgcgcgctgcgccgcgggctgcttgccggatcgctgccggtcccgccgggctggagccacgacgaatggctggcggtccacgcatcgctgcgtggaggattggacatgctggccgaaccgaccatcgactaccggcagcatggcaacaaccagatcggtgccagtcgccgcggtttcctgcaacgcctgcgccatctcgatctgttcgattcacaggcgcgccagcgcacggccgggcgcctgctggccctggccgatctgctggggcagcgcggcgtggtggtggcgccggagcgcttccagggacttcacgcgctcgcctggcgcatggcctggtcgcgcctgcagctgtatcgccgtgtggatgtgccggcaggctggatcgcccatgatgcgccgcggttgatcgcacgcctggccaacgtctgcctggcggggggcggctggaaagggggctgggcagcgcttgcgggcgcgtgggccgggtggcgggcgccgcgcgctgcttga

SEQ ID NO: 498120 - DNA, 891 bp, Stenotrophomonas maltophilia
atgaccgtcctcgtttccggagccaccagccagatcggccggttcctgctgccgcgcctggtgcaggcgcatgggcgggtacaggcggtgagccggcaaccgcaaccggcacaggacggcgtgcagtggctgtgcggggacctggcggctgcgctggacagcgtgccgtctccggactggcaggcgattgccagcttcggcccccttgaagcattggcgcagtggttgtcgcggcagacggcggcccccgcgcggcaggttatcgccaccagttcgatgagcgtgctgagcaagcagaattccgagcaggccgacgagcaggacgtcgtggcgatgctgcagcggggcgaagcgggcctgatcgcgcaggccgagcgtcttggcatgggctggacgatcctgcggccgaccctgatctatggggccggcatcgaccgcagcatcaccccgatcgtgcagcgtgcgctgcgtctgcgcctgtttccgattccgctggtgggaggcctgcgccaaccggtgcatgccgacgatatcgcccgcgccgtggtggcctgcatcgccaccggtgcagcgtcggcacgggtgctggaaatcggcggtggcgagcgcctgccctatcacgcgatgttccgccgcgtgcacgccagtctggcacagccgacattggcgctgccgttgccgggcgcggcactgcggggcctggccgcggtgctgccgcgggcgcgtggtccggtgtcacgcctgcagcaggatctgattgcggacaatggcccgctgcaggcgctgctggacgtacatccgcggccattccagcccgacgctggcacgtggcgaccgatgagcgcggcccaggccgtgcagcggatcgctgcgtatcccggcaacggctag

SEQ ID NO: 498121 - DNA, 537 bp, Stenotrophomonas maltophilia
atgccctcgatcgccccacgtttccgtccacggctgctggcctgcgccgcactgctgctgtccctgtcggcgcctgcgctggcccagcgcgtggtggacggtgacctgcagcagcagatgtcgccgaccgaattcaaggcggccggcctggacaagctgagcgcgcaggaactggccacgctcaaccgctggctgcagggcaaggttgaagcggcgacgacccaggctgtggcagcggtacgcgaagaagcccgcgaacagggccgccaggaagtgatcgtgaagaaccgcgggttcttcgatttcggcagcaacgagccgatcaccggcgtgctgcagggcgagttccgtggcttcggcaagggccgcgtctacgtgctggacaacggccaggaatgggagcagaccgacagcaccagcgtggtcggcgtgcgcaagcaatcgcgcaaggtcagcatcaagcccggcgtgatgggcgtgtggtacatgaaggtggaaggcgtgaacagccagcccaaggtgcgccgctccaagtag

SEQ ID NO: 498122 - DNA, 939 bp, Stenotrophomonas maltophilia
atgcagcgtgtgcgtggatggagtgtggcggcctgcctggccgtgagtggctgtgcgatgtcggtggcgccgcccgcaatgcagagtgaagcgaaggacagtgcgccgactgccacgccgggtgtggtgctgccggacaccgaagcgctgcgcgtgcacgacccggtcggccgcgactatccggtctgggtggcgctgccggccgactatgcggcgcatccggaaaagcactacccggtgctgtacgtgaccgatgcgctgtacagcttcccgctggtgcgcagcgtgcgcaacatggtcgggcagaagggcgtcaacatcgaggatttcatcctggtcgggctgccgccgcaggaaggcctgacctccaagcagagccgctcgcgcgattacacgcccagcgacccggcgcgtaccgatccgcgtgattacagcgatgacgtcagctacggcggcgcggcgcactaccgcgatttcctcgctgggcaggtactgccgatgatcgatgcgcgctaccgcaccgatccggcgcggcgtgcctatgcgggtcattcctatggtggcctgttcggcgcctatgtgctgaccacgcgcccggacatgttccgcacctacatcctgtccagcccatcgctgtggttcgacgaccatcgggtgccgcgcatgcaggccgaagccaaggcgccggcgcagtcgaccacggtggtgctgtcggtgggcagctttgaaacggtcaagcccgaaccgcgttacttcacccgcaacgacatgctgcgccacaacgccgaattcgccgagcagctgcgcagcagcgggcgatcgttgaaggtggagaacatggtgatcgatgacgaggatcacttcaccgtctacccggacatgatcacccgcgcactgctgaaggtgttcccgggtaccggaccgtacagcagcggttga

SEQ ID NO: 498123 - DNA, 855 bp, Stenotrophomonas maltophilia
atgcgtctgatcgtgctgtcgctgtcgctgtcgctgttgttgtccgtcgtctccgccgcgccgctgatggccgccgaatccgcgtcgcccgccgccgccacgccgctggtcatcggcgagaccttcaccatcgagtcgaaggcgctgggcgagacccgtcgtatcaacgtctaccgcccgcagccgtgggggcgggacccgaaggcaccgctaccggtgctctacatgcccgacggcggcatcggcgaggacttcctgcatgtggccgggctggtgcaggtgctcagcggcaacggcagcatgcgtccgttcctgctggttggcatcgagaacaccgagcgccgccgcgacatgaccggccccagcaaggacccgcaggaccagaagatcgcaccgcgcatcggcggctcggcggcctaccgtaccttcctgcgcgatgaactgatgccgcaggtgcgtcagcgttacccgaccaccgaggagcgcgcgctgatcggcgagtcgctggccggcctgttcgtggtcgagacgctgctgcaggagcctacgctgttcaacagctatatcgcgttggaccccagcctgtggtggaaccgtggtgcaatgctggccggggcggccagacagctgccggcggtgacgcgtgcgcagccgcgcgtgttcctggccagcagtggtcagccggagctggcggcctctgccgcacagttggccacgctgctgcagcaggcgtcgccgtcgccgctggtgaagtacctgccgttgccggaggaaacccacgccacgatctatcatccggccgcgttgcaggcgctgcgcacgctgttcccggcgccgccgccggcctcgccctga

SEQ ID NO: 498124 - DNA, 339 bp, Stenotrophomonas maltophilia
atgttgagtgtattgatcgccaccacccttgccgccgcctcaccgcagtccagcagcactccgccagcatccgcagcgtatgcggactgcctgctcgcccacctccaaccgggattgtccgaccacgcgatcccgctgctgcagcaggcctgcgtcgcgaagtatccggagagctacgtcgcatattcagaactggaacgccggatcagcgcgcagcgccgggctgactttgacgcggctcaagcggaagccgtgcgttccgcgaatgcggcagcgacggccgcacagcaagctgccgacgcggcggccgcaaaagccaagggaatgcgggcgaactag

SEQ ID NO: 498125 - DNA, 231 bp, Stenotrophomonas maltophilia
atgggtgagggcgctttgcttgcgaagcactgcttcgcaagcgcccgaacgcacagccgccagcggctgggccggaccccggaggggggtttacggcgtgtcctgcaaacccacaccgccccgccattccacggaatgcccgcttttgatgttgatgttgcctcggcgggtgccgggcgcagcccggcaaaatccctctaccggaagatcaccgttgcctcggtgccctga

SEQ ID NO: 498126 - DNA, 2517 bp, Stenotrophomonas maltophilia
atgaacctgctgcggcatgcgtggcgcgcgctgcgccgcgaggcgctggccggtgacctgctgaccgtgttcgccgcactggtgctgggcgtggcggtgatgaccgcggtcggcacgctggtgaatcgggtcaacctggcactgaccggcagcgcagcggaaatgctcggtggcgacctcggcatcgccgggcgcgatgacccgccgcaggcgttcgccgacgaggcgcagcggcgtggactggccttcacccgcatcgccagcttcggcagcgtgctgttcaacggtgatgccagccagatggccagcatcaaggcggtgcaggcgggctatccgctgcgtggcacgctgcgggtgcgggccacacccggcggcgccctggtcgccgaggccggcatgccgcccaagggccaggcctatgccgacccgcgcctgctgcaggggctgggactgaaggccggcgacgatctcgagttcggcgctggcacgctgcgcatcgccggcatcatcgaggccgaaccggataccggtggcgacctgctgacgctctcccccaccctgctggtcaaccgcgccgatgtggagggcaccggcctgctcggccctggcagccgcatcaactaccggctcatgttcgccggctccgccgaccaggttgccgcgttgcgccagtggctgctgccacaggtaaaaggccttcgcctgctgagcgtggacgacacccagcgcggcgtgcgccaggcctttgatcttgccgggcgcttcctcggcctgagcgcactgctggcggtattgctggccggcgtggcgaccgcgctggcggccaaccgttttgccctgcgccgcatcgaccaggtggcgatcctgcgctgcctgggcgcgcgccagcgcgacatcctgcttggcctggcgctgcagctgctgatgctggcgctgccggcctgtgcgctcggcatcggcctgggcatggccgcgcaggaaggcctggtgcaggtgctgggcagcctggtgccgcagcgcttgccgctacccgaggcaatcccggcgctgaccggcgccggcatcggcctgttgctgctgttcggcttcggcctgccgccgctgctgcgcctgcgcggggtgccgccgatgcgcgtgctcaaccgctccttcgccgccctgcccccggcctcgctgctggcctacgtagcagcgctggcggcgagcctgctgctggcggtgcaggtgaccggtgatctcaagctggcgctatgggtgctgggcggcctggccgcgttggcggtggcggccggcgtggtcggtttcgtgctgctgcagctgctgcgcggcctgcagcaccgcctgcacggccactggcggctgggcctggcggcgctgacccggcgccggatgctggcggtgatgcagctggtcgggctgtcgctgtcgctgtgcgcgctgttgctgctggcggtgaccggccccggcctgctgcagcagtggcgcgagcgactgcctgcggacacgccgaactacttcctgatcaacatccagcccgaacagcgcgacagcgtgctggccgcgctgcgtggactgggcgccaacgacgccagcatcgaaccgatggccaccggccgcctgatcgcgatcaacggcaagccgccgctgcgcgtggatcgctcgccggaccagagcgggcagccggcgtctggcgaagcccagcgcgatgacgacgacgagaaccggccgttgaacttcagctggcgcagcagcttcccgccggccaatacgctgatgaacggcaccttctggacgcccgacagcacggcggcggaggcgtcggttgaaatcggctgggccaagcgctacggcgtgtatccgggcgaccgcatcaccattgcagtaggcgagcagaagcgcgagttcaccgtcaccagtgtgcgcaaggccgactggaacaccttccggccgaacttcttcgtgctgctgaatccgaatgcggtgggcgacaccccgcacaacctgctgtcggcgtttcatctgccggccggcaaggcagccgggctgggcgagctggtgcgcgcgcagcccaacctttcgctgctggacgtggacgcggtgatctcgcaggtgcgcgatgtgatggaacgggtggcacaggcggtgcagctggtgatggtgttcagcctgctggccggcgtgctggtgctgctggccgcgctgcaggccacggcgggcgagcgccgctacgacagcgcggtgctgcgcacgctgggcgcgacccggcgccagctgcgtggcgcggtactggtggaattcggcgcgctgggcacgctggccgcgttgctggcggtgggcgccgcggctgtgatcggcgtggcggtctcgcagaaggtgttcgagctgccgttgctgccgccgtggccgggcctgctggtcggcggcgtggtcggcatcgggctgagcctgctggcgggctggtggggtacgcgggcgatcctgcatacgccaccggcattggcgctgcgcgaggcctga

SEQ ID NO: 498127 - DNA, 2244 bp, Stenotrophomonas maltophilia
atgacccgccataccgccctttgccttgctgtctggatggcgctgccgctgtccgcccacgctgctgccactgctgcccccgatgcgcgcgaattcgatcgggtgcaggtcaccgccacccgcaccgagcgggcggtgagcgacgtggcggccacggtggatgtcatcgaccgtgagcagatggaccggcacctggtgcaggacatcaaggatctggtgcgctacgagccgggcctgtcggtcacccgcagcgcgacccgcttcggcctggatggtttccgcatccgtggcctggacggcaaccgcgtgcgcatccagaccgacggcatcgtcatgccgacccggttcgacatcggttcgttcgccagttccaaccgcaacttcaccgacctcgatacgctcaagcgcgtcgagatcgtgcgtggaccggccagctcgctgtacggctccgacgcactcggtggcgtggtcgcgttcgtgaccaaagacccggccgactatctcaaggacggcaagaacagctacttcggtctgaaattcggctacgacggtgagtggaagggcctgctcggcggtgtcaccgccgccttcggtggcgaccactggagcggcctggtcaacgtcaaccatcaccagggccaggaaacggacaacaaggggacggtgcgcagcgacaacgacacccgcaccgcgtccaatccgcaggatcgcgacggccgcagcctgctcagcaaactggtctatgcacccagcgaggaccaacgcttccgcctgaccgtggaaggcaacgaagacaccaccgataccaatgtgctgtcggcgatcgccagcgttgcaccgcgccccggcgcgatggctgcggccactggcatgaagtcccacgacacccagaagcgcaaccgcgtgtccttcgcccacgagatggatgcgctggaccagccgttcgccgacagcctgcattggcaggtgtacgcgcagaacagcgaaacccggcagcagaccgacgagacccgcaccgacggcacccgtcgccaccgcgtgttctccttcgaccagcatgcctatggcctgcaggcgcagttcaacaaggcgttcgccaccggcagcgtcgagcacgcattgacctacggtttcgaaggcacccgtaccgagatccgccagaagcgcgacggctatcaggtcagcaaggctggcgtggtcagcaacacggtgctgccggacaccttcccggtgcgtgacttcccgatcagcaagaccaccgagctgggcctgtatgcacaggatgagatgcgctttgccgatggccggctgtcgctggtgccgggcgtgcgcgtggaccgctacgagctgaagccggaagtggacagcatcttcgccgaagacaacccgaccacggccgtggcgcaactgaagaagaccagcgtgtcgccgaagctgggcatggtctggcgctttaccgacgaatggtcgctgttcgccggttatgcgcgtggcttccgttcgccgccgtacaacgacgtcaacatcggcctgaccaacgtcgccttccgctataccgccatcgccaacccggatctgaagccggaaaccagcgacggttacgaactgggcctgcgcttcatcgcgccggcggcgtacgtcagcgtcagcggctactacaacgactacaaggatttcatccagtccaacgtcgataccggtcgcaacgcacagggtttgaccgtgttccagtcgcagaacatcgccgacgcgcgcatctatggcgcggaaatgaaggccggcatcgagttcggcgaactcagcccggcgctgaagggctgggcgctgcgcagtgcgttggcatggtcgcgtggtgacaaccggaccgatgacgaaccgctggcctcggtcgatccgctgcgtggcacgctgggcctgatgtacgacaccgatacctggggcgtcgaactggccggtaccttcgtgcagcgcaagaagcgcctgccgccgcctgcagcgcagaccaatccgaacgcaccggcgccgttcgtctaccagccggccggctacggcgtgctggacctgatggcgcactggaacttcgcgccgggtgccaccttcaatgtcggcgtgttcaacctggccgacaagcgctacatcgaatggtcgtcgatcaccccgagcctgatcagcgatcgcgcactgagcgatcgtttcagcagcccgggccgcaccttctccgccagccttgccgtttcctggtga

SEQ ID NO: 498128 - DNA, 1221 bp, Stenotrophomonas maltophilia
atgtcctccctcgattccgccgcggccgctgtccacgcaaacggccgcgcacgcctttcggttgtcctgctggcggtgtccgccttcgtcatcgtcaccaccgagttcctgatcgttggcctgttgccggcgctggcgtgcgaccttggcctgggcatcgcccgcgccgggcagctggtcaccttgttcgcgttcaccgtgatgctggccgggccaccgttgaccgcgctgctgtcacacgtcagccggcgccgcctgttcgtggccatcctgctgttgttcgcgggttccaacgcgctggccgcgatggccacgcagccgtggctgctggcgctggcgcgggtgctgccggcactggccctgccggtgttctggggcaccgccagtgagactgctgcgcagctggcccctgcagggcagggcggtcgtgcggtcgcgcgggtctacctgggtatcaccgccgcaatgctgttcggtatcccactgggtacgttggccgccgacgccctcggttggcgcggcagcttctggctgttggcggccctgtcgctgttgatggccggcgcgctggcggtgtggatgccggacaccgtggccggaccgcggcgcgcgctgggcgaacaggcacgagtgctgcgccagccgcagttgctgggcgatgtgttgctgtcggtgctggtgttcaccgcgatgtttgctgcctatacctacctggccgatgtgctggagcggctgatgcaggtaccggcggcacaggtgggttggtggctgatgggcttcggagctgtcgggttgatcggcaatgcactgggtgggcgctgggtcgatcgtgcgccgctgggcgcgaccctggtgttctgcgcggtgctggcgctgggcatgctggccagtgtcgggctggccggccacggcacgttcgtgctgatcgcactggccctgtggggtgtggcgcatacggcattgttcccgctgtgccaggtgcgggtgatgcgtgcggcgccccaggcgcaggcgctggcgggaaccttgaatgtgtccgcggccaacgccggaatcggcctcggcgcgctgctgggaggtggggccatcgaacgcttcgggcttgcctcgctgggcgtggtggccgctgccgtggcgctgctggcaatcgtcgcgggcctgctgctgcggcagcttgcccggtctcgctcatccacgcatggcgtggatctgcctcattga

SEQ ID NO: 498129 - DNA, 918 bp, Stenotrophomonas maltophilia
atgcttcccaccgagcgcctgcgcggcatcgaggccttcgtcgccaccgccgatgccggcagcttcaccgccgccgccgaacgcctgcacctgaccagttcggcggtgggcaagaccatcgcgcggctggaggcacgcctgggcgcgcggttgttcgaacgcagcacgcgccgccttcgcctgaccgaggctggtgagggcttctatcgcacctgcgtgcgggtgctgggcgagctggccgatgccgagtcggtgctggtctcgcacgcagacgcgcccgtgggccgcctgcgggtggatgcgccggccaccttcgggcgcctcaaagcctggccgttgctgctgcagctggccgccgagtttccacagttgcatccgcaggtgaccttcagcgaccgcttcagcgacctcgccgaggacggcgtcgacctcgccgtacgcatcggcggtcccgagccgctgcccgccacgctgggcagccgcctgctcggttacgaatgcctgcgcttctgcgcctccccggcctatctgcttcggcatggccagccccgctcggccgccgagctggccgggcatgacggtgtgctgttcggacgcgcggacggcagcatcgggccgtggctggtggccgatggcaggcagcgcagtacaccgctgcaggcccgcgcgcgcctggtggttggcagcgccgaggcccaggtggcggcggtcgaggccggcttcggcatcgcgcagctggccacctggctggtcgatgacgcgctggcgcgcggcagcctggtctcgatcctgccatcgctggactgccgcggcctgccgctgcgcctgctgtggccgcagggccggcaacggctgccacgcgtggacgtggccctggaccgtcttggcgccgggttgcagatcgatccgccgcgctga

SEQ ID NO: 498130 - DNA, 1827 bp, Stenotrophomonas maltophilia
atgagtgacagcggacgaacgcctttctccacccatgatgtgaacctgccgggcggactcctgcccagccagacgcgcctgctcgccgggatcatcgcgctgttgtgcattctctacgtcgcattcgcgctgacgccatcctcctactcgctggcctacgagtatctcggcctggcgccacagaacccggtacttggcagcgcccgcatgatccgcagcgatgagtggatcgtgttcacgccctacatccagatcgcggtcaacaacgatttcggccagttcaacgcacactcgccgtaccacgagtcactgcgcaccttccaggcgctgccgctgctcgactggggcctgctgttcaagccctaccactgggcgttcttcgtgttgccagcagcgaacgcctattcgttcttcttcatgttcatggccatggccttcctgagcggatgggccctgttcctgcgccaactgcggatgccggtaccagccgcagtgctggtttcggccacgctgttcttcgcgccattcgtgcaggtctggtggaccagcaatgccggtgccttcgctctggcaccctgggccgccgcagcctggctgtgcatcggcaatcgctgggttcgcatcctggccagtgcgtacgccctcgctgtctgggtgatcgcagtgtcctatccgcccttcatcatttcctcgctgctggccatggcggtgctggtcctggccttccgtcgcgatgccctcacgcttccacgactgatcgatgccggcatcgcaggcgcgctggcattggccgtgttcatcggttacttccacgacatcatcccgatcgtgcgcaacacggtttatccgggccagcgccagagcgccggaggtggggtcgggctgacgtccctgttcgcgcacgtcttcccgaacctgatgacctaccggtttgcaccgctgccaatgttcaaaggctccaacgagtgcgagatcgccgtactcggcagcctgttgccgctgttcaccctggtccttgctgacggcgcacgactgcgcgaatgggtgcggggccaccgcggcagcgtgctggccctcgccgctggcgtactgctgatcgcctgctggatcttcctgcccgtgcccgttctggtcggcaagttgaccgggctctcgatggtgccacccgcacgcgcgctgctggcgttcggcctgctgctcaacatcggctgcgcgatgatcctggtccattgcggcgtacgcctggagcgcaggcgtctgctgctgctggctgcgctgctgatggctggcagcgtggccaagttcctgttcggcgaaggccagttcagccgcctgcacagcgccgccgatgccattccctatctctgcttggcggggctggccgttgccgcccgccgcccaaagctgtcggcgcatgcggccaccttggtcctggccaccgccgccttggccaatctgctgggcaatggcttgttcaaccctgtgcagcctgccgggccgatcttcgcaatggaccgcactgccgtcctgcactccctgcaagcccggggctcagccaccacgcccgaaggcgcgctggtggctcccggtgggttcggggccctcctgccgggtgttggtattcccgccgtgaaccatgtgctgtacctgccacagatggaatacttccgccggtacttcccattgatgtccgacgaggcgttcaatttcaccttcaaccgctaccaccacatcaccgtagcgcctgagggcgacgcaccgcaggtgctgcagggggatctggtggaactgccggcaaaggccctgctggcccaccccgccccatga

SEQ ID NO: 498131 - DNA, 1011 bp, Stenotrophomonas maltophilia
atgagtccgatgaccaccagtacgccctccgcatccacgccggctcggatcgccgtaatcatcccctgctacaaagtgacccgccacgtgctgtccgtcctcgcggcgatcgatgatgcggtaacggcgatctactgcgtggatgatgcgtgccccgacggcagcggccgcctgatccaggccgaagccaacgacccgcgtatcgccgtgctgttccatcagcacaacctgggcgtcggcggcgcgatcaagaccgggtaccgcgcggccatcgcagatggcatggacattctggtgaaggtcgatggcgatgggcagatggacccggcgctgctgatggacttcgtcgcgccgatcgccgacggccatgccgactacaccaagggcaaccgattctggaacctgacccacatccgccgcatgcccccggtgcggcgcctgggcaacctgctgctgtccttcatgaccaaggcctcatccggatactggcaggtgttcgatccgaccaacggctacaccgccatccatgccaaggtcgccagccacctgaagctcgaggcggtcagcgaccgctatttcttcgagaccgacatgctgttccgactgaacaccgtgcgcgcggtcgtgcaggatgtggcaatggacgcccactacggcgacgaaaccagcaacctgcgcatcggtcgcatcctgggagagttcagcttcaagcacctgcgcaacacgctcaagcgcattgcctacaactatttcctgcgcgacctcagcatcgcgtcactggagctgatcgccggcagcagcctgctcgccttcggggggctgttcgggctgtaccactgggtgcggtcggcccaggccgatgtcgccacgccggtgggtaccatcatgatcgccatggtcgcgctgatctccgggctgcagttcctgctggcgttcgttggctttgacattgccaacgtcccacgccaggtgctgaaccgttctatcaagctcaaccgccaaccgcagtag

SEQ ID NO: 498132 - DNA, 972 bp, Stenotrophomonas maltophilia
atgcacaggaccatcaacgccgagctcactctgttgtactggcgaatcgggcgtcgcatccatgtggaccagatggctgggcgacgtgcgcgctacggagaggtgctcttcacccggatcgccaaggcgctgtctgccgagttcggcacatccttcggtgagaagagcctgcgccggatggtgcagttctccatcgcatttgcagacgagcagattgtcgtatcgctgatacgacaattgagctggacccatttcatcgcgctgatcccactggcggacccactcaagcgcgacttctatgcacagatggccgccaccgagggctggagtgtacgtacgctgcgccagcgcgtcgattcgatgctgtatgagcgcacggcactctccagtcagccagagcagaccatcgccgaagagttggcggcactgcgcggcaaccagcagctgtctccagggctggtactgcgtgatccctacgtactggactttcttggcctcaaggacagctgggacgagcaggaccttgaaaccgcgatccttcgcgagatgcagggcttcctgcttgaacttggcacgggcttcagtttcgtcgcccgccagaagcgcatccagatcgacggcgatgacttccacctggacctgctgttctacaaccggcgcctgcgcagactaattgccatcgagttgaagatcggcgagttcaagccggcctacaagggacagatggaactctatctgcgctggctggaccggtacgaacgtgaggacggcgagcaggcgccgttgggcatcatcctctgcacagggaagaaggcgggccagattgaattgctggagctggaccgctcaggcatccatgttgcggagtacctgaccacgctgccctcccgggaggtcctcaagcaaagattgcagactgccatggagcgggcgcggcagcagctgcagaccgcggcgcccggcctcccgtag

SEQ ID NO: 498133 - DNA, 537 bp, Stenotrophomonas maltophilia
atgcaaccgcgcaagaccgatctcgcccgaaccgcgctgcaggcccaccgcgcgccgctggacatgcgccagcgccggctgctgatcctgtgcgacggccagcgtaccgtcgccgacctgaccggtctgctcggccaggaagcaccggcgatggtcatccagctcgtacaggcggggtacctgagcaccggcacaggcgccacgaccccagcaccgtcgaccgcagccgcggtggcgccggtgcccacgccgccggcagccacacctgctgcacccgcggtcgaacgccgacgctcgctggtggcagcgcgcatctacgtgctgggcatcctggaaatgcagcggcatccacaggcggcggcgctgttccgcgacctgcagcaagcgcgtgcggaggacgaggtgctgcagcgactgcagtcggcaatgcagctgctgcccacgctcacttcggatggctattgccagcgcgtacggcagcgcctgctggaggcgttgccattggagcattgcgacgcgttcgccgaggtcgcctga

SEQ ID NO: 498134 - DNA, 1335 bp, Stenotrophomonas maltophilia
atgcccaacgacggcggcgagcagcagcccttcgtgccgcgtccgcacgccaacgtgccggaaggcttcccggtctattcgctgagcgacctcaagcgcatgccggcacagaagctgctggaaatcgccgagcagctgcagatctccgaaggcgtggcacgcgcccgcaagcaggatgtgatcttcgccctgctgaaggtactgacccgccacggtgacggcgtcgccgccgacggcgtgctggaaatcctgccggacggcttcggcttcctgcgcgcggccgaagccagctacctggccggcccggacgacacctatatctcgcccagccagatccgccgcttcaacctgcgcaccggcgaccatatctccggccgcatccgcttcccgaaggacggcgagcgctacttcgcgctgaacatcgtcgacaccatcaacggcgagccgatcgaagcgtcgaagaacaaggtgctgttcgagaacctgaccgccctgttcccgcgccgccgcttcaccctggagcgcggcaacggttcgtcggaagacatcaccggccgcatcctcgacctgatggcgccgcagggcaagggccagcgctcgctcatcgtgtcgcagccgaaggccggcaagaccatgatgatgcagcaggtcgccaccgccatcaccaccaaccacccggacgtgcacctgatcgtactgctgatcgacgagcgcccggaagaagtgaccgaaatgcagcgcaccgtgcgcggcgaggtcatcagctcgaccttcgacgaaccggccgcgcgccacgtgcaggtggccgaaatggtcatcgagcgcgccaagcgcctggtcgagcacaagaaggacgtggtgatcctgctcgactcgatcacccgcctggcccgcgcctacaacaacgtggtgccgagctcgggcaaggtgctgaccggtggcgtggacgccaacgccctgcaccgcccgaagcgcttcttcggtgccgcgcgcaacgtggaagaaggcggcagcctgaccatcatcgccaccgcgctggtcgacaccggctcgaagatggacgaggtgatctacgaagagttcaagggcaccggcaacagcgaagtgcacctgagccgtcgcatcgctgaaaagcgcgtgttcccggcgatcgacatcaaccgttccggcacccgccgcgaagacctgctgatcgagccggaactgctgcagaagatctggatcctgcgcaagctgctgcatccgatggatgaaatggccgcgatggagttcctgctcgacaagatgaagaacaccaagtccaacgacgagttcttcggttcgatgaagcgctga

SEQ ID NO: 498135 - DNA, 888 bp, Stenotrophomonas maltophilia
atgatgcgttcccccctgtttctcgctctcgcgttggccgtcggtgccggcgctccgctgttcgccggcgatgccagcgcgcagaccacgcgcgcggttcgtgccactgcggagatgagcatggtgctctctggccatatcgaggtcacgcccgagggcgcggtcagttcgttggtactggaccagaagtcgatgctgtctccgagcatcgcgtccttcgtggagggcaccatcggtggctggcgcttcgagcccaccctgcgcgatggcacggcggtggcggcgcgtgcgccattgcgggtgcgcctgcggggcaaggccatggccgatggtggctacgaagtcagcatgaccagcgtcaacttcagcgagtacgatgagaaagccacagattcggtgacccaaggtcgcatggcgcccccgcgttatccggaagaggtctatcggagtggcggccaaggcgaagtgctgctggtggtcaggatcgcgcgtgacggcacggtggccgatgtcgttgccgagcaggtgaacatgaccgtagtcggacgcgagcgcacccttgccaagatgcgcgaaatcctggccagggccgccgtcagcagtgcccgcaagtggacgttcaacccaccgaccaccggcgaagccagcacccgcgacagctggacggtacgcataccggtcaatttcggcctgaacgatgatcccaatggagcggagcgctatggccgctggcgtgccttcatcccgggcccacggcaggccgtgccgtggcggaaggcagatgcgatcgagcaggccggcagcgacctgctgcccgagggcggcatctacatggtcgacggcgccaagcgcggcctgcgcctgctgacgccgctggagcagggctga

SEQ ID NO: 498136 - DNA, 2223 bp, Stenotrophomonas maltophilia
atgtccaagatcctctacacgctgaccgacgaagcaccgttcctggcgacccagtcgctgctgccgatcgtcgacgcctataccgccactgccggcatcgtggtggaaacccgtgacatctcgctgtccggccgcatcctgtcgcagttcccggaactgctgtccgacgcgcagaaggtcagcgacgacctggccgagctgggccagctggcgaccaccccggacgccaacatcatcaagctgccgaacatctccgcctcggtgccgcagttgaaggcggccatcaaggaactgcaggaccagggctatccgctgccggattacccggaaaccccggccgacgaccagcagcgcgactacaaggcgcgctacgacaaggtcaagggcagtgcggtgaacccggtgctgcgcgaaggcaactccgaccgccgtgcaccgctgtcggtgaagaactacgcgcgcaagcacccgcaccgcatgggcgcctgggcgtcggattcgaagtcgcacgtcgcgcacatggccgccggcgatttctacggcagcgagaagtcggccaccctggccaacgccggtgcgctgaagatcaccttccacggcaaggacggcagcgccgtcgtgctgaaggaaaagaccgcggtcaaggccggcgagatcgtcgatgccgccgtcatgagccgcaaggcgctggccgcgttcatcggtgagcagatcgccgatgccaaggcccagggcgttctgttctcgctgcacctgaaggcgaccatgatgaaggtctccgacccgatcatgttcggcgtggcggtcaacgagttctacaaggacgtgctggccaagcacgccgacgtgctcaagcaggccggtttcgatgccaacaacggcatcggtgacctggccgcgcgcctgccgtcgctgccggaagccacccgcgccgcgatcgaagcggacctggccgccgagtacgcgcagcgtccgggcgtggccatggtcaattcggacaagggcatcaccaacctgcacgtgccgagcgacgtgatcgtcgacgcctcgatgccggcgatgatccgcgactcgggcaagatgtggaacgccgaaggcaagctgcaggacaccaaggcggtcattccggaccgctgctacgccggcgtgtaccaggccgtcatcgacgactgcaaggcgcacggcgccttcgacccggccaccatgggctcggtgccgaacgtcggcctgatggcgcagaaggccgaagagtacggttcgcacgacaagaccttccagatcgccgccgacggcgtggtcaaggtcaccgacgatgccggcaacgtggtgttcgaacacgccgtggaagccggtgacatctggcgcatgtgccagaccaaggacgcgccgatccaggactgggtcaagctggccgtcgaacgcgcccgcctgagcagcacccctgccgtgttctggctggatgccgcccgcgcccacgacgcgcaggtcatcgccaaggtcgagcagtacctgaaggaccacgacaccaccggcctggacatccgcatcctgccgccggtggaagccaccgcgttctcgctggaccgcatccgcaagggcgaggacaccatctcggtgaccggcaacgtgctgcgcgactacctgaccgacctgttcccgatcatggagctgggcaccagcgccaagatgctgtcgatcgtgccgctgatggccggtggcggcctgttcgagaccggcgccggtggttcggccccgaagcacgtgcagcagttcgtcgaagaggactacctgcgctgggattcgctgggtgagttcctggccctggccgcgtcgctggaacacctgggcaaccgctacgacaacgccgccgcccgcgtgctggccaaggcgctggacgaagccaacggccagttcctggacaacgacaagtcgccgtcgcgcaagctgggtggcatcgacaaccgtggcagccacttctacatcgcgctgtactgggcgcaggcgctggccgcacaggacgaagatgcggcactgaaggcacgcttcgcaccgctggccaaggcactgaccgacaacgagcagaagatcgtcgaagagttgatcgcggtgcagggcaaggccgtggacatcggcggctactaccgcccggacgtcgccaaggcgagcaaggcgatgcgcccgagcgcgaccttcaacgccgcgctggagcagctccgcggctga

SEQ ID NO: 498137 - DNA, 228 bp, Stenotrophomonas maltophilia
atgcatggcgtggatccactgacggcggcgttcgcgcagatccacgccgtgcgtggatggatcacagcgttgccgccgtgcagtaccgccgcgtatggcgccgctttgccccgcgcggctgaaaacgcgacaatgcaggggtttccccgccgcgcgcccaccctgacggcgacgggggaaagcgacacggttgcacgtggcccggcgctggcgccggccttcccctga

SEQ ID NO: 498138 - DNA, 279 bp, Stenotrophomonas maltophilia
atgaataccgctactccgcaggtcccgaacaacctggtctgggccatcctgaccaccctgttctgctgcctgccggccggcatcgtgtcgatcgtctacgccgcacaggtcaacggcaagctggccgctggcgacatcgccggcgcccaggactccgccgccaaggccaagaagtgggccatctggtcggccattgcctgggccgtgctggtcgtgctgtacgtgctgttcttcgtcgtgctcggcggcatgggcgcgatgagcaacagcggctactga

SEQ ID NO: 498139 - DNA, 1848 bp, Stenotrophomonas maltophilia
atggataccgcgctgacgctgaccaacgacatgaagctcgtgctcgggctggtcggcttcacgatggcgatgttcctgttcgagcgcatccgcgccgacgtggtcgcgctggtggtactggtggtgctcggtgtcaccgggctgatcgcgccggaggaaatcttcggcggcttctccggtaacgcggtgatgagcatcatcgccaccaccatcctcggtgccggcctggaccgcaccggggcgctgaaccggctggccgcgtggctgctgcgacgcggtcatggcgtcgagcagcggctgctgatgatgaccacggccattgccggcctgaactcgtccttcatgcagaacccgtcggtgatggcgctgtacctgccggtggcttcgcgactggcagcgcgcaccggcctgaccctgcagcgcctgctgctgccgatttcggcggcgatcgtgatgggcggtgcgctgaccatggtcggcaattcaccgctgatcctgctgaacgatctgctggcctcggccaacaacaacctgccctcgggcctggccaccatcgagccgctgcgcatgttcgcgccgctgccgatcggcgtggcgctgctgatcgcctcgctgctgtacttccgctactacggcgaccgcaagctgatcgaggaagagaacctggccaacgacggggtcaccccggcgcgcaccgaaagctacttcgccaagacctatggcattgaaggcgatgtgttcgagctggtggtcagtgccgaaagcccgctggtcggcatgaccctgggcgaggccgagaacctgcacgatgccccgctgctgctggccctgaagaccggcaacgacacccgcctggcgccgccggcggagatgcgcatctgggtgggcagcgtgctcggcgcaatgggtccgcgcgagcagatcaacgacttcgcgcagaaccagttcctgcgcatgtcttcgcgcctgaagcacctgggtgacctgttcaacccgagccgcgccggtatttccgaggcggtggtaccgccgacctcgaacgtgataggcaagagcgcggccgacctgcgcctgcgcaaggagcgcggcatcagcctgctggcgatcaaccgcgacaagcaggtgatccgcgaggacgcgcgcgacgtgcagttgcgtgccggcgacatgctggtcttccacagcatctggaccgacctggcacaggcggccaagagccgcgacttcgtagtggtgaccgactacccgaccggcgaacaacgcccgcacaaattcaagatcgccatggcgatcttcgcgttgaccatcctgatcgcgctgaccagcaagctgccggtggcgctgacgctgatgaccggcgtggccggcatgctgctgaccggcgtgctgcgcatggacgaggcctatgcctcgatcaactggaaaacggtgttcatgatggccgggctgattccgctcggctgggcgatggactccagtggtgcggcggcatgggtggccggccacaccatcgacaagctgcccaccggcatcccggtgtgggtgctggaggtggcgctggcgctgctgaccacggcgttctcgctggtgatcagccatgtgggcgcgaccatcgtgatggtgccgatcgcggtgaacctggcactggcggcgggcggcaacccgaccgcgttcgcgctgatcgtggcgctgtcggcgtccaacaatctgatgacggcctccaacccggtgatctcgatgatcaccggcccggccaactacaccccgcgcgagatgtggcgggtcggcggaccgctgtcgctgatctacacctgcgtggtggtgctgatgatcaacctgatgttctga

SEQ ID NO: 498140 - DNA, 735 bp, Stenotrophomonas maltophilia
atgaccaatcctttcgacagcgccggttccaaggctccgcccaagcccttcaccgtaagcgaaggccgccgcgaggtgcgcagcttcgtgttgcgccaaggccgcttcacccccgcccagcagcgcgcgttcgatgaacgctggccgcgcttcggcctcgactacaccggccaaccgcgtgacctggacgccaccttcggccgcccggcacacaaggtgctggaaatcggcttcggcaacggtgccgcgctgcgcttcgccgcccagcacgacccgtcgcgcgattacatcggcatcgaagtgcacgccccgggtgtgggcaggttgctgaacgcgctggccgacgacaacgccgaccacgtgcgcctgtaccaccacgacgcggttgaagtgctgcagaacgagatcgccgatggcgcgctcgatgaagtgcgcatctacttcccggacccgtggcacaagaagcgccacaacaagcgccgcctgctgcagccggcgttcgccgaactgctggtgcgcaagctgcgcccgggcggccgcctgcactgtgccaccgactgggaggactacgccgagcagatgtgggacgtgctcgatgccaccgccggcctggtcaaccgtgccggcccgcgtggcagcgtgccgcgcccggactggcgcccgcagacccacttcgagacccgcggccagaagctcggccatggcgtctgggacctgctgtacgaccgcacctga

SEQ ID NO: 498141 - DNA, 795 bp, Stenotrophomonas maltophilia
atgaacgttcatgtctcccccgattcgctggtgatcgccggcaagacctatggctcgcggctgctgaccggcaccggcaagttcaaggatctggaagaaacccgcctggccaccgaggccgcgggcgcccagatcgtcaccgtggcgatccgccgcaccaacatcgggcagaacccgggcgagccgaacctgctcgacgtgctgccgccggagcgctacaccatcctgcccaacaccgccggctgctacaccgccgaagacgccgtgcgcacctgccgcctggcccgtgagctgctggacggccataacctgaccaagctggaagtgctgggcgatcagaagtcgctgtacccggacgtggtgcagaccctcaaggctgccgagcagctggtcaaggacggcttcgaggtgatggtctacacctctgacgatccgatcctggccaagcgcctggaagagatcggctgcgctgcggtgatgccgctggccgcgccgatcggttcgggcctgggcatccagaacaagtacaacctgctgcagatcatcgaagacgccaaggtgccgatcatcgtcgacgccggcgtcggtaccgcgtcggatgccgcgattgcgatggaactgggctgcgacggcgtgctgatgaacacggccattgccggtgcgcgccacccggtgctgatggccagtgccatgcgcaaggcggtcgaggccggccgcgaggccttcctggccgggcgcatcccgcgcaagcgctacgccagcgcctcctccccggtggatgggctgatcggctga

SEQ ID NO: 498142 - DNA, 201 bp, Stenotrophomonas maltophilia
atgaacatccagctcaatggcgaaccccgcgccctgcccgcttcggcaaccctccacgacctgctcgaggccgaacagttgctgcagcgccgggtggcggtcgaggtcaacggcgagatcgtcagccgcagccgccacggcgagcacgtcctggccgaaggcgacgtggtggagatcgtgcacgcgttgggcgggggctga

SEQ ID NO: 498143 - DNA, 1836 bp, Stenotrophomonas maltophilia
atgctgctcagcaaacgcccgatccgcaccctgatggcggccgcgatcgcgctggccgcgcttccggccatggcaggcgaatccccgtattccaaggccgtgttcttcggcgacagcctgaccgatgccggctatttccgcccgctgctgccggccgatgtgcgtccggtgaccggccagttcaccaccaacccgggctgggtgtggtcgcagcaggtcgccaactactatggcctcaatggcgccgccaatggcaacggccagaacggtgacaattacgcggtcggtggtgcccgcgttggcgtggacgtgccgagcgcaatggggactatcccctcgctgaagtcgcaggcggcccgttatctggccgccaacggcggcaaggctgacggcaatgtcctgtacacggtgtggggcggcgccaatgacctgttcgccgccgcagctgcgccgacgcaggcacaggccatcatcggcgccgccgtcaccgaccagatcgctctggtgggtgcgctgaagcaggccggtgcgcagtacgtgctggtgccgaacctgccgaatgtcggcctgactccggccttccgcggcccgaacgcggccaccgccaccgcgctgtcagccggctacaacaaggctctttatggtggcctgaagcaggccggcatcgagttcatcccgctcgataccttcaccgtgctgggcgaagtcgccgccaatccggccatgtacggcttcaccaacgtcaccagcaccgcctgcaagatcgatccggccaattcgacccagagcatcctgacctgcaatccgaccagctacgtcagcccggatgcggccaacacctatctgttcgccgatggcgtgcatccgaccacggcgggccaccagctgctgggccagtacgcggtctcggtgctggaagccccgcgcctgcagcaggtgctgagccactcggcacagaccatcggtcgttcgcgtgccgatcaggtcagcatgcacctgggcggtcgtccggccgacggcctgtcctggtggggcggcgtccgcggtgacctgcagcgctacgaccacgcggatctgtacgacggcctggcgccggccggcctgttcggcatcgactgggcgcgcgacggcatggtggtcggcggcttcgccggcttcggccgcctcaacgccgacttcggcaacagccgtggcgatttcacccagaaggacaccaccgccggtctgttcgccggctggtacggtgatcgcatctgggtgaacggtcaggtcagctacacctggctgtcgtatgacgtgaaccgcaaggtccagctcggcccggccacccgcgagcacggtggttcgccggacggcagcaacctgaccgccgccctgaacgccggctacgagttcggcgccgaaggcggcttccgccacggcccgatcgcttcggtgatctggcagaaggtgaagatcgatggttacaccgaaagcgctgcggccggcaccctggccaccgcgctgggctacgaccgccagaacgttgattcgaccgttggtcgcatcggttggcaggcccgcttcgatggcggcaccctcaagccgtacgcgcagctgacctacgaccatgagttcgaagacaccaagcagggcagcgcgtggctgcagaccttgccggaactgggcagctaccgtgtgccgggcctgaagttcgacaaggactacgcgaccgtcgtgctgggcgcccgcaccgaactgttcgggctgcagagcaacttcggcctgagcgcttcggccgggcagaagcgtgcccaggacgcaacgctgttcgccaacttcagcggcaccttctaa

SEQ ID NO: 498144 - DNA, 405 bp, Stenotrophomonas maltophilia
atgatcgctgcacttgtgcccatcaggcgatgctttgatttttccggacgatccgaccggcgggagttctggtcgtattcgctgctggccgggttcgtgatggcggtgagctacagcgtgatggatcgcggttactggctggtcgggtacctgtcattggattgggaaacgtccgagagcctgtggaaggtgggatgggtcatgaccgtctgcgctgtcttcgtcttcctgcctccgatgctggccctgaccgtgaggagattgcacgacatcgacgagtcaggctggtacaccgtgatcgcgttcattcccttgggggtgttcgtcctctttccagtcatgctgcttcccgggagcgaggaagagaatcgattcggcgcagttccaggagcgcaggatgcttga

SEQ ID NO: 498145 - DNA, 1233 bp, Stenotrophomonas maltophilia
ttgaaccggcatcggccgcaatcgatcggatcggcattgaagacgtcgacggttcgctggggcgcctctctcatccgcatgtcccttgatcgaaccgccctgcggcgctacacccagtggttgccgttcctggccctggtcgccgtctgtgtggcctggtggtcgcctttgggagtgattgccggccttgccgtgtgccttgcgttggggggcgcgctgcagcgaatcgatctggtcggcaatgccgtgggcggttcacgactgcgctcgcaatcgatgaagccctttgccgaacggccgcccgcacatgatgtgctgttggattggggcgagctgggcatgggcggaccggcgtacagcacgcagatgctgcgcgatggcgccatcgtcgaaggcgtatccactggaggcagtcgtgatgccagtggtgaatggcaggacctgccgggaggcgcgctgcgcctggccagcgggtatgttgatcgatgcgaagcagtgatcgtctacgacgagcgccaaaagacggtgcaggtgcttgcggctgatcccggccagttccggcagcagctgggcgagcgcctgcagaccgatggggaggcgggggcggcgtcgtggctgcgcagccagtccggcggcctgacccagctgcattcctgccgaggcctatggctggagcacggccatccggcgctggccgccggatggccgcgggagctgaggcacgtcctgcctgatgcccgggtgctgcgcgcggtcccactgcttcccgatgatctgcgcgtgactgcgcatccggccctgttcgcgtgcatctgcccgtatgccctttaccttgacgagatctccagtggtcgccatgcctgtgatctggagaccgtgatcgcgagcccgtcgggacgctgcctggtggtggccggcagtgtgcttgatgagaacctgcgacccatcgagggcgtgtggcttgtctgctggcagggtcgttggcaagcctttgcccgtcatgcgatggggggcttcggcaaggcccggagcatggcctggatcaatgtgatcgatgctgacgatgacggcacactgcagtgcgaagcctatgaggaacgctgggagttcgatgccgtccatcgataccccacgcgccacacagccttggagctgcctgtggaatggcgggaaaccgggttggctctgcgcgcccgggatgggcgcttcaggctgcgccttccctcgcgctga

SEQ ID NO: 498146 - DNA, 438 bp, Stenotrophomonas maltophilia
atgtcgatcaccgtattcccgcgcttctccgaagtggatgtactcggccacgtcaccaacaccgccctgcccgtctggttcgaggaaggccgccaggagatcttccggcatttcagccgcgaggccagcatgcgcgacctggcactgatcctgcgccgctacgagatcgacttcctgcagcagatacaggcgggacacgaagtgcgcatcgagacccggatcgagagcattggccgctcctcgctgtcgatcgtgcaacaggcgttccagttcgaggccctggtagccagcgggcgctgcgtgatggttcatttcgactacacggccaacgcctcgcgcgagatcgatgcggagcagcgccaggcgttgtcggggctgttcaccgaggaatatgcacagtcgctgcgggaaacgagcgcgcgcgccgccgaggcctga

SEQ ID NO: 498147 - DNA, 477 bp, Stenotrophomonas maltophilia
atgtaccgcatcacgatgatcgcgttgttgctgggcctggccggatctgctgcggccaagccggagaaatccgttgtgcagatggaccggcagtcgccggtggccgagcaggtgcgccaggtcgaaaaggccctggatgatggcgattacagcgagatttccgctgatgaccgcagcaccgtgcgcgaagcgctggcccggatcaccgcgcggatgggcggccaccagagcgtgcaggaactgccgccgcaggtgcagggggaggtcttcaacgaccaggagcggatcaacaccctgctcacccgcgcccacgaggacagccggcagatctgccagcacacgcgcagcaccggcagcaacatgcccaaaagccgctgcctgacggtggccgagcgccgccggatcgaggaaaagggcaaggcgctgttgaacgaccagcgcaccttcaacaacttcaaccctgccagctcgcggtag

SEQ ID NO: 498148 - DNA, 471 bp, Stenotrophomonas maltophilia
atgaaacaggctttgatgtcggccgtcctgttgtcaggactcgccctggtcagtaccgcatcggcatccaggggcaaggacgtgttcgtgcccggccagccgctgcagcagcagatcgcgcgtatcgaggtggagctcaaggacggcgaaacctattcggaactcaagcaggacgagcgcacccgcgtcaacgacgccctggcacgcatgcgggcagcggtggagcagtacccggcacgcgattccatgcctgaaccggtgcaaacccaggtcttcaacgatcagcaggtcgtgaacacggttttgacacaggcgcgtgaagatagtcgtctaatatgccaacgtgaaaagcccatcggttccaaccggaccacgacgcagtgcatgaccgttgccgagcgcgctcggcagaaggaacgggcacagcaggacatgaggcaggtcatgcgcgccggcagtacagtcaattag

SEQ ID NO: 498149 - DNA, 387 bp, Stenotrophomonas maltophilia
atgtccacccgcccgctgttcccccagttgcacgccctgatcggcgatgccgcccatctgctgcctgccgacgtcgccgagcgggtcgaagttctgctggatgaccccagggacctgctgcccgccctgctggcgcgcatggatggccgcgacgccgccgacggccagcggctggatgtgcagggggccagcccggcgcaggccgccacgatggctggtctcagccgcacgcttgccggcctgaataccctgatccagctgctgcacgctgccgaaatcgcgcgggagcagggtggcgcccgccagcagctcaatcccgatgtggtcgacggcctgctgttgggcgcccgcgaactggcccgctacgcccgccagcagctggagtag

SEQ ID NO: 498150 - DNA, 423 bp, Stenotrophomonas maltophilia
atgaagaaccagaagggcttcacccttatcgaactgatgatcgtcgtcgcgatcatcgccatcctggccgccatcgcgctgccgatgtaccaggactacgtggccaagtcgcaggctaccgctggcctcgccgaaatcaccccgggcaagacccaggccgaagtcctgctgaatgaaggcaaggactacgccgacgccgatagtatcggtctgaccgccaccaccgagcgctgcggtattgctggtaagggcgtcagcaccactggtattgcgaacatcgaatgcacactgaagggcaattccaaggttgccaccaagaaggtgactctggagcgtgacggcgctggtgcttggaagtgcaccaccacgctggatgcgaagtaccgtccggccggttgcggcgatgctccggcggccccgtaa

SEQ ID NO: 498151 - DNA, 414 bp, Stenotrophomonas maltophilia
atgaagcgtccaaccgaaatgggtttcaccatcatcgaactgatgatcgttatcgcgatcatcgcaattctctctgccatcgctgtgcctctttaccaggtctacatggccaaggcgcaagtaggcgcagctttggcggatattcgtcctggtaaaaccacgatggaatacgtggcccaagatgcgaaagatgccagcgttgtaacggcaacttatatcggtctggtcccgaccgagcgttgcccgactatggaagcgaagctcgacagcgccggtgtcggcagcatcacctgcacgctgcatggcggaactggggtggacggcaaggacctgatcctgcgccgctccgccgagggcatctggagctgcgatggcagcgcgttcgaagcgcgctatcgcccgaccggctgctga

SEQ ID NO: 498152 - DNA, 1125 bp, Stenotrophomonas maltophilia
gtggcggctgccccacccgcaccgggcgatctgctgtctgctgccccctatcgcgcgtcatgggtgccgtccaaggccgcgcaggcctacaagctgcactaccgcaccccggatcatcgcggccagctggccgaaggcaccggcctgctgtacctgcccgccggcgcggcgcctgcaggcggctggccggtggtgtcctgggcacatggcacccagggcatcgcggatcgctgtgcgccctcggtgtccggcccctaccaacccgaacgcgacggccgcttcctcgatcagttcctggcacagggctatgcggtggttgctgcggactaccagggcctcggcagtccaggtgaccatgcctatctgcatgtgcgcactgccgcgcgcaatgccatcgacctcgtcaaagccagccgccagtatctgggcaccgcaacgctgtcgccgcgctgggtctcggtcggccattcgcagggtggtgccgccgcgctcactgccgggcatctggcgcccacctatgctggcccgtcgctgcactaccgcggcagcttcaccaccggcacgcccaccgccgtcgagctgaccgcactggtgatgaagccggacaaccgcaccgccaatcctggcgcgctcaacgcgtatcacgcgtatctgctcgacggtctgctgcaggttgcgccgcagatcgaccgcgtcctcagcgacaccggccgcacccgcgtggcagtggcacgcgagcagtgcctgggcgaactggccaccacgctggacggcgcggataccggcagcatgttcaccgcaccgctgaccagcgtgccgggcatctgggccgtgctgtacgactatctcggcgtaccgcgccgcggtttcagccaaccgctgatgctgggccacggcagcgaggaccgcgacgtcccctatctgaccaccctgctgtatgccgcaggcctggcgctgcgcggcgagccggtagcgttccggcgctacccggtcgaccatcgcggcacgctggacgctgcggcggcggatggcctggcattcgtacgagcccggctgggggacggccacttcaacgacgctgcggaaaccgccgacctcgaacagctgctcgacgacgcccggtag

SEQ ID NO: 498153 - DNA, 3600 bp, Stenotrophomonas maltophilia
atgcgtagctgggctgttcgcgggctggtcctgctgctggccgtgctggtgctgcccgtggcgctggcacaggctgtgcccgggctgttgccgctcagtcccctgcagcgcgagtacctcgccgcccatccaagcatcgtcgtgggccagtatgacagcggctggccgccgttcgagtccctccgtgatggccaccaggttggcctggggccggattatctgtcgcttctcgcccgtcagctgggtgtgaaggtcgaggcgaggcgttattccgactggacatccgtgctggatgcggcctgtcgtggcgagatcgacgtggtaatgaatgtcggtctcagtgccgaccgcacccggtgcatggtctataccgctgcctatggcgaggcgccgttggcgctggtggggaggccgggcgatctgcgtgcttcgaacatgcccgacctggacggattgcgggtggtcatcgagcaggatttcctgaccggaccgcaggtgcgggcacgtttcccgcgtgcggtgcagcttgtcgcaaacagctcgttggctgcgctgcagatggtcagagacgacaaagctgatgtctacataggcaatgcctacgttgccaccgaactgatcgcacgccagcacctgcagggtgtcgtcctgctgcgtccgagcgacctgcctcccgaacggatgcacttcggcgttcccaacagcaagcaaccgctggccgaagcgctggacctggcgctggccgcgaccagccaggcccagcgcgatgcactggcacaacgctggctgcccctgccgcagtggtcggcatcggcgcagctggcgctcagccaggccgagaagcgggttctgcaacagccgttgaagatcggcttcgcgccgaacgccgccccattgtcgttcgccgacgaggatggcaggcccagcggcctggccagcgagtacctggcgcggctgatgcaggccggtgccaacctgcaggcgcagaacagccatgactggtacgaggtgcgcgagaaggcgcgccgcggcgagttgcaggcggtgatgggcattccggtcgattcgcactatctgggcccggactgggtgtacagccaacccttcatcagcgtgccgaacgtgatcgtcagccgacacgacagcccggcgctgctgggcctgtccgacctccaggacaagcgcgtactgctgtcggatccggagcgcgtacgcggttacgtgctgcagcaggcgccgcaggccaggatcgtcgccgcgcgcagcgccgaacaggccatgcaacgcctgatcgatggcgaggccgacgcctacgtgggcaatctggccctggtcgaccacctgctgcgcacgcgtttcccggggcgcctgcaggttgccgcgcccgcgggcttcaacgaccagctggcactggccgtggagcgccggcatgcggcgctcgccacgaccttcgatcgcttgctgctgcagatgacgccacgcgagcgcgaagcgctgcgcggcgactggctggcggtggagtaccacaacggcatcgactggcgaagcacgctgcgctggggtgtaccgctgctgctggtgctgctgaccgcgctgctggtgcatggcatcggctactggcgcctgcgccgcgaggtggccgggcgccgccagctggaacagcgcctggccgaagtgaccgacaacctgcctgccgtggtctaccaggcccgtcgcgaggtcgatggcacgctccgcttcccgttcattgccggtgacctccaggcgctgttcgggatcacccggcagcaggctgagcaggacgccacaatgttgctggaacgcgtcgaagaggacgatcgcgcgcgcatcctgcaggcggtcgaacaggccgcgcaccagttcgcaccgctcatgctggaattccgcctgcggggcaatggagcaggcccgcgttgggtgcgcacccaggcgcaaccctatgccgccgaagccggtgtggtgacctggagtggctactgggtggatgccagcgaggctcgtgcacaagcggatgccctgaccgcagccaaggccgaggccgagcaggcggccgaagcgaaatcccgcttcctggccaccatgagccatgagatccgcacgccgatgagtggcgtgctggggatgctggaagtgctggcgcactcaccgctggatgcagagcagaaacgcatccttggcgtgatcgaggattcggcgcagatgctccggcagatccttgacgacatccttgactactcgcggctggaggccaacgcattgcggctggagccggtaccgcagccgctgcggccgttgctggaaagcgtgtgccggttgttgtcggcgcaggccagtgcacgtgggctggacctgcacgtgcagatcgatccgcagctggcagccgcgcacgaagtggatggcgtgcgcctgcgccagatcgtgttcaacctgctcagcaacgccatcaagttcaccgtgcgcggcgaagtgcggctgcagctggaagtgctggggccgaccgccgaagacggcagccagccgctgtgcctgagcgtcaccgataccggcatcggcatcgcaccggaacagctgcagcacctgtttgcgccgttcacccaggccggtgcgtacatccagcgcgaccatggtggaaccggcctgggcctgagcatctgccagcgcttggtgcagatgatggacggcgagctggaactgcacagcacgctgggcgagggcacccgcgccgaggtgcggctgtcgctggtggaagccggcagcagtgatgttgaagcgctggtcgccgagcaggaacaggcggcgctgctgccgccggcgctgcgccaggcacgcgtgctggtgatcgaagatcatccgaccaaccaggcgatgatggcctggcggctgcagcaactgggtgtaccgtatgtgctggtcggcgatggccagcaggggctggatcgcctggcatcggagcactttgatctggtcattaccgattgccggatgccggtactggatggtttcgccttcacccgcctgctgcgcgaacgcgaaggccgcaacggccagccgcggctgaccgtactggcgctgaccgccagcgtgctggacgacgatgcacgtcgttgccgtgaagccgggatggatgaggtgctggccaagccattgtcattggcgacactgcgcgcggcactgctgcgctggttgccgcaggcgcaggggcaacggttcgaggagccgctggccgagtccgctgccgtcgatgacaggacgctgcccgatctggacagcctgcagcggcgcttcggctcacgtgcggtggccgagcagttgcgcgacagcctgctgcaggccagtgcaggtgacctggccgctgtgcagcgcgcgctggaggccggcgaccgcgaggctgccgcgctgcacctgcatcgccaggccggtggcttgggcgcggtgggagcgacggtgctggctgcgcaggccaatgccctggtcgagcgcctgcaggatgcgaccgagaccgatccggtgccgttgttcaccgcggtggcggcattcgtggcgcggctgcaacagcagttgcagcgcctggctcactga

SEQ ID NO: 498154 - DNA, 477 bp, Stenotrophomonas maltophilia
atgaacgccaagaccattgccatcgccatcgccctgatcgccggcaccgcggttgtttcgtcggtgcaggcctccgaatccatcaagaccctgtccaccgtgcaggttcgcccggccgccgaccagttggcccagcgggcctgggaacaggccagtggcatcccgaccctggccaccgtggaagtgcgcccaagtgccgaccagctggccgagcgcagcggctacgtcgccgccccggtcgccgccgcgatgccgatcaccaccctggcctcggtggaagtgcgcccgagcctggaacagcgcgtcgccctggccgccgagctggaagcccagcgctacgccgccaccctggccgcagccgccaccagcgtcgccaaccaggtgatcgtcaacctgccggccctgcaggtgcgtccgagcgccgccgacctgcaggccctggccaccgaaaccgcccagatcctgctgcgcccgtaa

SEQ ID NO: 498155 - DNA, 1131 bp, Stenotrophomonas maltophilia
atggggccacgcaacgcacaggacatcgcactccccatggcacggacccgggttggcattattttcggcggcaagtcttccgagcacgaagtttcgctgcagtcggcgaagaacatcctcgatgcgcttgatcgcgagcgcttcgagccggtgctggtcggcatcgacaagcagggccagtggcatctgagccagccggataccttcctgatcaatgccgatgatccgtcgcgcatcgcgctgcatcgctcgggccagtcgctggcggtgcgcccgggcgccgagcaggcgcagctgcagccgtccgatgcggccagtgcgctgggccagatcgatgtggtgttgccgatcgtgcatgggccactcggcgaagacggtgcgctgcaggggctgctgcgcatgatcaacctgcccttcgtcggttcgccggtactgggctcggcggtggcgatggacaaggacgtgaccaagcgcctgctgcgcgacgcggggctgcaggtggcgccgtggctgtgcatccgccgccatgaggccgcggaggtggatgccgatgcggtgatcgcccagctcggcctgccgctgttcgtgaagccggccaaccagggttcgtcggtgggtgtgagcaaggtcaaggatgcggcgggctttgccgaggcactggcattggcgctgcgctacgaccacaaggtgctggtggaatcggcggtggtcggccgcgagatcgaatgcgcggtgctgggcaacgagcacccgcaggccagcgtatgcggcgaggtggtggtgcacgacgagttctacgcctacgacaccaagtacatcaatgccaatggcgctgacgtggtggtgccggccgacatcgacgccgccacccaggcgcgtatccggcagatcgcgcggcaggcctaccagacgctggagtgtgcgggcatggcgcgcgtggatgtgttcctcaccgcagacggcgagatcgtcatcaacgaggtcaacacgctgccgggcttcacccgcatcagcatgtacccgaagttgtggggcgccagcggtgttgactacaccacgctgatcacgcgcctgatcgaactggcgttggaacgccatgaggccgatcgcgggctgcagagcgctgtgtaa

SEQ ID NO: 498156 - DNA, 885 bp, Stenotrophomonas maltophilia
gtgagcctcccgttgcaggccggcgcgctgcctatgcgggtgctgatcctcggtatgggctggagcggatgcgtgctggccccgcatctgcaggcgcggggcgtgcacgtcgtcggcacggtgcgtaacccctcgtcggcgccggacgatggcctgctgcggcatcagctgcacgctgactccccaccgtcgcccgccctgctcgatgaggtcgcgcaggccgaggccgtgctgtgcagcgtgccgccagatgccgcgggcgacccggcactgcgcctgctgctgccagctctgcgggccagcccggcactgcgctgggtgggctatctgtcgtccacgtcggtgtatgccgatcgggccggcggctgggttgacgagcacagcgcagccgatgccaccgaagcagccggcgtgcagcgcctgcgtgccgaagcgcaatggcgtgcgcttgcagaggtacgtggcatcgcttcggcggtgttccgcctgcccggcctgtacgggccggggcgcaatgcgttgctgcagctgtcacagggccgtgccctccatgtgattcggccgggcctggcgttcaaccgcctgcacgtagaggatcttgcggcagtgatcgtcgcggcgatgcagcgaccggttgcgcaggggatatacctgcccagcgatgacgagccggcaccaccgcaggatgtgctggccttcgccgcgaagctgggcgggtttgcgatgccacctgccgtggcctgggacgaccctgcactcagcccgacgctacgccgcttctacgagagcaacaagcgcatcgacagtcgtggcacgcgtgaagcgctggcgtggcagccgcgcttccccagctaccgtgagggcctgcgcgacctgctccggtag

SEQ ID NO: 498157 - DNA, 261 bp, Stenotrophomonas maltophilia
ttgaagaaagtgctgtacttcgccttcgcattgatggcgctgccgcgcttgtacgacttcgtgttccatgcgggtcacgtgcatgatctcgtggcggcggcaggttttgcggtgctgctcgtgggttgcctgtgggacgaacgtgcgcgcagggcctgcccgccggtagcgcggctacggtatcgcgccaacgctgccgccacgtgcggcgccgtggtggtgctcgttgcgctgttgatggaaaggaaggtcttcggctga

SEQ ID NO: 498158 - DNA, 462 bp, Stenotrophomonas maltophilia
atgtcgcgcgtgctggccgagatgcgccaccggctgccgaagttccagctggcagcgatggcggtgaactgccaccacaactacgtgcagaaggagacgcaccacgggcaggaactgctggtaacacgcaagggcgcggtcagcgcgcgtgagggcgagctgggcatcattcccggcagcatgggcacgcgcagctacatcgtgcgcggcaagggcaacgcggacagcttccacagctgcagccacggcgccggccgggtgatgagccgtggcacggcgcgccagcagatcacgctggcccagcaccgcgaggccaccgcgcatgtggaatgccgcaaggacagcggcgtgctggacgagtcaccggccgcgtacaagtcgatcgacgatgtgatggctgcgcaactggacctggtcgacgtggtacacacgctgcgccaggtgctgtgcgtgaaggggtaa

SEQ ID NO: 498159 - DNA, 903 bp, Stenotrophomonas maltophilia
atgaagaccacgctcgatgaaatgcaggccttcctcgcggtgatcgacagcgggtcgatcagtgctgccgccgaacagctggggcagacgccgtcgggcgtgagccgggcgctggggcggctggaagacaagctcggcaccaccctgttgacccgtaccacccgccgcctgcacctgaccgccgagggcgaggcctacctgcgccatgcacgggcgatcatcgatgcggtggagtccgccgaggaacagatggccgcccgccgcgagcgcccggccggacgcctgcgcgtggatgcggcgatgccgttcgtgctgcacgtgatcgcgccgctggtggccgggtaccgcgcgcgctacccagaggtgcagctggagttgaacagctccgagcgctacatcgacctgctggaacggcgcaccgatctggcgatccggatcgggccgctggccgactccaccctgcatgcgcggccgttgggtcgctgccagctgcggctggtggccagtccggcctacctggcggcacacggcgaaccggccagcgtcgccgcgctgggccagcacaccctgctcagcttcaacgaaccggaatcgttgaatcactggccgttgccgggcgatgccgatggcctgctgcgggtgcgtccggatatcgcggtgtccagcggcgaaacactacgccgactggcggtggaaggcgtgggcatcacctgcctgtccgacttcgtgaccgaccgcgaccgcgccgccggcactctggtgccggtgctggcgacgcagacgctggatgtgtaccagccgatccacgcggtgtattaccgcaacacggcggtgtcggcgcggatcagctcgttcctggattacctgggtgaagcgatggcgcggagcgattacctgcgctga

SEQ ID NO: 498160 - DNA, 1215 bp, Stenotrophomonas maltophilia
atgatccgtggcattcccctcgccctgctggcgctgaccctcggtgccttcgccatcggtaccaccgagttcgtcatcgtcggcctgattcccaccattgccgccgacctgcaggtcagcctgccctcggccggcctgctggtctcgctgtatgccctcggcgtggccatcggtgcgccggtgctgaccgcgctcaccggccgcgtgccgcgcaagtcgctgctggtggcgctgatggtgctgttcaccctcggcaacgtcatcgccttcctggcgccgggctacacctcgctgatcgtcgcccgcatcctcaccggcctcgcccacggtgtgttcttctcgatcggttcgatcatcgccaccgcggtggtgccgaaggagaaggccgccagcgcgatcgccatcatgttcaccggcctcaccgtggcgctggtgaccggtgtgccgctgggcaccttcatcggccagcacctgggctggcgcgccaccttcctggcggtggccgcgctgggcgtgatcgccctgctcggcgcgctgctgttcgtgccgcgcagcgtgccgcagagtgcgccggccagcttccgccagcagctggccgtactcgcccaaccccgcctgctgctggtctatgcgatgaccgcgctgggctacggcggcaccttcctggccttcacctatctggcgccgatcctgcaggacgtcactggtttctcggcaaacgcagtcagcctggtgctgctggtgtacggcgtgtcggtggcgatcggcaacctgtggggcgggcgcatggccgaccgcatgggcccggtgcccgcactgaagcgcatcttcgccctgttggccgtcgtgctgttcgtgctcaccttcaccgcctacaacacctggctgatgctgctgacggtactggcactgggtgcggtggcgttcggcaacgtgcccggcctgcaggtgtatgtggtcaagcaggctcagcgctatgcgccgcaggccaccgacgtggcatcggggctgaacatcgccgccttcaacatcggtatcgcgctgggcgcctcgctcggcggcctggtggtggagaacatcggcctgatgcacacgccgtggctgggcgcgctggtggtggtgggtgcgtatgcattgaccgtgctcagcggccgcctggaccgccgcgacggcatcgatgaccgcgccgatggcatcgccgtggccacgcattga

SEQ ID NO: 498161 - DNA, 1734 bp, Stenotrophomonas maltophilia
atgcatgatccgtacacgccctctccaatgtcgtccccggcagcgctgctgcatgctgcgcgcgtgctggaaatgcatcgtctggctctactgctgtcatgcttccaggagccgcgcgccagtgggttccgggtgctgctgcaggcgcttgcggtgctgtggtgctggctttggatcgatggccctcagcctgttctggccgatgaggcagcgcgggtgctgccggccgccgttgtacttctggcggtatctgtagcgtgggcactctttgtaaaccttcgcagggcgcgtcacgacacgtggtacgacgcggcgggccttctgctcagtctggcgatggtggccatccaggtgcacgcggccttcatcctgttgatggcactcaatgcaatcctgccgttcctcgtcatcgccgcgacggtggcttacggacgcaaggccatggcgccggcaatcgcggtaacggccgtggcgctgctttgggcagcccccgaaggctactggttctcgcggcccgcctatctggcctatgcgctggcgctgaccatcctgttgccgctggtcgtggcgtcactggtggcagcgatgcgcgaaatcgcgttgcgtgccattgcgtcgcgtgaggcgcaggggcgattcgtcggcaccatgagtcatgagcttcgcacgccgctcaatgccatcatcagcggcatccagcttctggaggtcaatacggcaagtgctgcccagcgacacgcactggccaccgttgcagggcaggcccaggcgctccgacgtcgcattgatgatgtacttgatgttgccagcattgatggtggcaagctgaaactgcggccacatccttgttcgctgcgttccatcatcgaggcggcgcaggcgagctgcatgcctgcggctgcagacaaaggcgtggtactgcaggtggatgtggggagagcagacgtatggctgttggcagatggcggtcgcatcgaacaggtggtgaccaatcttctctgcaatgccatcaagttcagtcccatggcgggcgaggcgagggtctcggttggcgccgttcgagcggtggatgactggcaggtgcggatctcggtctgcgactccgggacgggcatcgacgaagcgcagagagacatgattttctcgcctttcgtgcaggtcagtcagggcgaagcacgttgcgaacagggcgtcgggctcgggctgtacatcgttcggctgatttccgatgccatgggcggaacgatcagcgtcggccgcagcgatgtcggcggcgcctcattcgtgtggtgcttcgctgctgccgtggccgatgaggctgagccgcttccttccctgggtgagcttttccagttgcacgcggcggtggttcgtccgctgcactgcctgctgttcgaagacgtggagaccaaccgcgaggtggtgcagcacctgctgcagtgtgcaggccatcgcctcagcttccggaaagatggtcacgatgctcaggccgtcatcaaggcgctggcgcccgacgtagttctgctggatctgcacatgccaggttgcagtgggtgggacgtactggaggcgctggtcagggaccctgcggcgcctcccgttctggtgatgagcgcagacacccgggtagaggtgattgacagggcgcaggcgctgggcgcggctgggtttctgtgcaagccactggacatcgagagcgtcctggatatgttgcgcggtgttgccgagcgctga

SEQ ID NO: 498162 - DNA, 327 bp, Stenotrophomonas maltophilia
atgctcaacctgattgcagcgaccgcgccagaccagttctcatcgtttgtcgttgacctggacgaggcgatttcgcgctggatgagcgctgcggagaatgaatccccgggttgcctggaacaggagctttcgcgcatgcatgccttgaaaagtgtgacctcggccttgggcagctgcaggattgccgatgcctgcgaaaatctggctgatgctctccgctccggcgaagccatcggcagcgtgcggctgcgcggctgcgcgctggcaatctcggcaaagcgccttctgggacgcacgacaggtcaatcactgaccggggggcgctga

SEQ ID NO: 498163 - DNA, 777 bp, Stenotrophomonas maltophilia
atgctcgccctgacactctttctgctgctctcgtgtgcggttctggttcgaaagcgacacgtgcgtagcggcgccctgctcgccgtagcgccactggccatcctggccagcgcgagcgcgcccatcacgcagctgctgctggacctggcacaggacgcgccgccaagcactgcaacagcgcaccatccacgcacggcgattgtcgtgctgggcgctggcatcgatcaggacgctcacggctccaggcccggcctggctggctatagccggttgatggccgcaacgcagcgctacctcgcctgcgaacgcaccggcgaatcctgcgtggtgctggtcagcggtggcgctactgcgccagacaatgccgcagaagccaacgtctacgcgcgtgaactgattgcgctgggcgtgcctgcggaacacatcatccgcgagcacgccagcgtgaacacctggcagaacgccagcaacagcagccgaatgatccagcgcgacagtgtccgggtagtgctggtgacctctggcctgcacctaaggcgaagtctgatctacttccggcacttcggtgtcgtggccgagggcttgcccagtgatcgcctccgcgcctcgccggggtggcttccctctgcgtacaacctgctgctgatcgaagtgatgctgcacgagtacatcggcgtcctgcgctaccacgtttacaacggcatgggttggaacgaggaatccatcaagctggacagtgtcacgcctgcagcaaccacccacgcatcgccgcactga

SEQ ID NO: 498164 - DNA, 702 bp, Stenotrophomonas maltophilia
atgaccgaccgtatccccctgctgctgctgcctggcctgctcaacgacgctgagctgtggcgcgcgcagttggccgatctggccgacatcgccgattgcacggtaggcgaccagactcgcggcgagaccctgcaggcggtggccgaggacgtgctggcgcaggcgccggaacgcttcgcgctggccggtttctcgctgggcggtttcgtcgcccagcagattctgcgcatcgcgccggaacgcgtgttgcagctggcgctggtcgatacctcgatccacgccgattcaccggaacgtgccgaacaacgccgcagccaacgcgccagtgtgcgcctgccggggaagttccacggcttcggcgatgcgctgatgcgcagctacatcgacgcctcgcggctggatgactacgtgctggtgcagcgcgtgcgcgacatgaccgcccgcctgggcgcggaagtgttcctgcgccagagcgcgctggaacgccctgacggccatgacgtgctggctggctaccgcgatccgctgttgatcatctgcggggccaacgatcgcatcacgccgctggcagtaagcgaggaaatgcatgccctggtgccgcactcgcagctggtggtggtgcccgattgcgggcaccttgccccgatggagaagccggacgaggtcagtgcggcgatgcgtgggtggttgctgcaggcgtga

SEQ ID NO: 498165 - DNA, 378 bp, Stenotrophomonas maltophilia
atggccgcggtgcatgatgacatcgcggggatggcgatgggttaccacggtcttatcggcgacatgggcaactcgctctcaggcggtcagaagcagcgagtgattctggcccgcgccctctaccgccggccacggattctgtttctagatgaggccaccagccatcttgatgtcatgcgcgagcgcttggtcaacgaagccgtgcagcgtatggagctgaccaaggtgatcgtggcccataggccggagaccataaacagcgccgaccgcgtgctcgtgatggagcaggggcggatcgtccaggaggtgcggccccagcgtggggcgtcgacggcgcctgcttccgacgccgaggaatgcgccgcggcatcggtttga

SEQ ID NO: 498166 - DNA, 159 bp, Stenotrophomonas maltophilia
atgatcgactgcggggtcgagccctggtacgtggtgatctggttgctgtcgatgccgaacatcagcgagacggtgtcggtctcggtcagcggcacgccgaacaccacctgcgcagaaccattggtgctgttgtactgcgcggtgttgaagtcggagtag

SEQ ID NO: 498167 - DNA, 243 bp, Stenotrophomonas maltophilia
atgttggacagcgagttggtgatggtgtccgagctgaattccagcagggcacgcgagaacgtgtcgcccggcttctggatcaccatgcgctcgacgtcctcctgcggaaggatggtgtcgccgctgaccttgatctcggagatcttgtactgcgcaccctcggtcacgcccgcggtgaggaacatgtcgcgcttgtcggggctgatcgagacctgggtggaatcgatgctgaagtcgacgtag

SEQ ID NO: 498168 - DNA, 699 bp, Stenotrophomonas maltophilia
atgcgggcacttctgaccctgctggcgatgctgctggcgttgcctgccgcggcattggacctgttgccgaccacactgcagctgcccgccgaaggtggccagggcgaactttggctcttcaaccccggtcccggccgctggcagggccgggtacagatccttgcgtgggaccagcagaccgacgcggacatgctgcgtcccaccgaccaggtgctcgccagccccaccctgctcgacatcccgcccggcgtccgacagcgcatctggctgctgccacgccagccggcatccgctgtcggcgaacaggcctatcgggtcgtcctggcccccactacgccaggcctgcagcgctattcgctgccgttgttccgcgggcacgccacgccaatggcccaatcgcggctgcatgcagggatcgaacccggccagtcacataccttcctgcgactgagcaacaccggtaccctgcacgcacgcctgaacgatctcgcctacatcaccagcggcggtcagcgcaccctgctgctgcccggcctggccgggtatctgctggccggccatgagcgccgctgggccctgcccgcccgcgctgatggctacgccggcggtcatttccaggcccggctgcaggatggccgcgtgatcgatctggtcgctccaggcccggcaattgcagccagcgcaccgagcgggctataa

SEQ ID NO: 498169 - DNA, 1035 bp, Stenotrophomonas maltophilia
atgaggacgttgctgctcggcctgctgctggtcgccggcctgctggcggcggcaccggcccgcgccgtcgcggtgtgcgccgccgtcgccgacccgacgctgccgttcggcaacgtcaacagcaatgcccccggtgcaaccaccggtacgctcaacatcaccgtgacctgcaccactgccgcgctgagcgtgctggccactaccggcgtgcgggtctgcgtgggcatcggcgccggcagcggcggcggcagcagctccagctggcggacgatgaagaccagcagcagcgacagcatgaacttccagctctacaacacctccaacttcagccaggtgaccgggttgaccccgcgcggctcgccgccggcgcaggagctgaccctgacctacaacgtgcccctgaccggcggcagcggcacgcagaccacgcagctgtccgcacagatccccgccaatcagatcctggcgtcaggcgcctacagcagcaccttcaacggcgccaacgtggtgctgacctgggcctggaacgaggtcctgctcggcaatgccacggtgcccgccaactgcaacggcggcgccaccggcaccaacagcatcagcaacgccttcagcttcaccgccaccgccaacgtgctgccgcagtgtggcagctacgtcaccaccaacatggacttcggcaacgtcaccggcggcattcccgccaacatcgaccggaccgccaccctgaccctgacctgcctgaagaacacggcctaccaggtcagcctcaacaacggccagaacaatcccaccgccaccagcacgcggcgcatggccactaccatcggcggcagcacctactacctcacctacgagctgtatcgcgatgccgcgcgcagcctgcgctggggcaataccctcaacgtcgataccgttggcggcaccggaagtggcagcgcgcagcagctcacgatccatggccgggtgccgccggtcaccggccagcccccggccggcatctacaacgatgtggtgcaggtgaccatcacctattga

SEQ ID NO: 498170 - DNA, 2379 bp, Stenotrophomonas maltophilia
atgggcgcgctgtttgctgccctggctcctgcggcgaccgaagccgccgatgtgtccggcgtggctgccgccggggctgcggacgtctccggggtgtcggccgacgcgatcctgcccgcccccacgcccctgaccgccagccagaccctgtacctggacgtctcgctcaacagcacgccccgcggcctgctgccattcactgaaacccgtggccggctgcaggccagtccggaagtgctgcgccagctcggcttcagcgcccgcggcgatgcgccggtctatctggaccagatcagcggggccgttgtgcgctacgacgcgcatatgcagaccctggccctggacgtgccgctggaccagctgaccctgccgaccaccgtgctcagccagccgcagacccgggcaccggccagcaccgcctcgcccggcctgctgctgaactacgacctgtatggcagccgggtcgacatgctcggcaacctcagcctcagctcggagctgcgcctgttcgggatcggcaacggcaccgtcgagaacacagcgatcagccggcgctaccagcagcccggcgaccgtcgctggcgcggtgagagcgtgcgtctggatacgcgctggagcctggatttccccggcaaggcgatgacgctggaggtcggcgatttctacagcggcttcgtcgactggacccgtccggtgcgcctgggcggcctgcagatcggccgcaactacggcctgcagccgtatcgcgtactcacccccacgcccagcttcctcggccaggcggtggtgccgtccacggtcgagctgtacgtcgatggcctgcgccagtacagcgggcaggtgccggtcggtccgttccagctggccgcgcaacccggcatcagcggcaccggcagcgcacaggtggtggtgaccgatgcattcgggcgcatgcagacgctggatttcagtttctacggcacccagcagctgctggccaagggcctgtcggactggtcggccggcgttggccgcctgcgtgaggatttcggccagcgttccttcgcctacgacgatcgcaccgtggccagtgccagctggcgaggcggtatcagcgacgcctttaccggcgaagcacatgccgaaggcggcggcggcctggcccaggccggcatcggcggctggtggctgctcggcggcgcgggcgtgttcaacgccgcctatgcgcacagtgactatcacggcctgcggggcgggcaatgggcactgggctacagctggaacaaccgccggctcaatttcaatctgcgcagcgtgcgcagccatggcgattaccgcgacctgggcgcactgcagggcaacctgccgccgagcatcagtgaacaggccacggtcggcgccgatctgctgcggctgggcacgctcagcgccagctacctgcgcctgcgctatcccgacggagacgacaaccgctacgccagcctgttctggtcacgcacctggagccagcggtggtcggcctacctgtcggtgaaccagaacctggacaagagcgatgaccgcagcatctacctgtcggtcaccgccagcctgggcaacaaccgccaggccagcctctccagccagcgcaacggcgacagccagagctgggtagcggacgtgacccagccggtacccggcgacggcagcgccggcggcgtcggttggcgcgcgcaggtgcgccatggcgaggacggcaatggcggcctggccgaagtcggcatcctcaatgacgtcggtcgctactcattcggcgcctcgcgccagggcggcctgaactatgcctacgccagcgccagtggcagcctggtgtggatgggcgggcatgccttcgccacccgcgaagtctccgacgcgttcgcagtcatcagcaccaacggcgtgggcggcgtgccggtgcggctggaaaaccggctgatcggcgtgaccgatgatcgcggcctgctgctggtcagccccctgctgtcctggcagcgcaaccgcgtctccatcgacaccctggacctgcccgaggacatgcgcgccgatcgcatcgaagactgggtgacaccccgccaacgcgccggtacccgcgtgaccttcgcgctgcgttcgcggccgtcgttgaacctgaccctgcacggcatggacgggcaaccgctggaggtcggcagcgaggtgcagctgccggacgggcgacaggcgctggtgggctatgacgggctgctgtacctggaagacgtgtccgccggcagcgtgctgtacatcaccaccagccgcgggcaatgcagggtgaaggtaccggacgtgcccaaggtggtggcatccggcgcgcggccgaagccggcaccgctggcgtgcatcccggaggtagcgccatga

SEQ ID NO: 498171 - DNA, 531 bp, Stenotrophomonas maltophilia
atgcgatccacgttccgctcaccgctcgcctgggtcctgaccggactgttgctggccggccccgcactggccgccgacaccacgaccttcaacgtgaccctggtggtcaccaaggcctgcaccatcacggcggcggcggccaccaacgttgacttcggcacggcggcctcgaccacggcgacccccaccctgggccagggcacggtgaccgcccaatgctcggccctgaccccgtacacgatttcgctgaacgctggcgccaatgccagcaccgccaacgacgtcaccacccgccggatgaagaacaccaacgccgcggtgaccgccaacaacttcgttggctaccagctctaccaggacgccgcacataccctggtctggggtgcgacctcgggcaccaacacccaggccggcatcggcactggcctggccgtgccctacatcgtctacggccagatcctgaacctgagcaccaacaacccggccaccggcaactacctggatacggtcaccgccacgatcacctattga

SEQ ID NO: 498172 - DNA, 129 bp, Stenotrophomonas maltophilia
atggccaccgaaggcggcgccggcatcggccagcgccgcgacagtgcgcggcgcagccgggtccagcgcggggcgtacagcaggcgcggcagcatccgccccaacagggtgtcggacggatgccggtag

SEQ ID NO: 498173 - DNA, 366 bp, Stenotrophomonas maltophilia
atgagcaccactgtctacggtttgaagaactgcgatacctgcaagaaggcgaccaagtggctggaccgcttcggcgtgccgtacaccttcgtcgactaccgcgagaacaaacccagcccggaaatgctgctggaatgggccgcgcagctgggggggctggcggcgatggtcaacaagtcctccaccacctggcggcagctgccggacaaccgcaaggctgcggactccgaggccgaatggaagctgctgctgcgcgagtatccgcagctgatcaagcgcccactggtggtcaccgccgatggcaaagccagccagggtttcagtgacaatggtttcaaggcacgcttcggcgtgggcgacgcatga

SEQ ID NO: 498174 - DNA, 1128 bp, Stenotrophomonas maltophilia
atgagcgcggtcctcgacctgacctgcgagctgattgcgcgaccttcggtaacgccggacgatgctggttgccaggcgctgttggcggcgcggctgaagcaggccggattccagtgcgatcatctgcgcctgggcgacgttgacaatctgtgggcgacccatggccagggcgcgccggtgctggttctgctgggccacactgacgtggtgcccaccggcccgcgcgagtcctggaccagcgacccgttcaccccacagatccgcgatggcgtgctgtatgggcgcggtgccgccgacatgaaaggcagcgtggcggcgttcgtggtggccgccgagcagttcgtcgccgaccatcccgaccatcccggcacgctggcggtactgctgaccagcgacgaggagggcgatgccatcgatggcgtgcgccacgttgcacgcctgttcgccgcacgcgggcagcgcatcgactggtgcatcaccggtgagccgtcgtcgaccgcgacgctgggcgatctgctgcgcgtgggacgtcgcggcagcctgtcggccaaactgcgcgtccaaggcgtgcagggccacgtggcgtatccggaaaaggcacgcaacccgattcaccaggcggcgccggccctggcagaactatgcgcgcggcgctgggacgaaggctacgagagtttcccgccgaccagcctgcagatctccaacatccacgccggcaccggtgccaacaacgtgattcccggtgagctcgaggtggatttcaacatccgctacaacccgcactgggatgcgccgaagctggaggcggagatcaccgcactgctggaacggcatggcctgcagtacacgctgaagtggcatcgcagcggcgagccgttctacaccccggaaggcacgctgcgcgccgccgcgcgtgcggtgctggccgagcacatcggccgcgcgccagaagaaagcaccggcggcggcacctccgatgcacgcttcatcgcgccattgggcgcgcagtgcatcgaagtaggcccggtcaatgccagcatccaccaggtggacgagaacgtgcgcgtggacgatctggaagcgttgccggggctgtaccagcggctggtggaacggctgctggtgtga

SEQ ID NO: 498175 - DNA, 450 bp, Stenotrophomonas maltophilia
atgcgctgggaagtcgtcggttggggcgcgctggcgctgctgctgtttgccgccgaggcgttggcgcccggggcgttcatgctgtggatcggcattggcgcggcggcggtgttcgtactggttgcggtgttcagcggcattccattgctgtggcaggtcgttgccttcgtcgtgctgagcgttgtctcgatccagtgctaccggcgctggggcaaggcaagggcgcgacccagcgatgcaccgttgctcaaccgccgcgccgaacaactggttggacgggtggtgccgttgcagcagggtatcgttggtgggcagggccgggtcagcatcgacgacgcgtactggcaggtcagcggcccggaactgcaggccggcagcctggtgcgggtggtggcggtgcagggcagcacgctggtggtcgagtctgccgcaggtagagtcgactgttag

SEQ ID NO: 498176 - DNA, 960 bp, Stenotrophomonas maltophilia
atgttcccgaccgtgttctttaccgtggtgctggccttcgtggccgtggtgatcctgttcaaggcggtacggatggtgccccagggctacgagtggaccgtcgagcgcttcgggcgctacacgcacaccatgacccccggcctgcacttcctgattccgatcgtgtacggggtcgggcgcaaggtgaacatgatggagcaggtgctggatgtacccagccaggaagtgatcaccaaggacaacgccgccgtgcgcgtggacggcgtggtgttcttccaggtactggatgccgccaaggctgcctatgaggtggccaacctggaagtggcgatgatcgccctggtgcagaccaacatccgtaccgtgatcggttcgatggacctagatgaatcgctcagccagcgcgaggtgatcaatgcccagctgctgagcgtggtcgaccatgccaccaatccctggggcgtgaaggtcaaccgcatcgagatccgcgacatccagccgccgcgcgacctgctggatgcgatggcgcggcagatgaaggccgagcgcgagaagcgcgcgcagattctagaggcagagggttcccgccagtcggagatcctgcgtgccgatggcgaaaagcaggccaccgtgctggaggccgaaggccgtcgcgaagctgcgttccgcgatgccgaggcgcgcgaacgcctggccgaggccgaagcgatggcgaccaaggtggtgtcggcggcgattgccgagggcgacgtgcaggcgatcaactactttgttgcgcagaagtacgtggaagcgttcaaggagctggccagttcgccgaaccagaagctggtgctgatgccgatggaggccagtggcgtgatcggttcgatcgccggcgtggccgaactggcgaagcaggcgctggccagccaggacaacaaggccgccggcaagcggccgccgccgctcggaggctga

SEQ ID NO: 498177 - DNA, 1326 bp, Stenotrophomonas maltophilia
gtgtccgtgagtgaagcccaggcggccccggccgtcgccctgctggcccgtcctggcgcagcgcgcgagcgcctgcgcgaggcgttgtcgcatgccgatgtgcagctggtgctggaagacgaccccaacggcctggagccgcagctgctgcaggacgcgcgtccacagttcgtggtgatcgcgctggaagcggccatcgaggatgctctggagcggcttgaagcggtgctgtccgcaccaggcctgaccttggtcttcgacgaagccgagctggcggcgcgccgtgatggctgggaggcacagcgctggggccgccacctggccgccaagctgcacggccaccagcaggtgctgccgccgggtgcggaagacgaacccgccctgcagctggaaccgggtcacccggcaccaccgccggcaccacgggaagaagcgctccagccgcatctggaccaggcattgagctgggccgacgaggtgccggcggacagcctgtatgcgccaccggcgcacctgcacgaaccgatcgcgctggagcaggcactggccgcgctgcagccggtggtgccggagccgctggagacagtgccgatgcagccggttgccacaccggcaacgccgccggtgtccttcgaccacaccgcgtggtcgctggtcgaggacgtagcagacgcgcccgcagccaccgggtacagcgccgcgatggaagccccgctgccgtccttcgataccgatcacctcagcctggtggacctggacactgcggcgcctgcgggcgcacgtgccggctcgctgctggtgctggccggcattggtggcccggatgcgctgcgccgcctgctcggtgcgctgccgtcgtcgctgagcgtgccggtgctggtgcacatgcgcctggacggtggccgctacggcaacctggtcaagcagatggcacgcgtgtcgccgttgccggtgcagctggccgaagccggccagcgtgcaacacccggtgaagtgcatgtgctggccgatgacatcggcgtgcaggccgccagcgacggcctgcatttcgtcagcgacgcgcaaggcatttcgattgccgggctgccggccgaccacactgcgctggtcctgctcagcggcgccgaccttgcgcatgtgggtccggcgctggatctggccgccgccggtgcctgggtggccgggcaggtcggcgagggctgctatgaccctgccgcagccacggcggtggtcgccgctggcatggtggcgggtgagccacaggaactggcgcaggccatcgccgcgcgctggggcgtggaagatgataacggagaggcaccatga

SEQ ID NO: 498178 - DNA, 6678 bp, Stenotrophomonas maltophilia
atgagcagtctgcgcgatgcgatgagccacgcagcgctgggctgggtcaagcccgagctggacgagaccctgcgccaggtgcgcaacgaagtcgagtactacgcggaagacccgaccgacgccagccgcatgcgcatctgcgccggctacctgcaccaggtacagggcaccctgcgcatggtcgagctgtacgccccggccatggtggccgaggagctggaacagctggccaatgccatcggcgccggtggcgtggccgatcgggatgaagcctgcgcgaccctgatgcgtggcagcgtgctgctgcccgattacctggagcgcctgcagaacggtcaccgtgacatcccgatcgtgctgatgccgctgctgaacgagatccgtgccgcacgtggcgaagagggcgtgcatgacagcgtgctgctggcattcgcaccggacagcgtcaccgccaccgaggccgagctggaccatgcccgtggcagcctgagcgggcgcaaccgcgagctgctcgataccgtgggcagtgcagtgaaggaagaactgctgcgcatcaaggatgcgctggacctgcacctgcgtaccggcggtgcgccggagcaactgcagacccaggccaacgagctcggtgcggtcgccgatacgctgggcatgatgggcctgggcgtggcccgcggcgtggtcgtgcagcagcgtgatgcactgcgtggcgtggtcgagggccgccagcagatcgacgagaacctgctgctggatatcgccggtgcactgctctacgtggatgcctcgctggacgaccaggtcgcccatctgggcgccggcggcagtggccaggacgatccgagcgcggtggagaaccggcgcacggtagaggtgctggcgcacgaggccatcgccaacttcgccgccgcccgcgagcacttcgtcgcgttcattgaaaccagctggaaccatgccgagctgcaggatgtgccgcgcctgctgggcgatgtgtccggtgcgctgcgcatgctcgacctgggtaccgccgccgattacctgcgcggtgtgcagcagtacatcgaagccgagctgatcggtcgccaacgcgtgccgagtggccgccagctggacacgctggccgacgccatggccagcctggagtactacctggaagccctgcgcgaccgtcgtccgggtcgcgaggacatcctcgacatcacccgcagcagccttgaggcgctgcgctactggccgttgccggaccacgatgcggctgagccggcagcgtccgtgccgcagtcgatcgagcgtgagccggtcgtgctgcagggcgaggcactgcagccagagcacatcgagatcccggtacagtcggccgcgccggcacccggtgaggtgccggtaccgctgccggacttcaccttcgatccgccaccggccacgccttcgccggcagcggcggacaacagcttgatgttcggtgggctgggatccgtcgcctccgcgccgctgtcgctgcgtgacgagtcggatgcaccgctggtctttgccgcctccagtgcacctgtacccgaggtcccgcaatgggatctggcaccgttccatcctgaggccgatccgctcgctccagcggacgatgagcgcaatccgacgtttgccagcttcgatccggtcagtttcgaacagctcgatgcagggcagggcgccgccgcccattggacgctgtcggaggcggctctgccagtgcagtccgatgcgacaaccggcctggacgtagaggacgccgccgacgcgtcgctgtccatcgagaccggcgcgcatgccgcaccggggttcgacccggtggccgccgaacatgacgcggtttctgcaagtgacggcgtcgtgttccgtttcgatgccgatgcgctggacaatgccgacgacgtgttgtcgctgcatgcgatggaggcattgtcgctggaggacgctgccgggctgcatccgtcgctggagagcgtcgatgccactgcccctgcggtggtggaagagagcccggctgccgcagagccggacatcacccctgtggatgtgccggtggaagcgcccgcaccgcttgccgatgtgccggcagcggcggtgtcgatgatcgacatcgacaccatcgcaccgattgatttcagcgaagccgacgcgcagttctttgccgagctgagcgctgccgccgcggacttcaatccgcaggcgactccgacgccggccgatgcggaagcgccagtcgccgtgggcagcgcggaagatgcagacgccggcttcgaggccggcttcgacgacgatgccgagaacatcgacgaagacatccgcgaggtgttcctggaagagttcgacgacgaactggccaacctcggaacgttgctgccggcatggcgcatgcagccggacaacatggaccgtctgcgtcccatccgccgcatcttccatacgctcaagggcagtggccgactggtcggtgcacgcaccctgggcgaatttgcgtggaagatcgagggcatgctcaaccgcgtgctcgacggcagccgcccggcgacgccagccgtgctggccatggtcgacaacgcgcatgccgcgctgccgcagctgaacgccgcgttgcgtcatggccagcggatcagcgtggacctgcaggcgatgcaggccattgccgatcgcgtcggcgcgggtgaggaaacctattacgtaccgctgccggttgcggccgctcccgccgcaccggtggtcgaagccgatggcgaggacgagatcagccgcatcctcgaagccgaagcaatggcgtcagtgcaggctgaagccgatgcggacccggcgcccgaagcattgggcacgccggccaagatcgacagcgtgctgcgcgagatcctggaagccgaagtggaagtccaccaggcgaccctgcaggactggctgcgctcggcgcagcaggcgccgcagccggtcagcgacgcactgctgcgtgcggtgcacaccatgaacggcgccttcgcgatgaccgaagtgccggaaatcactgccgttaccggcggtgccgagtcctacatcaagcgcgcgctggctgcagacgtggtgccgggcgacgagggcgtggccgcgctggatgcgaccgcgcaggcgatcaccgcgaccatggaagcgctgcaggccgagcagccgcgcatcacgccacaggaagcgctggtacagcgcctgcaggcgctggccggtgaactgccggaagcgcgctggccgatggtcgggctggaggacgaggatgaagagggcatcgagctggcgcccgatgtcgggcgggcatccgaagccgaagcgccgctggccgggctggacacgctggacgaaaccagcatggcgtccgctttcgatgtggcgcccgatctcattgccgagccgcagccgcttgccgaagatgcgctggaaccggttccagctgcaaccgacccgcagacgctggacatcgcggccgacagcggcctggacgtgggcgagctgaccgccagcgacgatctttcgcgttacttcgacgccggctggccgtcggtgccgggcgaaggtgaacctgccgtggcggacaccggcgcgattgaatcgatccagccggtcgagagtgcgcctgttgtcgaagtggccgaagcagatgccgtgcccacgatcgcgacggtcgacgacgctgatctgaccatggccgacgatctgtcgccctacctcgacgccagtgcgctgccggtggatgaccgcgacgcggaagagtggccggtgcctgcggaagttgacgcgatcgacctgaatacgccgttgtcctttgattcgggcagtggcgatgacagcgtcattgacgccgctgctgcactgccactcgacagcgggctgtcgagcctgcaggatgaaatggctgcgccgggttttgcagaaccggtcacgctggcagccgcgctcgaggccggcctgcacgtgatcgaagaagagcagaccctggacgacgacgggcaatggcccgtgctcggcctccaggccagcgaactcgcgccgggcgaggcggaagcctttgccgaggatgcggacgtcggcggggaggcggcggtcggcgaaggagagagcgccgatcagccgtccccggcgacggtgaacgaggcgagcgctgccgaagcactgcaggccaccgccgagccggtgcggttcttcgaactggaagaagcgccggggcagggcacggccaacaccgatgccgaacctgccgaggccgacgccggggagcgggcgccgctccacgatgaagcctccaccctggaagacaccgcggatggcgccgatgcgctcgacttcagtgtgtacgaccgcgaactggtcgacatcttcgtcgaggaaggcaaggacctgctcgaccactgcgatggcctgatcagcgagcttcgcaatgcgccgcaggatcgcgaggtgctggccggcctgcagcgtgacctgcataccctgaagggtggcgcacgcatggccggcatcaatgccatcggcgaccttggccacagcatcgaatccctgctggaagccgtggcggccggccgcaccgagattgatcgccgcgacgtgcagctgctggagcgcggcttcgaccgcctgcaccagctgctgacgcggaccggtgcccaccgcgtggtggcgcctgcacaggacctggtggaggccttcgaggtccgcaccaccaccgatatcgcggcggccgctgcgtccccgcgtgcggccagcgaggccgaggccgtgccggcacaggctgtgggcccgctgacgacgccggccgatgccccgctgtcggcaccactgccggccgaaggcgtggccgacgaagatccgctggcgcgtccgcagcaggagcaggtgcgggtgcgcgccgacctgctcgaccgcctggtcaaccatgccggtgaagtggcgatctatcgctcgcgtctggaacagcagctgggtgccttccgtggtgccatggccgaactggagcgcaccaatgcgcgactgcgcgaccagctgcgccgacttgacctggaaaccgaggcgcagatcgtcgcccgctaccagcgcgagcaggaccaggcggaccagaagttcgatccgctggaactggaccgtttctccaccctgcagcagctcagccgtgcgctgaacgagtccgccgccgaccttggtggcctgcagggcgtcctggacgatctgtcgcgccagtacgactccctgctgcagcagcagtcgcgcgtaagctcggaactgcaggatggcctgatgcgcgcgcgcatggtgccgttcgacggtctggtgccgcgcctgcgccgcgtggtccgccagtccggcatggataccggcaagcaggtccacctgaccctggaaggtacccacggcgaactggaccgcaacgtcctcgaccgcatggtcgcgccgctggaacacatgctgcgcaactccgtggcgcatggtctggaagcgccggaacagcgccgcgccgccggcaagccggaggagggcgagatcgccatccggctgcaccgcgaaggctcggaaatcgtgctggaagtggccgacgacggcgccggcctggaccgcgaggcgatccgccgccgcgccatcgaccgtggcctgctggctgccgatgcgcagccgaacgagcaggaactggacaacctgatcttcgcctctggtttcaccaccgccgaccaggtcagccagctggccggccgtggcgtgggcatggacgtggtacgcaacgaagtgcgccagctgggcggttcggtcgatatccagtcagtgcgtggccagggcgtgcgcttcaccctgcgcctgccgcagacgctggcggtcacccaggcggtgttcgtgcagatcggcgaaaccacctttgcggtgccggtcgcatcggtcagtggcatcggccgcctgtcgcgcgagcgtttcgaagcggccgacagcagctatcgctacagcggcgaggactatccgctgtacgacctcggcagcctggtcgggcaggccccggcgcgtgccgatggccaggaccaggtaccgctgctgctggtccgtgctggtgacctgcgtgccgccgtggcgatcgaccaggtgctgggcaaccgcgaaatcgtggtcaagccggtcggcctgcagatcgcgtcggtgccgggcatctacggtgcaaccatcaccggcgatggccgcgtggtggtgatcctggacgtagcgccgctggtgcgccgcttcctcgccaacccgacgctgcctgtgctggccaacgcaccgcgccaggagcgacaggtgccgctggtgatggtggtggacgattcgctgaccatgcgcaaggtgaccgggcgcatcctcgaacgccacaacttcgaggtcagcgtcgcccgcgacggcgtggaagcactggagcgcctggaagaacgcgtgcccgacctgatgctgctggacatcgagatgccgcgcatggatggttacgagctggccaccgcgatgcgcgccgacccgcgctacaaggacgtgccgatcgtgatgatcacctcgcgcagcggcgacaagcaccgccagcgcgccttcgagatcggcgtgcagcgctacctgggcaagccgtaccaggagctggacctgatgcgtaacgtgtacgacctgctggggatcgcccgtgtccgtgagtga

SEQ ID NO: 498179 - DNA, 354 bp, Stenotrophomonas maltophilia
atggtcatcgatgattcgaagaccatccgcaggactgcggaaacgctgctcaagcgcgaaggctgcgaggtggtcaccgccaccgacggcttcgaagcgcttgcgaagatcgcagaccagcagccgcagatcatcttcgtcgacatcatgatgccgcgcttggacgggtaccagacctgtgcgctgatcaagggcaaccagctgttcaaggcgaccccggtcatcatgctctcgtccaaggatggcctgttcgacaaggcgcggggacgcatcgtcggctcggagcagtacctgacgaagcctttcacgcgtgaagaactgctgggtgccatccgcacatacgtcaacgcctga

SEQ ID NO: 498180 - DNA, 696 bp, Stenotrophomonas maltophilia
atgacgtcgcctcggtgccggtgtcggcgattccgatccgccgcaagcagacctgatcgtctggtagtgccggccgctggccggcaacctcacgattccatggtgggcatctgccggccagcggccggcactacccaatgccacgccatacgcgaatcgctctggtgggtgccgaccttggtcggcacagtgcaggcagcatcgcgatctgacagatggtgccaaccaaggttggcacctgccaattccgggcggtatcggcgattccaatccgccgcaagcagacctgatcgtctggtagtgccggccgctggccggcaacctcacgattccatggtgggcatctgccggccagcggccggcactacccaatgccacgccatacgcgaatcgctctggtgggtgccgaccttggtcggcacagtgcaggcagcatcgcgatctgacagatggtgccaaccaaggttggcacctgccaattccgagcggtgtcggcgattccgatccggcgcaagcagacctgaccgtctggtagtgccggccgctggccggcaacatcacaatcccatggggggcatctgccggccagcggccggcactaccaaatgcgaggccgtgcgcaacgcaggcttccgccctcaggtattggccggcgaactcaacggcgggcgcaccaggtcgcggtggaagaaatag

SEQ ID NO: 498181 - DNA, 1371 bp, Stenotrophomonas maltophilia
atgtttgatctttaccgccttcgtggccgcatcaccgcgctggtcctcagcgaggcctggcgccgccgcgccgcgctgtggggcggcgcggtggccgtggcactggtggcgatcctgtttgccaaggccagcgatgcggccttccatctgttccagcgcatcacctcgcactcgccgtggtgggccctgctgctcacgccgggcatcttcgcgctgctggcctggctcacttccggcgtgctgaagcccacgcggggcagcggcattccgcaggtcatcgctgcgctggacaaggctgatgagccgttccggaaaaccaacctttccccagcggtttcggccggcaagctgctgctgacctcgctgtcgctgctggggggcgcatcggtcgggcgcgaggggcccaccgtgcacgtaggcgccagcctgatgtatctgttcggccgctggttcggcttcaaggatccccgcgagctctcgcatttcctgttggccggtggcgctgctggtattgcggcggcgttcaacacgccgctggccggcatcgtcttcgccattgaggagctcagcggccgtttcgaacatcgcttctccggcaccctgttgaccgcggtgatcgtcggtggcgtggtatcgctcggtctgttgggcaattacacctacttcggccatgtgagcgcgcgtctgccgctcggccagggctggctggcgatcctgctgtgcggcgtggtggcgggcctgctgggtgggctgttcgcacgtgcggtactggccagcgcggcgggccgtccgcgttggctgggccagctgcggcagcggcatccggtattgctggccgcgggctgcggcctggtggtggtcgtgctggccctggtgttcggcgaaggcgcgttcggcaccggttacgaacaagcgcgcagcctggtgcagggccaggcgctggtcggccacgagttcgggttgatgaagctgctggccaacctggcctcgtacgtggcgggcattcccggtggcctgttctcacctgcgttggcggtcggcgcgggactcggccacaacctgtcagtgctgatgccgggtgtggacccgcgcgcgttcgtgttgctgggcatgtgcgcctacctgaccggtgtgacccaggcgccactgacctcggcggtgatctcgctggagctgaccgacagcggcgatctgctgctgccgatcctggccacggtgctgatcgcgcgtggtgtgtccgggctggtgtgccgcgtgccgatctaccgcgggttggcggagttgttgatggtgccgaaaacggctgaagatgtggctgtcgaggcgcctgctgtgcgaacctcccgcacccgcgaaaatggagatgactag

SEQ ID NO: 498182 - DNA, 297 bp, Stenotrophomonas maltophilia
atggcgcatgacgagcacacccagttctggcagaagaacgccgccgcaggcaatgtctgcaaggccgacatggaagggttccacttcgtcctggagaacgcgtcgcgcgtcgcccggtcccatgaacggctgaccaagatcttccgcacggtgccagagctgcacgcttccagaacccgcgacgcgggcaccgcaggcaaacagataggcgaacgcatcggccgttccggcggcctcacggtacgcgagctccacttccggaagcgagccatcatcggtcacgaagtagcaccgtaa

SEQ ID NO: 498183 - DNA, 1170 bp, Stenotrophomonas maltophilia
atgatgaactgccgtatccgcagcctggcggctgccgtcctggccctggccagttcccccgcgctggcgatgtccggcgcgcccctgctgcccagcgagcgcagcatcggtacccttgaaccggtggcgcgtttcgaaggtgccatgcctaccagcgtggcggtatctgaaaccgggcggatcttcgtcaatttcccgcgctggggcgatgaggtggcctacagcgtggccgaatggcgcgacggccgcgccgttccctatccggatgcgcgcatcaaccgcaaggacggccccgatccggcggcccatttcatcagcgtgcagagcgtggtggccgatggtcagggccggttgtgggtgctggataccgccgcgcccgggttctctgcgccacaggccggcggtgccaaactggtggcgatcgacctggccaccaacaccgtggccaggacgctggtgttcccggccaacgtcatcgacgcgcgcacctatgtcaacgatgtgcgcttcgatttccgggttggccgcgagggcgtggcctacgtgaccgactcgtcgctgagcggtatcggcggcatcatcgtgatcgacctcgccactggcgccgcgtccaagcgcctggtcggccacgtatccacctcggccgatgccgccttcgtgccgatcgtggaagggcagcagatgcgactgcgtagcgccgacggttcgtcggcgccgttcaccgtggccgccgatggcatcgccctgtcgcccgatggtggcaccctgttctacacgcccttgtccagccgtcatctgtacagcgtgtcgaccgctctgctgcgcgacccgaagctgagtgaagcggaactggcggcggcggtggtcgacctgggcgacaagggcgcctccgatggcatggagatggacgccaacgggcggttgtatgccagcgactacgagcacaacgccatccatgcccgcgacgcgcaggggcgatggacgacggtggtgcacgacccgcgcatcctgtggccggatacgctgtcgatggggccggacggctatctgtatttcaccgccaaccagctgcatcgacaggccggcttcaatggtggcgtggatcgccggcagacgccgtacatggtgtatcgcacccgggtggatgcgaagcctgcgccaacgcggtga

SEQ ID NO: 498184 - DNA, 690 bp, Stenotrophomonas maltophilia
atgccggccctgttcaagtccactcgcctcctgcaggcggcacttcgcgtgctgctaccgctgcgctgcctggtctgtggcgagccgggccacgatgaacttgacctgtgccgcgcctgctttgccgaactgccctgggccggtcgtgcctgcctgcgctgcgcactcccgctacccgggaacgccctgatcgtctgcgggatctgccgcgaggaggtgccgccgcaggccgccacacatgccagcctgctgtaccttccacccgtggatcagctgctggtgcgctacaagttccatcaggatctggcggcaggtcgcctgcttgcgcagctgatgcagcgcgcaccacccccctggtcgtgcgcgccgctggtgccggtgccgctgcatgggcggcgcctgcgccagcgcggctacaaccaggccgccgaactgtgccggttgctgccgatgccggtctggcagggcctctaccggcgccgccacaccgcgccgcagtccgagcgcagcgcagaacagcgcagggacaacctttttgacgcattcggcacgcgcttgtcgccgccgacacggctgaccgtggtggacgatgtgatgaccaccggcagcacagtgatggaaatcgccgagacgttgcggcgggccggtgccagggacgtgcgggtatgggtgtgcgcacgggtgccgtaa

SEQ ID NO: 498185 - DNA, 1710 bp, Stenotrophomonas maltophilia
atgggtaacagaaaagcaggatgcggcgtgcgtgctgttctgggcaccgcgggactgttgtggatcggcgtcgtgcatgcacagtcggccagtccctcgttcgccgagcagcaggaactgcgcgaacgcgccgagcgcgaggcgcgcgagcgtgagcagcggcaggcattgccggatgtatcacgcgaacagccggccgccgccaccgatctgcattcgctggaactgccggacgaagaaccgtgcttcacgctgcagcagctgcagcttgacggtgcgcatctggggcagttcgcgttcctgcagcgctatctcgaccgctaccgtggccgctgcgtgggccagcagggcatcgcgctgatcgtgcggcgtgcttcggatctggcgctggccaagggctacgtgaccacccgcatcggcctgcccgagcagagcctgggcagcggaaccctgcgcctgcagctggtgccgggcgtgatccggcagatccgcttcaacgcggaagaggtacccgattcgatgtggaagagtgcgtttcccgcgcggccgggggacgtactcaatctgcgcgcgttggaacagggcctggagcagctcaagcgcgttccgtcgcaggacgtgaacatggaactggtgccgggcgaggcgcccggcgagtcggacgtggtcatcagcatccgccacggcaagcgatggcgtgcctcggtgtcgctggatgatgccggcagccgtgcgacgggaaagcagcaggtcggcgcgaccgcgtgggtagacaacctggctcgcgtcaacgacctgctcagcattggcgtcagcagcgacggcagtgccgacaagggccggggtacccacggcttcaatgcatcgtggtcggtgccgctgggcaactggcgtttcagcaccagcacctacagctcgcgctacaagcagaccatcgccagcaacgccgacacgttcgccagcaccggcacctccagcaacgtcgacctggccgtggaacggctgctggtgcgtggccagagctaccgcagcggcatcgagctgcgcgtggcgcaacggtcgtcgcacagctacgtggaaggcgtggagatcgaaggccagcgccggcgtaccacctcggtcgagctggcgctgctgcaccgccagtacctggggcgggtccaggcagatatccgcctggcgcaccgccgcggcgtgccgtggctgggaggcgatgatgacgccgtgggccgtgatgacctggcgccgacgttccgctatgggctgaccacgctggatatcggcgccggtggcgccctgacatccgggccgcgtccgctggcatggaacaccgcgctccgctaccagtggagcaaggacacgctgtacggctcggagttcatcagcgtcggtggccgctataccgtcaacggcttcgacggcgaggtgccactcggcggcagccgtggcggctactggcgcaacagcatcagctggatggcacatcgcgccatcgcgccctatgcgggcatcgatatcggccacatcgagcgcgacgaccgccagggtatcggcggcggaaccctcagcggcgcccacctgggtgcacgtggcgagctgggcggactggcgtgggatggcttcgtcggcgtaccgatgagccgcccggcgtggctcaagcatgaggcacgcggtcacgtgatcggattccgcgcgtcctggcagttctga

SEQ ID NO: 498186 - DNA, 2097 bp, Stenotrophomonas maltophilia
atgcaggcgaccgtcgttgatgaccttctgcacgtccacggccagcacgcgtgccagcgccgtggcggccgcctgctggtgcaggacgccgccctgcagggtcagggtgccgccggcttcaagccggttgcggttgtcgagcgtggcaacggacagacgggcatcggctgcgctgccgatgatgccggcgttgtccagcacatcggcgtcgacctgcaggcccttgcccccctggatgctgccggtggtgtcattgtcgatgcgtgctttggacttcaatgccagcaggtccaccgcctgcagcgtgccgctgttgcgcagacgatcgaccgtcagcgtggcctggcgggcctcaagggtgccttggttgtccacgccgccggcagacagttccagcgcctgctcggagaggatgcgtccggcgttgtccagctgctggcgcgcctggatcttcagcagcccgcccgcagacagctcggcacccttcagctgggtgatgcggtcggccgctgcacgcaggttggtaccggcaccgatgatgccctcgttgtcgatgctggccgcatcgagttcgacgtcggcgtcgctgtacagctggccggcgttgtgcagctgcgcggcctgcatccgcacgccctggttgcccagcagcaggccagcgttgtccacctggcgggcctgcacgtccagcacctgtgcgcccaggcgcgcgcccttgtcctgcgccagcgtgtcggcgcgcacggcaagcccggcacctgcggtcacctgtgcacggttctgcacctgcgcggcagccagcgcgatgctgcccgcgctcttcaccgtgtcagccagggtcagcgtgccaccggcgtccagctgcatctgtgcggcctgcgcgctgccggccaggtccagattctggttggcgcgtacggccaacgcagcgcccgccgacgtcgaaccggcaagcgacgcctgccgggcacggatctgaagatctccctgcgcgtactgggtaccgtcggccttcaggtcaccgtcggtttcgatctgcaggcggcctgcggccgccgtgcgtccgctcatgcggacatcgccggcctgggtcaggatgaagtcgcctgcgtcggccaccatctggcccgtgctgcgcacgcccacgccggcctcggtaccgaccaaccggatcttgcctgcatacatgcccccgagggcggcaacatccaggccgaactgcgggcgttcgccttctccggtgatcgcctgcgtcgccagggtctgggcatcgatctggttggcgccggtgaccacgttcacctggcgcgcccaaaggcccgcgttgagctgcaccgcgcgggccagcaggtcgacgccttccaggttgccggcatccaggccgttgccttccaggcggatcgttccgcgcgacacccggaacgcagacaggctgccatcgttgccgaacaccggggtgccggtggtcagcgtgccacgggtggtattgatgaagccgcagccatcgcaggtgatgccattggggttggcgacgatcaccgccgccgagcgccccgccacctcgatgtggccctgcaggcgcgatgcattggtggatgtcacctcattgaggatcaatcgtgccgactggcccggctgcaggttgccgttgccctggatgtagccacccagttgggtctgcacggtgctcgcgctgttgttgaggatctgcccctcgcgcccgacgttgtagtcctggaagcggttgtgcgatacgccgcccgcgttgggccggttgatctggatgaccggcacgccgttcgccgcctggtcggcccgcgcctgctcgccggcctgtacctgcacctgggcaaacgagctgcccggggccaggaacgccaatgccagggtggcgctcgccatcgcggtgcgcaggcgcgtggcccaaccggcgcccgaagcggacagggacagactgcggaatacgttcttcatgccaggtgcttccatcaacccaggggggaactgcacacacaacaacccgatcacgtcgccacgcggcgacggtgcttccagtcgaatcagaactgccaggacgcgcggaatccgatcacgtga

SEQ ID NO: 498187 - DNA, 1668 bp, Stenotrophomonas maltophilia
gtggaccaggccacgctggttggccagcgcaccggccacgtcgagcgcgagttcctggcgggcgtacaggttgccatccacgttgcgcaggtcgcccgtgcggctggtcacgcgcgcattgccctcggcgcccagcaggccattgctgttgtccagctgggaggccagcacctgcagctggccggcgccgcgctgcacgatggtgccagtgcggttgtccaatgccccggcagcgtccacggtaaggttgccgccagcatcgagcctgccaccggtgttgacgatctccgtgccggttacgcgtgcaccggtgcccgctgtcagcgtaccgccgctgttgtcgaggcgaccggcaacggccacgtccgcctcgccgttgccgacgatcaggcctgcagtgctgttgtccagcgtgccggtctcgatcttcagcacacccgtgcccgcatgctcgatgcggccaccctggttcagcagctgcgcagccttcaggtggacactgccggcattggcggcgatgcgcccgccggtgttgcgcagggcacctgtcaggccaagttcaaagggatcggtgccggtctgcagcagttcgccggcgctgttgtccagcgcggccgccaacaggccgatgcgcgtgccctgcaggctgcccgcattgcgcagcaggtcggtggcacgcaggtcgagcagaccgatggcggtcaggctgccgccgatattgcgccactcaccgctgcgcgcctgcgccagcagggtgccaccggaccagacctggccaccctccagcagcaggctgtcgcccagcaggtgaacctgctggccggcgttgatctggccggcgttgcgcagctgctgacgcgcatcaagggtgacgctgccggtgctgccgaccttgccgtcggccagcaggcccgccacgatcacgccgctgttgtcgatctgccccgcccgcaattcgatgtcacccgaggccagcacgcgcccgcgattgctggcctgggcggcctgcagcgtgaacgtgcgcgcctgaacgtcggccgcagtgcgcagtgcctgcgcagcctgcagcgacagcgcgccgctggcgaacaacgccgcctggttgtccaggtcgccatcgctgcgcacctgcagatcagcggcgctgtcgatcgttcccttcagcgtcacgccggcatcggcggacagcacgacgccctgctgcgcaaagaccttgcccgactgctccaggctgccgcccgcgtgcgcggtcagtgtgccggccgccaacgtgcgcccgcccagcaccagggcctggtcactgctgagctgcacgttgccgcgctcgctgcccagttcaccctcgctgcgcagggtccggccccgcacctgcaacgtctggccggccaccaggctgccctggttgtccagcgaatcgcgcacggtgacatcgacatcgccggcgccatagaggtcgccacggttgtcgatcacatcggccttggccgtcagtgctcccttggcgaacacgttgccggcgttgtccagcgtcaccgcatccagctgcagcgactgcgcactggacaggttgccgccggcgcggttgtgcagcgcgtcggtgcgcacgtcaagcgcgccatcgctggcgatcacgccggcattgtccaatgtggtggtgcgcagctgtga

SEQ ID NO: 498188 - DNA, 1170 bp, Stenotrophomonas maltophilia
gtgctcggtccagacttccagcacggcacagtcgcccgggcacagcttgcccggcggtgccgggccgtcgatgccgtcgaccctgaacgtcccgctgtccgggtcggcagcgccttcgttgccgctgtagaccttgtgctgggtgaccagcacacgacgctcgttggccacgccccgtgcagccaggatcagatcgttctcggcctggatgcgcccggaacggttgcggatctgctgggcgttgccgccgttccagccctgcaggcggatgtcgcccaggctgaagagctcgccgtcgaggttgtcgatgtagttggcatacaggttgatgcggccggtggccgccatcagcccttcgttgtaatcgcgtgcgaccagcgtgttggccaggtcgcggccgttggtgatgcgcgaggcgcgcagttccagcgcgttgcccatcacggtgccggtgttggtgatgttggcagccgacacctccaccgtatcgccatccacgcgaccggcattgctgaaatcgccggccgtactcagcgcgacacgaccactgccattgcctgccgtggcgttgaactgcccgccagcggtgttctcgatccgcgccgccgagacttcaagcgtgcccttgctctccaggcgcccctggttgaccagtgcgccggccacgtccagcttcagcagcccgttgctctccaggcgctggccattgccatgcacgtaatcgcccgccagcgtcaggcgcagctcgctgccgccgaacaggcggccgatgccgctgaaggcctgcaggcgtgcgccgagtgcttcataggcgctgatttcgccgccaccattggccaggctgcccagcgtcagctggctctggcgactgagcagccggccgttgctgttgtccagcgcggcaagatccaggcgcagcaggttgcctgcgctgagctggccaccaacgttgaatacctgtgcgcctgcgcgctccaggtacagggtgttggcggcgtggaccatgctgccggcgttgtccagcgatgcggtctgcaggcgcaggtcggttccggccaccagcttggcctggccgccttcggcgcggttgtccacgctgcctgcggtcagcgtcagcgcaccaccggtgctgcccagggtgccgccacggttgtccagcgcaccggctga

SEQ ID NO: 498189 - DNA, 2193 bp, Stenotrophomonas maltophilia
atgctcttcgctgtgcgtggaggtggccgtgccgatggtgaggtcgcgggtggcggccaccaccacatcaccggtggcagccacctgcgccgcctgcgcgacgacgtcacgtccggcgccgatggtcaccgtctcgccgctgagcgtggtgcccaccaccaggctgtcccgggtcgcgtcgtaagtggtggtggtcttgctcgacagcaggcccttcttcctgcgcgtggtttcctgctcccagctgtggtcctcctgcgccgccagcaggttcacgtcgcgcgtagcggcaatgctgatgccgccgtcggtgctgccgacctgcgtggcagtgaggttggcatcgcgcccggccaccagcgcgatgtcaccgccggcctgcagcgaagtgccgtgcacggtctcgtccatgctctgcgtggtctgcgagaagcgcttgccacggctctgctgctggctggtgttggtggtggtttcggcctgcaggttgagatcgcgcccggccaccacggccaggccgtcgccggccttcagctgcgcggcctgcaggttcacgtcctgcccggcctgcatgcccagcgagccaccggcctcgatgccgctggcgttgagggtttcgcgcgtgtagcggttgctgccccagccgccctgttcagtggtggtcagtgcgttgaggttgatgtcgttgccggccgtggcatggacgctgccgccggccttggcggtcactgccgtcaggttcagatcgtggccggcgtccagcgacaggccgccgcccacgtccagcgtggtgcgacgcaggcttccatcaccctgcatctgcgtggtgagattgaggtcgcggccggcctccagcgccgcgttgccgcgggcacgggtctgcgaaccgaccagtgccaggtcacgtccggcttccagcgccaggctgccgccgctgcggatgctggccacgtcgatgccgctgacactcttcaggtcacggccggccaccagggccacgttaccgccctggatcaggccgctgttgttgaggatgtcctccacggcggtgatgcgggcattgccgcccgcggaaatgccaccgcgatcgttgagcaggctgccggtatcgatggtcaatcgatcatcggcgcggatcatgccctggttggacacattgccggcgcggatctccaccgactcgccagcgatggcggcgccccccagctgcaggcggttggcggtggcctgggacaggtacaccaccggcaccagcaccttctggccgtccacttcctgggcgaccatccacacgatgtcttcgttgagcgcggccacctgttcggccgacagcgccacgcccacgctcagctgctggcgcgcggcttcggtcacgccggcatccatcatggcgcggtactggcccatgccatcgccctggtcggcatccaggtagcgacgcccggtcaggccggtgatctgttccatcaccaggcgctgctcgtagaagtcgtcacccatccgacgcagctgcttgtccgggtccaggttcaggcgctggaacatgtagtccgagccgatccactgcccgaaattggcgaagcgcggatcggtttccaccagccagcgctggttgcccggattgaccgtgtacaggccgccactgggcagcgacaggcccggcagcggattctgcgggctgcccaccacctgcggcggcggcaccggggtgacacggccagggcccggggagccggtatcaccggccgtgcccgcaccctgcgcctgcgcgctggcaggcccggtggccacgccctgctgtgcacccggtgcgccagcattgccgccgaccgcgccggcgccctgctgctggcccagttcgggtgcgtaggcgttgttgccctgccaaccggcaacgtccaacggtgtgccaccgctgtgcgcggtgaccacggcgttgttgacctcgcgcgcttcgatctgcaccttgcggccggcggtgatgctggcattgccgccggccagcgtgacctgcttggtgaccgtgctggtgcccagcgcgcggctgccgccatagatctcgaagtcgcagcggctggggcaagggcggtaggtgtagtcgatggtcgacgtacgctggaccaccttgtagccggccagcgcctcgttgttgaccacgccggcccagtcattggggtcttcgctgttggatga

SEQ ID NO: 498190 - DNA, 576 bp, Stenotrophomonas maltophilia
atgctggccaccaccttgtcgccgctcagctgggccccctgcagcgtggtgtccttgccgctgatgacggtcaggttgcggtcggcgtccaccacggtttcgacgtgcgtggtgccgttgccgctgcccttgcccttggcggtgctggcagacacgtaccaaccggtctgcgcgccgatgctgaagccgatctcaccgctgccgctcttgttcttcgacgactgcgtgtggtcttccgcttcgctgcgcagggtgatgttgtcccgcgcggccagcgccacgttgtcacccttcacctggctgccgatgatgctcaggtcaccggcggtggccacgatgctgacgtcgccctggctacggatggtactgcccaccgccgactggtcgtggctggtctggctggcactggagctggaggcgccgatgccgatgcgcaggctcacgccgtcggtggcgccggaagcgccttgctgcatggcgccgccgacgccagcggcggcattggccgcctgcaccgcgtacagcgccttcaggcggtcatcctgcgcattgccggccgccttggccgcaccgtag

SEQ ID NO: 498191 - DNA, 465 bp, Stenotrophomonas maltophilia
atgaagattgatcgcgatttcatgattttctgcgccgcgttctcagggatcgctgaacgaaagaagtgtgtcggcatacaaggaagcgagtcggagcccttcatgctgaaggtgtacagcgagtatctctcgacttcacatccaaaacccgacatcaagtggatcgactctgtccctggcggaatccaagcatggatgatcgaaacgatcgacaggtacttcctctcgatggacaaagcacctcgttgggtacgtgaacccagctggcgcttcattgatgacaaccccatggtctttgtcagccagatagatcttgaagacaacgcgacaatgaggaacaacgcttcggcaggtgaggttctttatctgttcagcggcagacaaccgtgcgacgggggctgggagctgaaggtgaagcttgtcaagcaagacaaagcgactcccggaacaagctaccttggttag

SEQ ID NO: 498192 - DNA, 1881 bp, Stenotrophomonas maltophilia
atggcagtactgggtgctgccattggcgtgcagcacctgccccaggcggtccttggcgaagcgctcgtcggcggcacaggcggccggcgccacgtcatagctgtagcccacgtccagattggggtccggataggcgatgccgatcaggcggttgagcgcatcgtagtgataggcggcggtgacgccgcgcgcatcggtggcggtcttgcggttgccggcggcgtccacggtgaagctgctggcgccactgtccgggctgacctgcccagtcaggtcaccgaacccgttgtaggcataggtcgtatgcaggcctttcgggtcggtgacctgggtgacctggtccagcgcgttgtactggctgcggatctccgccgccacgccgccgacatcctgcagggtctgcgccagtcggttgagcggatcgtactgctggctggtcacgcgctgcagggtgtcggtcacggtctgcgggttgccgttggcatcgtaggcaaagccggtggcgtgattgctcgcgtccttcagtgcggtcagctggccgagcgtgttgaacgtccgtgccagggtacggcgcagcgtcccgcctgcatcgagcgtgtcttccttgaggcgattgccggcattgtccagcgtgtagtggatggtgttgccagcgctgtcggcgatgtccgtcagccgctgcgcggcgtcgtagacgtaggtgacgctgctgccgtcgggctcggtgacctgctgcacttggccggtcggccagtagctgatctgggtagcccggtcctcggctgtggtggcaccgcgcacggtgatcgaggtcggccagccgcggggatggtaggtgtaatcagtcaccacgccgttggcgtccttgaccgacaacggccgcccgaacgcgtcgtaggccaaggtctcgaccgtctggcccagcgcattggtcacgctgcgcaggtcgcccttgcgatagctgcaggcaccattggccgcgcatcccgcgtcatccgcggtgtagtaggcataggtggagacatccgccacatcactacgcgggccatccacgctacgcagcagtcccatcagcgggcactccgggccctctgcctcacagtaggtctgcgtggtgacgcgggtgtcaccggtcaccatgtcgcgcacggcgatggtggtcggctggaggcgtgcattgcgcacgatgcggatctcacggttgccgacggtctgttgcaccagccgattgctgtccagagccactcgcgtttcgctgacgcgctggtccggagtaccggccgcttcagtggtggtggtcacgctgatggcgcctgcggcagcatcgctggcctcggaataggcatactgggtgacaacgcctcggcgatcggtcaccgactgcagccggcgccggaaatcagtgccctcgggcagataggtgcgactgatgctgccgttgctctcggtgacgccgttgaccttgcgcggaaggccactggcgccgctggcggtcaatgcgtaggtactctgcttgcccagtgcgtcggtgacgatcgtggtgcctgccagggtgtactccaggcgcacgccatcaatgcccacgtcggcctgactgcaatcgccggaatggcggctgcaggtgacccgccccttgacgtcgtagccgtaccagctgtaacgctggttgccctcggcggtaatgccggtcaggtagcccgggaagcgggcgtcctcatagtgatacgtgcggctggcaccgtctgcgtaggtcgcactgatcaattccccggccggggaataggcgtagctcaccacgggctggccggcgatcaccagggccgagatcagcgaatcgtcacccggtgcgagatactggacgtccacgcgccggccggttga

SEQ ID NO: 498193 - DNA, 1161 bp, Stenotrophomonas maltophilia
ttgagccacgcggtccccactgccatccattgcctcatacaccgctcccaccttcttgaaggcgagctggccaccctcagcgtcaatcaaacccacctggacttccgaactcggtggaaagtccgtgtcgtcaacgccgagcgtcaggcgaatgttgtgcgagtgcgtccatccttggcccatggctccgccgctggtgccggtcaaggaatgatactggcgatcgaagcggacccacccgagatcaaggtccgcttccggctgagacttgtcgccggtggtggggtcgcacggattaccgactttgcactcctgcggcggcagaggagaagtccagtacgccagcagcattgccatgtttggctcgtcctgctgggccaaggcgcacatgcccaggttatcgtcccacatcatcatggggcgattcatgcattttgcggttctactccgataggcgtgttcccaaaagaccagctccgagcaggccttggtcccctcgtagtaactgtttttgacgaatttatagcgtttgctctcgttgatgacgctgccgtcatctcccactccaagcccgccaacctcctcccaggcctcttcagtcatgacggtggcagcgcaccgcggatcgctcgcattcttcgacaggaacatgctgcggacggcatcctccgtggcgtacttctgatggttctgctcatacacccaatccgtggttacgatcttctcgggcttgacgcgatagtcatagatcgtcttgttcggaagggccctctggcgcttgacctcccaaacgaaaggcttatcgacctcatactcggcgaagaaggcccgtatgtctttctggacagccgcctccgtggaacggggctctcccatcgagaagtagctttcccatttcttctcgatctcctgcgcctgcacgctggacgtcgagcacgccagcacgaacagcgccagactgatgagcgaagtgccagagtttgccttcaacatccctgttctccttcctggacgggcacagcgccggcgggaacgagaacgtggggcagcagcctcttcacgtcatgcttcggatcgtccctggtccggaatgcggcgtggccgcatggggacgttatctccgatgtggtttacacattcaagtcaaaaactgtggaatga

SEQ ID NO: 498194 - DNA, 1788 bp, Stenotrophomonas maltophilia
atgactgcacgcaccgctccgcgctggcccgtacgctacctgctcttcatcggcggcctgggtggcctgctgtacggcatcgacatcggcatcatcgccggcgccctgccctatctcgaagcaactgccagccacgcctggcagctcagcagccagcagctcggcttcgtggtggcagcggtgctgctgggcagcgtgctgtcctcgctgttcgccggcatggttgccgacctgatcggccgtcgcggcgcgatgctgctggccggcctgctgttcaccgcctcgattccgatcatggcactggcctccggctacacgccgctgctgctggggcgcctgctgcagggcatcagtggcggtttgatcggcgtagtgattccactgtacctggccgaagtgctcagccccgagcgacgtgggcgcggtgcggcgatgttccagctgctgctgaccgttggcctggtgctggcagccctgatcggcctgtaccacgctcacgccgtggatgccgccgccgaagccgtgcgttcgctgccggtcgcgcagcaggcgcaggaactgttcacggtgaaggaccacgcctggcgcaccatcttctggacctgcctggcgccaggcctgctgttctgcgccggcatcttctggctgtccgaatcgccacgctggctggtacgccgcggccgcatcgatgaagcccgccgcagcctccagcgcgtcctgcccgccgcagatgtcgagctcacgctggcccagatccaggcgccggaatcgagcagcagcgacggcaagcgcgatccactgctcagccgccgctacgtggtgccgttcctgctcgcctgcgtggtgctggcctgcacccaggctaccggcatcaattcggtgctggcctacgcggtcaacatcctcaaccaggccggcctgtccggttcagtggccaacggcgccgacgtggcgatcaagctgctcaatgcggtgatgaccgtggtcgcgttgctgctggtcgaccgcaagggccgcaagttcctgctgatgctcggcagtggtggcatctgcgtggccctgctggccgcggccgcgctgttcttccaggccgagcgtggccgcgccgatgtgcaaccgcagctgcaggcggcggtcagcggcgatggcctgcaactggttctggatgacgcgcagtggcagcgcctgagcaatggcatcgacagccagggccgaccgatgcagctgaccgtgtcgtacgcgtatggtgactttaccaacgtgcgcgccctgcgcagcgacaacctgaccgatcgcgagctgcgcatcgagcgcgccggcaccgtgcagcccgacagtgtgattggtgcgttcttccgcaagctgcatctgaacccgttcgccgacccggccagtgccgcgcaggcgccgctgcgcatcgaacaggcgcgcatcggcccggtgccgccaccggcacacggctgggccgtggccgcctgcatcctggtgttcgtcgcgttcttcgcggtcggccccggcgtgtgcgtgtggctggcactgtcggagctgatgccgaaccgcatccgttccaatggcatgagcatcgcgctgctgatcaaccagttcgtgtcgaccaccatcgccgccatcttcctgcccacggtgggccactacggctacgccagcatgttcgtgttctgggcggcctgcaccttcgtgttcttcctggtagctgcgttctggctaccggagaccaagggcaagtcactggaggagatcgaggcacggttcgcgggaaagcggggctga

SEQ ID NO: 498195 - DNA, 471 bp, Stenotrophomonas maltophilia
gtgagaacggcgcttcccctgttggtgggcgtggccttgaccctggccggctgcatgccgggcgccacgcccgcagtgcagacagtcgagcgccatgcaccgcgccccggtgtggatgtgcgcctgagcgcggtcgatgcggatggcaagggcacgcaagcgcagtggcagggcgagaccctggcgctgcgcgagccgccgattgccgacagtgcagatatcgccgatgtgcgctatgtgctggacgcgggccaggagcccggcctgcagatccggtatcggccagaagcacgccaacgcatccacgatggcacggcggcgctggtggggcaacgagcggcgatcagcgtggatggtcgcgtgctgatggtggcgacggtgaaaggcccgttcggtgaatcgatgatgttgagcgggctgccgagcgttgccgaggcgcaggcgttggccaggcatatcaccgggaagtga

SEQ ID NO: 498196 - DNA, 552 bp, Stenotrophomonas maltophilia
atgaattcccccttgtctcccctgttgtcggcaatcggccgtagctggtggatcctcctgctgtatggcctggtcgctctcggcttcggcatcatcgccatcggctggcccttgtcggcggccatggcattggcctggacgctgggcgtgatggccatcatcgagggcgtcatcagcctgttcgcattgatcaatggcggcagcggcgcgtcccgcggctggctggcgctgtatgctctcgcctcgctgggcttcggcatcctggcggtgatcaatccgctggcaacggccagcgtgctggtgctgttcctggcggcgtggctgctggtggccggcatctatcgcatcgtgttcgcgatccgcgtgcgcaagcagatccagggcgaatggttgctgatcctcagcggcgtgctggccgtggtgctgggcctgttgtttgcggccaacccgtatgccggcgtggcggtcaccacgctgtggatcggtatcggcagcctgctgtacggcctgctgcaggtgctggtggcattcaagctgcggaagctgaagtga

SEQ ID NO: 498197 - DNA, 564 bp, Stenotrophomonas maltophilia
gtgggcagcaccatccgcagccagggcgacgtcagcatcgtggccaccgccggtgacctgaacatcatcggcagccaggtgaagggtgacaacgtggcgctggccgcgcgggacaacatcaccctgcgcagcgaagcggaagaccacacgcagtcgtcgaagaacaagagcggcagcggtgagatcggtttcagcatcggcgcgcagaccggttggtacgtgtcggccagcaccgccaagggcaagggcagcggcaacggcaccacgcacgtcgaaaccgtggtggacgccgaccgcaacctgaccgtcatcagcggcaaggacaccacgctgcagggtgcccagctgagcggcgacaaggtggtggccagcatcgaccgcaacctgtccatcatcagcgagcaggacaccgacgactacgccagcaagcagacccaggctgacggcacgtttttgtgcggcagcgagcgctggagtgggggccaacatctgagctttgtcgccaggcgtggatgccttcagctctgttaccagccaagcctggcaccaccagagcgctgttga

SEQ ID NO: 498198 - DNA, 1425 bp, Stenotrophomonas maltophilia
atgtcaccagcccagcccagcatcccactccatggcggtgagaacactgcattcatcgtcctgatcagctgcgtggccacgctcggtggattcctgttcggcttcgacagtggtgtcatcaatggcaccgtcgatggcctgcgccaggccttcaactccagcgaggcggcgctcggtttcgaagtcgcctcgatgctgctgggctgcgcgatcggcgcgttcctggcgggttggctgggtgatcgcctgggccgtcgtggcgtgctgatcgtgtcggcgctgctgttcctggtctcggcgctgggcgccggcgccgcccatgcctcctggctgttcattgccgcacgcgtgcttggcggcttcgcggtgggcgcggccagtgtgatgtcgccggcctacatcgccgaggtggcgtcggcgcgctatcgcgggcgcctggccacagtgcagcagatggcgatcatctgcggcctgttcgcggcgttcctcagcaactacctgctggcccgcgccgccggggcgtcgaccgagccgttgtggctgggtcatgaggcctggcgctggatgttctggatgcaggcgctgccgtcggggctgttcctgctgttgttgctggtgattccggaaagcccgcgcttcctggtcctgaaggggcgccagcagcaggcgagggcggtgctcgcgcggctgtacggtgataccgcggcggcggccaagcaggccgagatcgaaaccagcctggcccaggaccagcacaagccgcgcttcggcgacctgcgcaacaaggccaccggcaagctgcgcccgatcctctgggtgggtatcggcctggccatgttccagcagctggtcggcatcaatgtggtgttctactacggcgcggtgctgtggcaggcggtgggcttctcggaaagcgacgcgctgctgatcaatgtgttgtccggcgcactgagcatcggcgcctgcctgctgacggtgctgttgatcgaccgcatcgggcgcaagccgctgctgtggatcggctcggtcggcatgtcggtggcgctggtgctgatggtggtcgcgttcgccagtggaagcctggccgacggtcgcctgcagctgtccgacggcatgggccggctggcgctggtcgcggccaatgtctacgtggtgttcttcaacatgtcctggggcccggtgatgtgggtgatgctgggcgagatgttccccaaccagatccgcggcccggcgctggcggtggcgggtgcggcgcaatggacctcgaacttcgcgatcaccgtgaccttcccgatgctgctggccggcatcggcctggccggcgcctttggcatctacgcggtcgcggcgatcctctcgattgtcttcgtggtccgctacgtacgcgagaccaagggcaaggagctggagcagatggaaggctga

SEQ ID NO: 498199 - DNA, 498 bp, Stenotrophomonas maltophilia
atgaagacaccctccactgacgctggtcggcttgcgcaggcgttgatcctggccgtgctggctgccggcatgctgccggcgcaactgtttggcggcctgttgttcgcgctcgaattcaggcgcacgccgatgcccgcgctcaccggcggtggactgatgttcgggctgggcgtctgcgtcgccatcgcggtgttcctgccgatggcgttgctcctgcggtctcggtggcccctgcgccggacccgcttcgtgcttgcagggtctgctctgggcgcgctggccatggccatccatgagtggccgggcgcgatccatgggccgctgctgcagcgcctgcgctatgtcgatacattcgatgtgatcagctatgggctgacggtgttggctgcagggggcctgggcctggcctccgggctggccttccatacggtgttcaggctgtcactgcagggcggtgccgtccatgccacgccgccgccgccgggcgagggcgcctga

SEQ ID NO: 498200 - DNA, 705 bp, Stenotrophomonas maltophilia
atgcgattcaagcgaccgcaggtgcgctatgccgatacgccgcagcctgccaccccataccaatccgccgcgcaggtgtgggacgagcgtatcggctcggcccgcgtgcaggcgaagaactggcggctgatggccttcggctgcctggtgctggcgctgctgatggctggcggcctggtctggcgttcggcgcagtccttcgtgacgccctatgtggtggaagtggacaacgccggccaggtacgcgcagtgggtgaagcggccacgccgtaccggcccaacgacgcgcagacggcgcaccacatcgcgcgcttcatcacgctggttcggtcgctgtccatcgaccccatcgtggtgcggcagaactggctggatgcctacgactacaccaccgacaggggcgcggccgtgctcaacgaccacgcccgcaccaacgacccgttcgcacgcatcggccgcgagtcggtgacggtgcagatcaccagtgtcgtgcgcgccagcgacacgtctttcaacgtgcgctggacggaacgccgctacgtcaatggcgcggccgccgggctggagcggtggacggccgtggtgtccatcgtgctgcaaaccccgcgcaccgaggaacgtctgcgccacaacccgcttggcatctacgtcaacggcctgtcgtggagtcgcgagctggattcttccgaaggagccaagccatga

SEQ ID NO: 498201 - DNA, 744 bp, Stenotrophomonas maltophilia
atgatgaaacgcttcgaaaacaaagttgtggtgataacgggaggcagcgacggcatcggcctcgcaacggcgaaattcttcgccattgaaggggcccacgtgtacgtcacagggcgtcgccaagaactactcgccgaggccgtgaaagagatcggccatggcgcggtgggcgtgcaaggtgacgtcaccgactcggccgacgtcgctcggctttacaaacggatccagcgtgatcaccaaaaagtcgatgtcgtgttcgccaatgcgggcttttacgaagttgctccacttgatgcgatagacgatgcgcattttgactcaatcttcaacgtcaatgtcagaggcatggtgttcactgtgcagaaagcactaccgttgatgaaggagggaagtactgtcgtccttaacggctccattgccggcagtaaaggcttgccaggccaatcgctttacaacgccagcaaggcagcggtgcgctcgttcgcccgcagctggacaaatgaccttaaggagcggggcatccgcgtgaacgtggtctcgcctggcggtacagaaacacgcctgatacggagctacctcgactcacaaccgggagtcgaagacgcgctgaataaaagcgttccgcttgggcgattgggggaaccgaacgaggtagcacgagcggtcctcttcctggcatcaagcgaaagcagttttatcgctggacatgaactttttgtcgatggcggtgccgctgcggtttag

SEQ ID NO: 498202 - DNA, 942 bp, Stenotrophomonas maltophilia
atgactcatgtaaaaaacactgcagcagcccacccgacccgcgccgaactcgtcgctggcctcgtttccgccatggcgaacccggcgcgctcaccaatcctgcgctccccggcggacgatggcatcgccttctcggacgttttctttccggcaatggacggcgtgacactcgaaggctggttcattcccggcgacagtgatcgtttgatcatcgccaaccacccgatctgggccaaccgttatggctttcccggccacctgaagccttatagcgacgcgtgggaatcgagcggcaacaacatcgaagtcaactttatgcccgactacaagcacctgcacgaggcgggctacaacatcctggcttacgacctgcgtaacttcggtcagagcggcgctggtagcggtggtgtgatcggcaatggcatccgcgagtatcgtgacgtgatcggctcgctccgctacgttcgctcgcgacccgacctgaaggctatgaagatcggcctgctcagccgctgctgcggcatgaacgcgaccctggtcggcatgtccaggcaccgcgaggagttcgacggtgtgcgagcgatcgtcgcgccgcagccgatttcgctcagctccttctaccgcaccatcctcggccacatgggaatgccggatgccctgcccgaagtggccgatgccctgcgccgcgcgaccagcatggaactgaaggacatggacatgccgccctacgcctcagcggtggatatcccgacgctgctgctgcaggttcgcgacgatgcgctgacgacgccagcggatgtgcaggccatcttcgatgccatgccggcaaccgagaaagagctgctctggattgagggcactcaccgccgttttgatggctacaactacctgcctgaaaatccgaagccgatgctcgactggttcgagcgcttcctcggctga

SEQ ID NO: 498203 - DNA, 873 bp, Stenotrophomonas maltophilia
gtgctcggcgtcagcccgacgacgctcagcgaaaccgtgcgccgcctggaagagcgtttgggcgtgcgcctgctgcaccgcacgacccgcagcgtctcgccgaccgaggccggcgggcgcctggttctgcaactggctccgctcctggcggaagtggatgcagcgctggccagcctcaatgacctgcgcgaccggccggcgggcacattgcggctcaatgttccggtcggagtcgcacggctggtgcttccgggactcctgccggagtttctgagtgtttaccccgatattcaggtggaggtgatcgccgatgacaccatcgtcgacgtgctggcagcgggtgccgatgcaggaattcgctatgacgagaaactcgagcaggacgtaattgcggtgccaattgggccgcgggtgcagcggttcgcgctggcggccgcgccggtttatctcgcatcggcaggtcatccgaagcatccgcaggatctgctgcagcatcgatgcctgctcggccggttcggtaacggcgcgctgttaagcccgtgggaacttgagtgcggcggtgagaccatccgggtcgagccgaaaggaccactcattgtcagtgtcagcggtgccatggatctggccgtcgacatggcggtggccggcgccgggatcatcggtctgttcgaggagtggttgcagccgtatctcgaagcaggccgtttggtgcccgttctccacgaatggtggtccgccttcccggggccgtttctctactactcgggccgacgcctcgtgccgccgccgttgcgcgcattcgtcgacttcgtcaggtcggcgcagcgggggcgctctggcgaaggcaacgtagatccgcaacgcagtggctga

SEQ ID NO: 498204 - DNA, 477 bp, Stenotrophomonas maltophilia
atgaccgttcccctgccttatgatccatttctgcaggcctcatcagagccattgctggagctggtgattgtgcgtgtgggctgcgatttgttcggtgtggatgtcgagtcggccgtggaaatacgcggaccagagacgctgacccgaacccgggaccgccagtttgtagtctcgatcagagggcaagacgtccctgtggttgatctgggcttgatcaccggaggcgatgcagtcgggacgggttgtccagcaatgctgttggttcaatccgcggttcagctgttcgcccttgcagtggacgaagtcttggtcatcgagagcctgtctgcctggcgtgccgagcctgccgctcacagcgaccgattcgctgagctctgcccgcagggcgtgcagctggggaacggcaaacgcgtcgccgtcattgaccctggtcgtgccctatccattcagcaacggctggagatcgattcaggttga

SEQ ID NO: 498205 - DNA, 303 bp, Stenotrophomonas maltophilia
atgtgcctgctcgcggagggcttggtgaacgacgaggtcagggacgcatttttgcgtcttcaagaagcaatgaatcgcatgcatatacgtgttgcggcgctggaagccgccacagtgctcctgcttcgcacgaacgccggcaacgccaacgtcgcagacgagtttgagcgcagcattcggcactacctccaagggatggaccagcaccgggaccatgtcttcgcgttcgaggagatcgtcgagccatggctgggcatcctgagggaaccattggctggcattcccccgtctccgagccgctga

SEQ ID NO: 498206 - DNA, 1116 bp, Stenotrophomonas maltophilia
atggtttcggacctcaaccgtctgatggagacagctgaccacagcctcagcgccgtctccaccttgcttcaggccattgcctctggcgacttgacccaccgcatggaaggcgacttccgcggcgtctttgcgacgatgagcgaagacgctaacgcgaccgtggctcagctgaccgatatcgtctcccgcatccagcaggcatccacggcaatcaataccgcgtcgacggaaattgccgcgggcaatggcgacttgtcgcgacgcaccgaacaacaagcggccaacttggaagagacggcggcgtccatggaggagcttacctccaccgtgcaccaaaacgccgagcatgcacgccaggccagcgagttggccagtggggcctcgcgcgtggccgggcagggcggtggagtggtcgggaaagtagtggagacgatggggggtatcgaagcctcgtcgcgccgcatcggggacatcatctccgtgatcgatggcattgctttccagaccaacatccccgcactcaatgcggccgtggaggcggctcgagccggggaccagggtcgagggttcgccgtggtggcctccgaggtgcgcacgttggcacagtgctctgcctctgcagccaaggagatcaaggggctaatcgaggactctgtggccaaggtcgctcaaggatcggcgctggttgaccaggctggccagacgatgtctgagattgtcagctcggttgagcgcgtgtccaacgtcattggtgagatatctgccgcctctcaggagcaggcgtcgggcatcgagcaagtgaaccaggctgtttctcagatggacgaaacgacccagcagaacgccgcgttggtggaagaagcgaccgccgctgcccgatccatggaagaccagtcggtacagctggcaaccgccgtcgcggtcttcaaggtgaatgaacgcgcgcagggaaagacgccagccacggccagtgcaagcttggccaagccaggtgctgtggacggctcccgcctttctcaaaccgcctacgcgggcaagccaaccccgccgaaggcattgccagctcgtcccgcacggcaggtatctgcggacgcagcgcactggcaggagttctaa

SEQ ID NO: 498207 - DNA, 1113 bp, Stenotrophomonas maltophilia
atgctggcattcgccataacgaccagcatgaccttggcgttgggcatcttcactattgtccgcgcgtcacattcgaagcaggagttgtccaggattgagtccgtctgggcgcctggcagctatgccatcggagagatgcgtgcgcagttcggcgatctccgcatctacgaaacctcccaggtcagcgaagccacttccgctgaggccgtcaagcaatacgaacagcggatcgtggcgggcaaggccaagatcaacgagctggtgaagcaatacctgcggtccttcgccgatggcgaagatgccgcgttgttcaagccggtcagcgctgcgttgagcgattactttgtcatccacgatcagcttcacgctgcgctcctcgctggcgatgccgaggccgcgcagacgatctcggtgacagaatccagggcaaagcgcgtggcgctgttcgacgccatggataaagtcagcgaatacagccttcgcggcatgaaggctgaactcgcaaccaacgcagcaagcctcaacaacctgatgtcgatcacaggcttggtcttggcggtgctgtacttggtcgcaagcgtgctggggtgggcgatcagccgttcggtcacccggcccattggtgaggcgttgcccgctatccgcagcgtggccaatggcgacctcaacgtgcgaaccgactaccagagccgcgatgaggcgggccagatgctgctctccctccgtcaaatggttgccaccttggagcgtttttcgaacgacaccaaggtcatggtcaagcttcacgaggccgaagacatctcgcaccggattccggaggacctgcccggtgtctacggcgagctggccaagggcatgaacacaatggtgttcgagcaccttgaggccatcctggatgccatccaagtgctcaacgagtatgcggccggtgacctgcggcgtgacgcgcgacgcctgcccggctcccgggcgtgctccacgaatcgatggacgctgccaaagcaagtctgctggcgatcaacacggagatcaagcggttggcagtgtcggctgccgacggcgacttctccgcccgcggtaacacgtctgcgttccagcacgactttgaattga

SEQ ID NO: 498208 - DNA, 342 bp, Stenotrophomonas maltophilia
atgatcagaagcactgtcgttcagcaccgtcactttcaagacggcgaccagatcgttgtcctgcagacagcgttcaagaactggctcctgaatacgtcgttcgccattggatttcccgactccagcaatcggccgctttctgatcgagcggagcaggccaagcgcgcgctgttggccacggcgagcgagatcaaaggccacagttaccaggaggccttcgtcaggtctcctttcgccgcgcttatctccattcatagcgcgttgagtgcttcaagccacggcgacgccgtgttcttcctgtgcgccgacgaagccacgtcggaagcatctccaaaaaactga

SEQ ID NO: 498209 - DNA, 384 bp, Stenotrophomonas maltophilia
atgaacgttctcttcgtggacattgaaacctccatctgtgagttggttggagtcgaactaagagagctcggctatgacgtcgaatgcttggaattcagctcaggagccttgcgcgcagcgcaagcggggcacgtcgacgtcgtcattctggatgtgcccgccagccctgacgcccggcgcagtgcatacaagttggcagacgaacttcggcgcgatggcatcgctttcttctttacctccacgcttcatccgaacgatgtgatcagccggcaccgggatcggggtgttttgtccaagccctacggcgtcaaacagatcgattcctggatcgaggcgcttggcaaagattgcagaggcgaaccggcaggcgcgcacgtgcgctag

SEQ ID NO: 498210 - DNA, 429 bp, Stenotrophomonas maltophilia
atgccaaaccgtgcggtggtttttgtgagtgaggccagcccctaccttagccttgggcggctggttgagttgatagccgacgcggagcggttcaacagacaggccggcgtgaccggggtgaccttgtacgacggggcccggttcctgtcctacctggagggtccaccggatggccttcgcgttgcctacgccagggcatccgaagtgcgcagccacctgaacttcatcgagttggcacgcgggcgtgtctcgcaacgtcggctgccgcggtggcctatgcggctgtttttggccaaggagggccagctgcagagcatcgcgatggcagactgggccagcttctctcagcggggcgatgcggacgcaatgaattcaacggcgatggatctccttgtgcgctttgccgaaagcagaagtcgtcccaactag

SEQ ID NO: 498211 - DNA, 276 bp, Stenotrophomonas maltophilia
atgcggttggaatttactcacagccacatctacccaggggccaccgcgtccctgacaggcgagcaggctgaactgggcgagagaaccacctgcttggtcgagctcagtgacggcgtggtcctctcgaccagctgtctgattcaagggggggagatcatgctattcatgccggactacctgaccgcccgtggggcaaagattccggcgaaggactgggtgctgcggaaggatctggaaacaggcgcctggaaggcaaaatcaaaggttgccgtgtag

SEQ ID NO: 498212 - DNA, 435 bp, Stenotrophomonas maltophilia
atgtctaagtgtgcggtggtgttcgtaagcgcggctgtggaagagatcggtgaggagcgcttgcccgaagtcatgcgtgcaggccgagagttcaatgccaagtgcggctcgcgtgcagttgtatgcttcgacggcagcaggtttttaacgtatttggaaggcacagcgagtgcggtggctgcgagctccgtttacacccagtccttcaccctgcataccgaaatcgttgagctggcgcggggatccatccagcagttgcggttccctgcgcatgcattgctcttcctgcggatttcagaagccgagctcaaagcactgatgaggtcgaactgggtgaatttctcccaacgcttcggagggaaattcatcccagaaacggggatggagcggcttgccgcattggtcggcaatcgtctcgatgacgttccgcagtga

SEQ ID NO: 498213 - DNA, 408 bp, Stenotrophomonas maltophilia
atgcgcggcctgtgccccaagaagaagagccggctctcgccgcaaggcaaagccatcgcggccgcccacgtgctgctggacagtgccgagggccgattggacgagaaggccgccggcaggcgcttgcgcgaggaagtgggcctccaatggtcctacctgacttgcatccaatacctgtcagggcaagaagccttggcggccattgaatcgctgcccaaagggtgggaggaaaacgggcgcacccaggggcacctgtttggggctgcagtcatggctgcgcacacggtggccaacctgcgttcggacggcagctcgttgtgcgccagctacttggcccaagagctcaaagggaaaaccgtggagcagtggctggccgagaaattcgacgtgttccgggaagaagtctga

SEQ ID NO: 498214 - DNA, 171 bp, Stenotrophomonas maltophilia
gtgggctcaggccaaccccggagcgaagttcccccggcccatggcgcatcgaagaaggcaccgggcaaggtggtcaagaaggcgggcaagccggtgaagaaggccgcccagaaggccgtcaagaaacttgcgaagaaagccgtcgccaagaaggccggcaagaaggcctga

SEQ ID NO: 498215 - DNA, 375 bp, Stenotrophomonas maltophilia
atgcccaaactccaacggttgagaaccgaggctttcctcgcccagaagggccggtgctgctattgcagcctgccgatgtggaacgcctctcccgatgaactaaggccgttcggcctgagcgccaaaacggccacgccgctccgttgcaccgctgagcacctggtggcccagcaagagggcggcaaggacgtggtaggcaacatcgctgccgcctgctggctctgcaacatgcgccggcacaaacgcaagtcgccgccctcccccgaggcttaccgcgcgttcgtgcagaaacgcttggcgaagggcaagtggcacccgccgagcgtggccaagttgcgcctcaaaacgcgtggaacgcaaccacccgacggatga

SEQ ID NO: 498216 - DNA, 615 bp, Stenotrophomonas maltophilia
atgaacctgcaactcacctgcctctgccgggaggacgtgttcgccgatgggttcgccttcgcagaactgctggaggcgcccttggccgcgttgcgctggggtggtgcgtggttgacccagttgaagcccggtgggccagtgaccgaggaggccatgcggcgcttcgctatgggccaggatttcgatgggcagcagcggttgtgcgaaggcgagggccaccacgcccgggcggcgggctaccgcgtttcgttgcgcctgcccaaagggttcgcggcgttactggacaccgacggcgaggagagggcacggctacaggctgcccaccgccatgcggttgaccaggcgctgtcgttcctgccgttccagcgtgatcaccgggtgctcttcgttgcatccgatcggttggaggatgactggacgcaccactggttgttcgccatcgcatgcgcaccgaacggaaagtgggaacggcttgcgctgagcttgcggttggcggccagcgaggacgcttatacccacgccatgggggccttcatggaagcgttgctggagaccaaacgattggagcgcttcttccgcccagcccccgtgggccgactgaggcagaggctgtga

SEQ ID NO: 498217 - DNA, 720 bp, Stenotrophomonas maltophilia
atgtattccatgggggctgacatgaatttcgtggcaagtataaaaaagggtgtgcggggatggttaaaggatttgcgtgacccaccaaatctatttcaagagccgatctggaaggttcgcgtggagttccttgtattgacgctgctgtctccaatcctgatcccccgctatgtcattgagaaacgcatgggtaaatggagaaggcatcgccggatgccacccatctttcagctattcgaccgcgaaggagggttccagctgagggagcttgagcagttgattgcagatggcgctgatgtgaacgctcgggagcgaaaagatggaaaaacgccacttattcttgctgttatgcaggacagtccatgggaagaaaatgggcgaaggtggctcgaggtttgtcgcgtgctgctcgaagctggcgcagatccggacgcggattacgactgtggcgagataaggcggtcacctatctatttcgcctatctggcgggcaacgtggagctgctcgacctgttgttgcaggcaggggccaatccgcgttcgaaggcttggttgcagtttgtcaatgcagagccacgtcccgatgcgtggctcgaacagcaacgtccggaaatacgcgatcgcctatgcagatgggaaacggaacaagaggccctgcgtttggatgcgactctccctggcgcaacgaaagccgttcctaatagtagggcacggctatga

SEQ ID NO: 498218 - DNA, 621 bp, Stenotrophomonas maltophilia
atggccaacaccgacttactcgctgcaattcaacagcgcaaccccgcccaggtggccctggcgatcgggcgcggggcccaacccaacgcgcaaggcctcagtcaggcgctcccaggttccgtcgggggcgcaggcggtggcgaacagccagtgatgcgtccagtcgccccccaagcgatcggacgcgacaaacagcacctggtgatcccgttggcatgccagcgacaacaacgcacgtccaacggctcgaaggtgggcgaaccgcagcaggtcgcgttgttccgcgtcagccatcgccaactcatcgataaatccctccggcaggcgaaaccccacccggtagcccgctgcactttcgtaatgagcggcgccctcccacaattgctgaatcccatcgaagtcctggcccaacgcgaagcgccgcatggcttgctcggtcacctgtccgcgcaacttcaacacagacaggcacgaaccgccccagcgaagcctgtccaaaggtgtccccaacagcgcactgaaagaaatgccgtgggcgatgatgtcctggcgacagaggcacgagagatcaatcaccagaggccttccttcttgcacgcctcagggtattggctggaatga

SEQ ID NO: 498219 - DNA, 1512 bp, Stenotrophomonas maltophilia
atgcccttgaccggtcccgccctgggggcgctgcgcatcctgctggtggaggactcaccggaagatgccgagctgatgtccgaacagatgctcgaagcgggcctggaggcccgcttcgagcgtgtcgagagcgaggccgaactgcgccaggcactggccgcgttccagccggacatcgtgctgtccgacctgagcatgccggggttttccggtgatgatgtgctgcgcatcgtgcgcgagacctcgccggaaatacccttcatcttcgtctccggcaccatgggtgaggagaatgcgttggcggcgctgcagaagggcgccaatgactacatcatcaagcaccagccggcgcgcctgccgtcggcggtggcacgtgcgatccgcgatgcacgcagcgcgatcgagcgcgcacgggtggaaaccgagctgatgcgcgcacagcgcctggaaagcctgtcgctgctcgcagccgggctcagccacgacctgcgcaacatcctgcagccgttgctgatcatgccggatctgctgaaggcgcgtaccgacgatccgcagctgcaccacctggccgatgtcatcgccgagtgcggccgccgtggccatgagatggccgaatcgatgctgtcgttcgtgcgcggttcgcgcaagccgagcgagcgcatcgagatcgatggcctgttcgatgcggtggcactgctgttgcgcagcaacgtgcctgatgcggtgcgcctggagttgcaggtgcaggacgaaggcctggtggtcgacgccaactacaccgaactgcagcaggtgatgctgaatctggcgctcaacgcgatacaggcgatgcccaacggtggccgcctgagcctgactgccagccatgccggccaccgcgatggcgtggactggatgcacatacgggtcgccgacgaaggcatcggcatggatgcggacacgctgtcgcacctgttcaatccgttcttcaccaccaaggccgacggcactggcctggggctgatttcctgcaagcgcatcgttgaaggtgccggcggcagcattcacgtcagcagccagccggggcagggcacctgcttcgaactgcgcctgccgatgcacgaggccatcgatggcagcgagccgatcgaacagctggtggccttgggcagcggccaatcgatcctggtggtcgatggcgaagccacgcgtctatcgctgctgggcaatgcgctgtccagccagggctaccagctgcagttggcctccgatgggccggcagcgctgcgctggatgcagcaggaggcgatgcccgcgctggtgattgccgatgccggctccaagctgctgccggccagccagctgctgggcgagatggcgacgttgggctatcgcggcccggcactggtactggaagacccggcagtgccggtcgcggccgatgccttcccggacggcgtagaggtgcatgtgctgcacaagccgctgcagatgcagcaggtcttccgcgccgtggccgaagcgctgggctga

SEQ ID NO: 498220 - DNA, 798 bp, Stenotrophomonas maltophilia
atggtccgtttgctgtcgcgctggctgccactgctggcccttctgatgatgagcggttgcacttcgctgccggacagcgcgcgtggccgcttcgaagcacgtgcggtgaaggtggacgggcaaacggcttactaccaggtgttcattccggccggcgtgcaggccgccgctcccacccaccttccggtcgtcctgttcctgcacggctcgggcgagcgcggcgccgatggcgtcaagcagacccacgccgggctggggccttacctgcgcgcgcatcccgatttccccgccctggtggtgttcccacaggtgccgggccacgaggaatggagcggccgcaacaaccgtgcggcagtggccgcgctggacgcgacgatcgccgaattcggcgccgacccggcgcggcaatacctgaccggcatgtcgatgggcggctatggcagctggaacatcgcattggatgacccacgccgctttgccgcgatcgtccccgtatgcggcgcggtgctcgccccgcgtgcggtacgcccgaccctgttcgtcgagcaggtcgcgcacgaagcggacccgtacgcggtgattgcccagcgcctgcagcacacgccgatctggatcttccacggcgcactggatgacgtggtgccgccggacgacgaccgcagactgcatgccgcattccagcgcgccgccgcacgcgacgtgcgctacaccgaatacccggaaggcaaccacaatgcctgggacgccacctacgccgacccggcaatgtgggaatggctgttcgcgcagaagcgctga

SEQ ID NO: 498221 - DNA, 492 bp, Stenotrophomonas maltophilia
atgagccgcgcacgcctacgccttggccgccattcccggatcggacaatcctacatcctgaccaccgtcatccaggagcgtcgacgctacttcgatgatgccactgcggcacaggaggtgatggatgtgttccgtcgcattgatgctgagggcctgacgcactcacttgcctatgtggtcatgccggaccacatccattggcttgtggagatccgtgcgttctcgctggactacatcatgcaacgcttcaaatcgagcagtgcattgcggatcaaccgcatgctgggtaggacaggaccattctggcaatcgagctatcacgatcacgccattcgttctgaagaatcactgtttcgccatgcgatgtacatcgtcgccaacccggtcagggcgaacttggcgagctgcgtgggagagtatccgtatgcctggtgccgatgggagatcgatgagaggtaccaggcaatggattaccccgaagcggagaggtag

SEQ ID NO: 498222 - DNA, 213 bp, Stenotrophomonas maltophilia
atgcgcactgacaccaagccgaaaggcccggcttcgtacttcccctccatcgagaagacctacgggcagccggtggcgcactggtttgggctgctgaccaggaagaagggcctgaaacacatggaactggtcagcttcctgaaaagtgagcatgggctgggccacggccatgccaatgcgctggtggcgcaccatctggccggcgagggttga

SEQ ID NO: 498223 - DNA, 1272 bp, Stenotrophomonas maltophilia
atggacagcgtagccaccgccgtcgctgccccgcagcgcgatctcgcccgccagtacgcatgtgtgcggaaccgcagcatgcacctggcagcccccctcagcgccgaagatgccatgctgcagagcatggccgatgccagcccgagcaaatggcacctggcccacaccacctggttcttcgaacgcttcgtgctggccggcttcccacctgcaccggcgcatgaccctgcctgggactacctgttcaacagctactacaagagcctcggcccggcgcatgcccggccgcagcgtgggctgctgtcgcggccatcgctgcagcaggtgcgcgactaccgccagcaggtcgatgcacaggtgcaatcgcggctggcggcaggcgaccttgatgagcaggcactgcagcacctgcagttgggcctgcagcacgaacagcagcaccaggaactgctgctcaccgacatcaagcacgcgttctggtgcaatccgttgcagccggcctaccgcgaggacctgcagcctgcaaccagccctgccagtgcgcagggctggatcgagtcgcccgagcgcatcgtcaccatcggcgccgcagcctggccgcagcacaccgccttcgcctacgacaacgaatcgccggcgcatcgcgtgctgctccccgcgcacgcactggccgagcgtcccgtcagcaatgccgagtaccgcgctttcatcgacgccggcggctaccgcgaaccgcgctggtggctcagcgaaggctgggcgctgcgcgaagccgagagctggcagcacccgctgtactgggatgacgccctgcagcgcgagtacaccctgggcggttggcgcgaactggatccgcatgcgccggtctgccacctcagctactacgaggccgatgcctgcgcccgctgggccggtgcgcgcctgcccagcgagttcgagtgggaggctgccgccgcaacgctgccgcctcgcggtcattttgccgatgacgatcggctgcacccgcaggctgcagggggcagtggactgcgtcagctgttcggcgatgtatgggaatggacccacagtgcgtatggcgcctacccgggcttccgccctttcgccggcaacctcggtgaatacaacggcaagttcatgtgcgggcaatgggtgctgcgcggtggcagctgcgccacgccgcgtggccacgtgcgtgccagctaccgcaatttcttcatgcccccggcgcgttggcagttctccgggctgcgcctggccagggatctcgcatga

SEQ ID NO: 498224 - DNA, 867 bp, Stenotrophomonas maltophilia
atgcagtcgaatccggacatcagcaccggcctgtatcacggcctggaggcctggcaggtgcgaaccgccaacgccacggcggtcgtcagcgtgttcggcggccagctgctgtcgttcattcctgatgggcagcccgatctgctgtggctttcgcccacgcgcgccgagctgcccacgcccatccgcggtggcgtcccggtgtgctggccgtggttcggtcgccagggccagagcgccgatgtaccggcgcatggcctggtacgtaccgcgcgctgggagcttctgcaggccagccagcgcgatgatggcgaggtcgagctgcagttggcgcctgcgcccagcgccgatcgcggcctgcgcctgcagatgcagctgcgcattggccgccagctgcgccagcagctggtcaccgagaacaccggaacctcgccggtgaccttcacccaggccctgcacagctatttccgggtgggcgatgccaagcgggtcgaggtcgagggccttgacggcctgcagtacctggacaagtacgaggactatgcgcagctgcgcctgcaacagggaccgtggtcattgcgcgatccacgtgatcccggtcgcagcgatcgcatctacaccggtgccggcggccattacgtgctgcatgatcccgtactacagcggcggatcgagatccgcagcgaaggcagccagacgctggtggtctggaatccgggtgccgaggcggcagccaggatggccgatgtcggcgagggctggcgcgattacgtatgcctggaagtggccaacgcaggcccggagcagattacgcttgcgccgggtgcgcgccatcagctggtgcagaccctgggcagtaccgcgctgtag

SEQ ID NO: 498225 - DNA, 774 bp, Stenotrophomonas maltophilia
atgcaggaagcacaatggtggtacgccaatggcaggcagagcagtgggccggtggatctggccggtcttcgccagctgcagcaggaagggacggttacggcgcgcaccctgctctggtgcgaaggcatgccctcatggcggccgttggcggaactggagcaggcttccgcccccgtcgaggtggttccggccttggatatcgacgcagcccctgcggttgagggcatcgcgccggatgtcggcgacccgtccgatccctatcgtgcaccggtcgctgcaccggacagggctgcggctgccgggctggagggcgagatggccttgtacgccagcgtggtcggcggcaacttcccgatctatcgccagcgctggcggctggatcagggcattgccacgggcagtggcacctggcattggccggccttcctgctcggcctgatctggatgatgtaccgcaggatgtaccgcctggcggcgatgtgggctggcctgctgctgctgatcagcgtggtggagaccttgctggatgtgccggatggcctgtcgctggtcatcaccttcgcgctgagcatcaccacaggcatctttggcaacagctggtacctggcgcactgccagcgcctgatcgcccaggcccgtgccgtcaccggcgacgatgatgcacggctgcgcagcgagctgaccgcgcgtggcggcaccagcgtggtcgccacactgatcgccatcgtcatcgcggtggcgctgagcatcgtcggcgccgcattggccgggtag

SEQ ID NO: 498226 - DNA, 1542 bp, Stenotrophomonas maltophilia
gtgtcgccagaggacggcgccgagctggacgacctgcgcacctacacccggcatctggtgaaccggatggaagccgacctgggcacgcggctggattgggtggcggtcgatcactggaataccgacaacccgcacacccacctgatcgtgcgcggacgcgacgacaccggcaaagacctcatcatcgccggcgactacatcgcccacggtttccgccatcgcgccgtcgagctggcgacggaatggctggggccgcgcaccgaactggagatccagcagaccttgcagcgggaagtgaagcaggagcggtggacgagcctcgaccgcacgttgcagcgcgaagccggcgaggacggccgggtgcagatcgaacgcttcaacgaaccccggctgcaacgccagcgcctgctgctgatcggccggctgcaacgcttgcagcgcctgggcctggccgacgagacgcagcccggcacctgggccgtccatgcggacgcggagaagaccttgcgcgctctgggtgagcgtggcgacatcatccgcaccatgcaacgggccatgagcggccagccgcgcgagctggcggtgttcgagccgggcgacgacggccgtaccgtcatcggccgagtggctgcaaaggggctggccgacgagctgcacgaccgcggctatctggtcatcgacggcgtggacggcaaggcccactacgttgcgttgaacgcccgcgacgagctggcgaactatccgaccggcgcggtggtggaggtgcgcggttccgccgaggtgcgggcggccgacaagaacatcgccgcgctcgcgagcgatggcctgtaccgcaccgatcatcacctggcgatcgagcaaggccgggccacggctggccgcgacccgcaagaggtcgtcgcggcccatgttcgccggctggaagccctgcgccgggccggcatcgtggagcgcgtggccgatggtctatggacggtgccggacgacctggccgagcgtggccgccaatacgacgcgcagcgcctgggcggcgtggcggtggagctgaaatcgcacctgtcgatcgagcggcaggcccgcgtgatcggggccacctggctggatcagcagttgatcggcggcggcaaagggctgggcgacttgggctttggtggcgaggccaagcaagccttgcggcagcgtgccgatttcctcgaagaacaggggctggccgagcggcgcgggcagcgcatgattctggcgcgcaacctgctgggcacgctgcgcaaccgggagctggcgcaggccgccaaggacattgccgccgataccggactggagcatcggcccgtcgccgatggtcagcgcgtggccggcatctaccggcgttccgtcatgctcgccagcgggcgctacgcgatgctcgatgacggcatgggattcagcctgatgccgtggcggccggtgatcgaacagcggttaggccagcagcttgccgcgacggtacgcggcggcggtgtgtcgtgggagattggacggcagcgtgggccatctgtcgggtag

SEQ ID NO: 498227 - DNA, 579 bp, Stenotrophomonas maltophilia
atgagcggaaggcccaaggagtacgacgacacggccgtcatcgacgccgcgatggatgttttctggacgaacggctatgaggccagttcaacgcaggaattgtgtgagcgcacaggcttgggccgtggcagcctctaccacgcctttggcaacaaacaggcgctgtacgagcaagccctgcgccgttatcaggaactgggaatccaggcgcagaccgcgattctcaatggccccggctccgtcaaggaacgcttgcgtggcttgttggaatggggtgtgagcgccaatctggagaacccgaatcgcggctgcatggcgcaattctcggtgctggagagagcttgcaaagaccctgtcgtggccgagatcaatcggatctacatcacgcggctggaagccgccttgtgccatctgatggcgatcgggcagcgcaatggcgagcttgaagcgcagagacctgccttggaaatggcccgcgccttcctggcgagctactacggcctgcgcatactcgggcgggcgctgccagaacgcgcgtatctgaatgatgtgatcgagggacttatggccaggctctga

SEQ ID NO: 498228 - DNA, 1170 bp, Stenotrophomonas maltophilia
atgccattcctgatttatgtgctttgcctgaccaccttcgtactcggaacgtccgagttcatggtggccggcatgatgccttccctgacagaggcgttgaacgtgtcggtcgagcaagtcggcaacctgatctcgctctacgcggctggcatggtcgttggcggcccattgctgaccgccttgttgctcaaatggcgtatccccaacaagcaggcactgctttggctgctggcgatctacgccgtcgcacaagcgatggcggcatcggtttccgactacaacgtcatcgcgttggcacggatcgtcaccggcgtggcgggttcggcctgctttggcgtttcggttgccatcggcatggagttgctgggggctgcatctggcggacgcgccgcaggaacggtgcttgccggactgatgctggcgcctgtcatcggtctgcctgccgccacgctgatcgaccagcactggggctggcgtgccagtttctggctggtggtggcattgacgatcttgtgcgcgatgctcattgcatggctgacgccggcatccaagccaggacaggaagttgatctgcacgcagaactgtccgagttcaaaaaccgccatctatgggctgcctacaccaccagcggcctcatcataggtgccactttcgccggtttcagctatttcgcgcccatcctcacacaggtcacaggcttctccgcctcggcaatcccctggattctgggtgcatacgggctggccaatgtcgccggcaacacgatcgtcggccgttacgccgatcgccacgcgatgccgatcatggcaacagggcttggggtgctggcccttacctttgtcgcgttcgtcatgctgtctcagtggccggttgccagcgtggctttggtcatcgtgattgggctggtggggttgccgatgaacccggcgatggtggcccgtgtcgtcagcacggcgcgccccggcccactggtcaataccgttcacgtttcggtcatcaacatcggtctagccgcaggggcttggctgggcggattgggcatcggtgctggctacggcctgctctcgccgttgtgggtcggcgccgcgctcgcggtgattgggctgcttagtctcctgccgtatatggctaggcgccaatccaccgcagcgcacctggacggtcattag

SEQ ID NO: 498229 - DNA, 951 bp, Stenotrophomonas maltophilia
atggagcttcgacacctgcgctgctttctcgccgtcgccgaagaactccacttcgcccgcgcggccgagcggttgcatatcgagcaatcgccgctgtctcgcgccatcaaggaactggaagaagaactgggcgtggtgctgttcgcccgcactacgcgcagcacacggctgacccgtgcgggcaagctgttcctggatcatgtgccgcgcgtcttcaccgccttgcagcaggcgcgcgacagcgtgaaggcggccgcgaacggtttccacggccaattgcgtatcgccttgtccgacggcatcacgccgtcgcggctacccgccttgctggcgctgtgccggcaggaggaacccgaagtcgaaatccgcctgaccgaagtaccgctggcgcaacagatcaaggggctgcacgatgatctgtacgacgtgggctttgcccgcgctgatgaagtcggcgatggcatcatcgccttgcccgtctggaacgatccgctgatggtggccgtgcccgcgcggcatccgttgctggcccacaagcgcattccattggaagaactgctgcgctacccactggtgctttgcgacccgcaagcctgcgagggccatgcccggcaggtcgagcgcgtgctgcgccgcgtggatatggaaccgctggtggccgagcgggtggcgtcctgcgacctgatgatggcgctggtttcggcaggcttcgccctgggcctgaccggcgccgcgcatatcgcgaccagccgagagcaaggtgtcgttgcgcgaccgctggcgggacgctcgccgatgctcatgacctacctgctgcgcctggatggcgaaccttcggaaacgctggcccactttatcgagcgtgtgcaggccattgagtcccccgaaattgccagaccagcgccacgtgatttccctgatccaccggagcaggaggaacccaaaccatga

SEQ ID NO: 498230 - DNA, 264 bp, Stenotrophomonas maltophilia
atgaaggacgtaatcctgatcttgctggccgtagtgctgacggcctgcggcccatccgaaacgcccaaacaggccaacatcccgaccgtcgaggaactggcatccgatcccgaacggttaaaggaactacgcagacagtgcaagaccgaccgtcctacgatgggcgacgtgctgtgcaaccgggtggccgaagccacgcgcaagcggttctttggcgatggcaacaccccttatacgccgccggagaacccgccgaagttttga

SEQ ID NO: 498231 - DNA, 903 bp, Stenotrophomonas maltophilia
atggataccaagagaatcgacctcaatctgctggtcacgttggaagcccttttggcggagcagaacgtgaccaaggcggccaatcggttgcacctcagtcagcctgcggtaagtgcgcaactcaaccgtctgcgcgacctgttcgatgatccgttgctgattcccgcgcaacgaggcatgacacctacagccaaggcgctggagttgcttgatccacttcgcctttcactggatcagatgcgggctacattggcggagcaccgtcacttcgacccgatgaaggcacggcttacggtcgccattgcctgcacggactacttgcagacaaccgtggtgcagcccttggcgattgcattacgcgagcgggcacccggcattcgaattgccatgcgccatctcgaaccatcaaaattggaagcgcagatggtcaagggcgaggtggacttggcgctgatgacgcccgaacaaggaccacccgatctgcgcaaccgacatctgttcgatgagcgatatgtcctgatcggccggcagcggcatcccaaactgcgccgcagactttctgtggaagcgtacgcacggctggatcacgtggttgtttcgctacgcggcggtgacttcacaacccccgtggacgacgggctcgccgcgctgggccacaagcgcaacgtcgttctttccgcagcatcgttcttgtccgtgcctgaaatcgtcgctcactccgatttcgtcgccctgatgccggaaagattggtgcgcgatcgcagcgatgtgctcaaagttgtcgagtgtcctttccccgtgcctggctttgccgtgagcatgctgtggcacgagcgcaatcatgcgcatagcggacagcgctgggtacgcgatgctgtcatcgagttggcgggtgagccataa

SEQ ID NO: 498232 - DNA, 987 bp, Stenotrophomonas maltophilia
atgtctttcatctcatccaagcccttgatcaccgtagcgggtgcttccagcaagcaggggcgcagcgtggcggcggccttgctggccagcggtcgttaccgcgtgcgtgcgctgggccggcgcgctgacagcgcaccgatgcgccaattggcagcgctgggtgccgaagtcgtggtggctccgctggaactaggccgccaggacgaactcactgccgcgcttcgaggctcacatggcgcatatctgatgacgccaccgaccacgccggctccgccgcccgaccagcccgagctggcgctcggccgcgaacttgccgatgcggcgcagactgcgggtgttcagcatgtcgtgtggagcggtctggagaacgtcgaggcgcgtaccgctggtgcgttgtgggtgccgcacttcaccgagaaggcactggttgaggattacatccgtacgctgcccatgcgcagttccttcctctacctagcgttcttctacagcaactttctggagtactacgttccccaacgtgacgcagatggcagcctgaccttcgccatctacctgccgcccgacgttccgatgccgttcgtcgatccgctgaccgctgccgggcctgcggtgctggaggtgttcgatcatccggagacctatgcgggcaagtctctgccggtgatcggcgaggtgctgaccgcgcgacagatggtggacaccttcgtccgcgtgaccgggcagaaggcgcactacgcctcggcgtacacgcgcgaggaactgttgcagcacttccccgcgtttggtcagaacgagtacctcgtgcgtgaactggtgggcatgacgcagtacgcagtcgaatacggctactacgcgcccggacgcgacctggaatggagccgcaaggttgatcccggcgcgctgacctgggagatgttcctccgaagcaaccagtggcagggcgggcaagtcagctacggggctccgccttcagcgcttgaatga

SEQ ID NO: 498233 - DNA, 927 bp, Stenotrophomonas maltophilia
atggcccgcctggaagtcaaccgatccggcgaactggaagtgttcgtgcgcgtgattgaactgggcggcttctccgccgctgcccgcgcctgcggcatgacgccctcggccgtcagcaagctggtcgcgcgcctggaacagcgcctgggcacgcggttggtgaaccgctccacgcgccagctccagctcacgcccgaaggctgcgccttctacgaacgcggcgtgcgcatcctggccgatctggaggaagccgagcgttgcgcgagcgaacacacggcgccgcgcggccggctgcgggtcaacgccaacgtgcccttcgggcaccgcttcctgctgccactggcccccgagttcctggcgcgccatcccgacgtgacgctggacatcgtgctgaccgatgaagtcatcgacatcctggagcagcgcaccgacgtggccgtgcgggccggcccgctgaaaagctcgaatctcgtggcgcgcaagctgggcgccacgcgcatgatgatcgttggcgcacccgcctatctggcccgacacggcacgccggctacgcccgacgcactcctgacccacaaccgcctgggcgcgaactacgtgcgtgcccagcccggctggccgctgcggcgcggcggcgaggacatcgtggtgcccgtgactggcaacgcgcaggccagcgatggtgaggcgctgcatcggctggccctcgctggcctggggctggcacgtcttgcggccttccaggtgcgcgaggacatcgccgccggccgattggcgccggtgctcgaagactgcaacccgggcgacatggaggaagtccacgccgtctatgtaggccaaggcggctacctgccgctgcgtgtgcgcgcctttctggacttcctggccgagaaggtcgatatcggccagcacgtgtcattcaagcgctga

SEQ ID NO: 498234 - DNA, 480 bp, Stenotrophomonas maltophilia
atgcccgaacccacttgcgctgcttttcgcttcgatcacctcaatctccatgccgcagccaatgcgcccgcgctacggctgttctccgatgtcatggggttcaagcccggatggcgtccgccattcccctttccgggccggtggctctacgacgagcgcgggcaagccgcgctacatctggtcgatgcgccggcatcgcatggcgacaacatccagatcggccacatcgcctttcgcaccagtgaagtcgccgacagcgttctgacgcgcctggacgatgccgggttgtcccacgagctggccgtggtgcccgaagcgggagatgtgcagatcttcgtccctctgccgagtggactggtcgtggaactggatacgcctgccgatccggcgcggcctccggcaacctatcgcagccgattggcgcgttcggccatcgccgcgaagacagtgcctacctctcacgggaggagcgagtcatga

SEQ ID NO: 498235 - DNA, 1314 bp, Stenotrophomonas maltophilia
atgaggcccgctgtcaccatcatggccgttgccgcgctcggcctccctttcgttgcgtcagccgcagatgcttccgaacccgccgtgccccgcgtctggacggcaacctggacagccagtccgcaacccgtctggggatcggacttcctgtttcccaccaatgtgccatccgaactgcacgaccagaccgtgcgccagatcgcgcgggtgagcctgggcggacagcgcctgcggattgtgctgtccaacacctacggcaaagagccgctcacgatcggcaaggccgcagtggcaagctcacgaggtggtgaccacggtgcagtggccgaggacagccagcgcgttgtgaccttcggtggccaggaggccgcgacgattctgccgggtgcgtcgctggtcagcgatcccgtggccttgccgctacctgcgctggcacaggtagcggtaagcgtctatctgcccaaggcaacacccgtgagcacctttcactgggatggccgccagacgagctggatcgttcgtggcgaccggacgacggcgccggtattgaacaccgacgaggattccgcgcagagcaccacagctcgcacgctgctggcgggcattcaggtcgaagccgatcagacctcacgcgccgtcgcggtgatcggcgactccatcaccgatggcgcaaccgccagtctggacaaggacagccgctggccggacttcctcgccgcgcgcctggcgccgcatggcgtggccgtcgtcaatgccggcatttcgggcgctcggctgctgtcggacggcatgggcgtcaacgcgctggcgcggctggagcgcgacgtacttgcgcagccgggcgtgcgcagcgtcatcgtggtgctgggcatcaacgacatcgcctggccgggcaccgccttcgcgcgcgaagcgccgcgccccccgctggacgcgctgacggcgggctatcgccagttgatcgaacaggcccgcagccgtggccttcgcgtcatcggcgcgacgctcacgccgttcgagggcgcgctgcccggcacgccgctggaggattactaccacgccgacaaagacgcgctgcggcggcaggtgaacgaatggatacgccacagtggcgcattcgatgccgtcatcgacttcgatgcggttctgcgcgatcccgcgcatccctcgcgcatggcctcacgcttcgactcgggcgaccggctccatcccggcgacgaaggcaaccgggcgatggccgatgctgtcgatctcgatgccttgctgcccggcttggccgcaacacccgccgccgtgacgtcacaggagccctga

SEQ ID NO: 498236 - DNA, 1143 bp, Stenotrophomonas maltophilia
atgctgttcacaccttatcggctgggcgagcttgaactgcccaatcgcatcgtcatgccgcccatgacccgctcgcgcgccaccagcgggaatgtgcctaccacgctgatggccgagtattacgcccagcgtgcatccgctggattgatcgtcaccgagggcacgcagatcagccagcaaggccagggctatgcctggacaccgggcatccacagcgccgaacaagtggccggctggcgagtcgtgaccgacgccgtgcatgccgctggcgggcgcatcttcgcgcagttgtggcacgtcggccgcgtctcgcacgtctcgctgcaacccggtcgcgcagcgccggtttcgtcctcgccgctggtggccgatggcgtcaaggtcttcatcgaccctgatggcaaggggccgaaagccggcgtcggcgagatggtgcagcattccgcaccgcaggcattgtccgaggccgggatcgcgcaagtggttcaggacttcgctgccgccgcacgcaacgcgatggcggctggcttcgatggcgtcgagttgcacggcgccaacggctatctgatcaaccaattcatcgactcgcaggccaacacgcgcaccgatggctacggcggttcgttgcccaatcggctgcgcttcctgcgcgaagtcgccgaggccgtgattgcagtggtcgggcgcgagcgcgtcggtgtgcggctggcaccgctgaccacgctgcaaggggcggtggacaacacgccgcaggccacctacctcggcgccgccagtctgctcgacgaccttggcgtggcctacctgcacattgccgaagccgattgggaggacgcgcccgacatgccggcggcgttcagagaggctctgcggctggtctatcgcggcacgatgatctacgcgggcaaatacacgctagaacgtgccgagtatgcattgcgcaatggctgggccgacctgatcgggttcgggcggccattcgtcgccaacccggacttgcccgagcgcctgcgccacggctggccgcttgcggcgcccgatgccagccgcttcttcggtggcgaagccgctggctataccgactacccaatcttcaccgcacaaaaagcgcggacacccgcgacggcgcaggaaacacaatga

SEQ ID NO: 498237 - DNA, 1200 bp, Stenotrophomonas maltophilia
atgagccgggacgacacccatcccggtctttgggcattggcggtcacggccttcgccatcggcgtgaccgagttcatcgtggtgggtgtgctaccggccatcgccaccgacctcgacgtgccgcttgcacgcgccggcgggctggtcgggctgtacgcgctggcgctggccatcggcacaccgttggtggtgctcggattggcgcggctgccgcgcaagcccgtgctgctggcgctggtggcggtgttcctggctggcaacctgctgtcggcgctgtccaccagctaccccatgctgctggcaggccgcgtcatcaccgcggtggcccacggcagtttcttcgccattggcgccaccgtcgcggcgcggctggcgcccgagggccaggccagccgggcgatcgcgctgatgttcgccggcctgaccctggcgatggtggtcggcgtgccgctgggcagcctgatcggcaacggcttgggctggcgattgccgttcttcgctgtcgcgctgctggccgcgctgggctggttggcaaccgcgcgatgggtgccggcgctaccggcgcaggcggcgggacgtgccagcacgcaactggcgacgctggtgcaacccgaaatcctggcgatgatgagcatcaccatcctgggcttcggtgcgagcttcgcggcgttcaccttcattacgccgatcctgaccgacatcaccggcttctcgacgcatgccgccagcctgctgctgatggtcttcggtacggcgacgctgctgggcaatttcgctggcgggcgatgggcggccagcctgggctggcccgtggcactgcggcgcatgctggcgggactgctgttggcatttgttgcgctcgcattgcttatgccctggcgcgcaccgatggtgctgctgttgttcgcctgggggctgcttgccttcggaatgtcacccggatttcaggccggcatgctcgcaaccgccggccagtgggcgccgcgtgcggtggatttcgcgtcagcgctgaacatttcggcgttcaacttgggaattacgctgggggagacacttggcagctcgctggtcgcacgagacgcaatggcgctgacgccttgggtgggcgtgggacttgcggcattggcgcaggtgccactgatgtggctggcgcggcgctcgcccaacactccagccatgcaagttgctggctgcggatag

SEQ ID NO: 498238 - DNA, 945 bp, Stenotrophomonas maltophilia
atggagcttcgacacctgcgctacttccacgccgtggccgaagaactccactttgcccgcgcagccgaaaagctgcacattgagcagtcgccactgtcgcgggcaatcaaagagctggaagaagaactgggcgtggtgctgttcgcccgtaccactcgcagtacacgacttacccgtgccggcagtttgtttatggagcatgtgccacgtgtcttcgcagcactgcagcaggcgcgcgatagcgtgaaggcagcggcaaacggctttcacgggcaggtgcgcgtggcgctttcggacggcatcacgccatcgcgtttgccggcgctcctcgcactgtgccgccaggaagaacctgaagttgagcttcgattcttcgaggtgcccttatctcagcaaatcaagggactgcatgacgacctgtacgacgtgggtttcgcgcagtccgacgaagtgggcgatggaatcgtcgctacgcccgtctggagcgatgcgctcatggtggcggtgccggcacggcatccactgttggcgcataagcgcattcccctgaacgagctgctgcgctatccgctggtcttgtgtgatccgcaggtctgcgaaggtcacgcgaagcatattgagcgcgttctacgccgagccgatatggagccactgattgcggagcgggtggcttcctgcgatctgatgatggcgctggtatcagcgggctttgcgcttgggctaactggtgaggcgcacattgtcaccagccgcgaatcgggcgtagtggcccgaccgttggccttgcgcgtaccgccgctgacaacatacctgctgcgcctcggaggcgagccgtccgatgcgctgacacggttcattgagcgcgtagaggccatcgaatcacaagaatcccccaggcccacccccggccaccactctgatctaccggaggagcccgcgccatga

SEQ ID NO: 498239 - DNA, 279 bp, Stenotrophomonas maltophilia
atgaagacgatcattccattcttgctggtggccgcgttgactgcctgcggccaagccgaaacgcctcagaaggccaacacttcggaagcgaatgtcccaacggtggaagaactggcagccaatcccgaacggctcaaggaactgcgccagcaatgcaagaccgaccgcccgaagctcggcgatgtgctgtgcaaccgggtggccgaggccacgcgcaagcggttctacggcgatggcgaaacaccctacacgccgccgaaggaatcgcccaagttctga

SEQ ID NO: 498240 - DNA, 2004 bp, Stenotrophomonas maltophilia
atgcaagggacgaacgtgctgttcggtcagattgccgtggtattcggcatcgtgatcgccggagtgtggggcgccacacaatggacagcagcggcccttggctaccaagtacgccttggctcgccctggttcgactttcttggcacgtcgatctaccacccgtggaagctgtttgagtggtggttcttcttcggcgcttatgcgccggaagtcttcgacaccggcggcgccattgccggtgccagcggcatggtcgccgtgggcgtcgccatcgccatgtcggtatggcgctcgcgccaagcgcgcctggtcacgacctacggctctgcgcgctgggccaacgcgcaggacattctcagggctggcctcacgcagcctgccggtgtgttcctgggccagcacgatcgccagtacctgcgacatgaaggcccggaacacgtcctgaccttcgcgcccacgcgctcgggcaagggcgtgggcctggtagtgcccaccttgttgagctggcccgcgtcggccgtcatccacgacatcaagggtgagaactggcagatcaccgccggctggcgctcgcgcttctcgcactgcctgctgttcaacccgaccgatgcgaagtcggcagcctacaacccgctgctggaggtgcggcgtggcgcgcatgaagtgcgcgacgtgcagaacatcgcggacattctggtcgatcccgaaggcgccctggagaagcgcaaccattgggaaaaaacctcgcacgcgctgctggtcggcgccattctgcatgtgctctatgcgggcgaggacaagacgctgcgcggcgtcgccaacttcctgtccgatcccgccagcccgttcgagctgaccctgcaccggatgatgaccacgccgcacctcggcgatggcccgcatccagtggtggcctccgctgcgcgcgaagtgctcaacaagtcggacaacgagcgttccggcgtgctgagcaccgccatgtcgttcttgggcctctaccgtgatccgacggtggccgaagtcacagcgcgctgcgactggcgcattgccgacctgatcgcggccgagcatccagtgtcgctgtacctggtggtgccgccttcggacatatcgcggacgaagcccctcatccgcctgatcctcaaccagatcggacggcgcctcaccgaatcgctcgatggctccgacggcatcgagcgccgccacaagctgctgctgatgctcgacgagttcccggcgctggggcgcctggacttcttcgagacggcgctggccttcatggccggctacggcatccgcagcttcctcatcgcgcagtcgctcaaccagatcgacaaagcctacggccagaaccattcgattctggacaactgccatgtgcgcgtgacgtttgcgacgaacgacgaacgcacggccaagcgcatttccgagacgctgggcaccgcgaccgagctgcgcgcgcagcgcaactatgccggccacaggctcgcgccgtggctggggcacctcatggtgtcgcgtcaggagacggcgcgcccgctgctgacgccgggcgaggtgatgcagcttccgcctgacgaagccgtggtgatggtgtccagcgtggcgccgatcaaggcgaagaagctgcgctactacgcggacagaaatttcaagcgccgcgtgttgccaccgccttcgctggcggacgggcagtacgcagatgcgccgccatcgcggcctgacgactggagtggcctggcaattcccgccgtgcccgtcgcgcctgcggccgataccgccgagggcttcgctgcctctgccgacgacggaggcccgcgccgtcagcccgaactctccgaagtcgttgcctatgcccccgagctggccgcgcctgcggccgacctcgcgctgctcgatgacgacgacgacctgccgcttccccttcctcgccagcttgacccagccatgcagcgcacggcgcggctggcttctctcgaccccaacgacggaatcgagctatga

SEQ ID NO: 498241 - DNA, 492 bp, Stenotrophomonas maltophilia
atgaacctgatcgacatcggcaaggcggttcgtacccgccgtgagcagcttggcctgtcgcaaggccaactggctcatctcagcggcctttcccggcagaccgtggtcggcctggaagggggcacccttagtgatctgggcgtcaatcgcgtgggacagctgatggccgtgctcggtctggatgttccggcacccaccaccgaaaaccggctgcgcaagcaaggcctgaaaatggccgcgcgaaccgcgaacgtgagctacgcaagcgaattgactgcgggcgagctggcccgcgtactggtcagcggggaagttcctgccacctacgcggcgcagatggcgcacctgctggatgaagcccctcccgccatggtggtgatggcggtcgaggaagctgcaatcggcgcgcagatgccaccacggcgcatctggcgcaacgtggcgaagatggccaacacactttctgctcaccgcaaggacctgtggatgtga

SEQ ID NO: 498242 - DNA, 597 bp, Stenotrophomonas maltophilia
gtgaaccgcgaattgccggccggcgcctggcaggcgctgctaccccgggcgcttgtcctcatcggggagatccggcgccacggcggcatcaccgatccgttctggacgttgggtggcggaacggtactgatgtttcgacatcggcaccggctcagcaaggacatcgacatcttcgtgccgaacccccagtacctgggcttcgtcactccccgcttgagcgatgtggccgcgagccttaccggcgactacagcgaagatcccagcgcatgggtcaagctgcagttcgaggaaggcgaggtggatttcgtcgcagctcccaatcttctcgatgacgcctgggaggaatggacgatcgatggccggcgcatacgcgtggaaacgtcggcggaaatcatcgccaagaaaatgttccatcgcgggcatcgaacaacggcccgagacctgttcgatcttgcgctggtcatcgaacgcgagccggacgcgctggcggccgcagcagacgcactggtccgccatcgatcaacgtttcttgatcagatccgcaatccccatccgacattgaagattgcgttcaaggccatcgacacgctggcctaa

SEQ ID NO: 498243 - DNA, 591 bp, Stenotrophomonas maltophilia
atgtcccacgcgctcgacgctgctgccctcgaccagctgttccgtactgcccgcacccagaacgccttcctcgacaagccggtcccggccagcctgctgcaggaactgtacgacctggtgaagtggggcccgaccgccgccaacaccacgccggcccgcttcgtcttcgtcacctcgaaggaagccaaggccaagctggccccggccctgtccgaaggcaaccacgacaagaccatggccgctccggtgaccgccatcatcggcttcgacctggatttccacgagaagctgccgtacctgttcccgcacaccgatgccaaggcctggttcgacggcccgcaggaaggccgccacgaagccgccctccgcaacggcagcctgcagggcgcctacctgatcctggccgcacgcgcgctgggcctggatgccggcccgatgtccggcttcgacccggccaaggtcgacgaagccttcttcgccggcacttcgatcaagtcgaatttcctggtcaacctgggttacggtgacccggcgggcctgttcccgcgtctgccgcgcctgtcgttcgacgaagcggcgcgcatcgcgtaa

SEQ ID NO: 498244 - DNA, 231 bp, Stenotrophomonas maltophilia
atgcgcaccctgcttctgctgccgctggccctgctcgccgcctgctccaccacgcccaccgagctggatccgatctcgtatcaatgccagcagcagctggacgcgtaccgcgaacagccggcgctgcgcgatccgaagactggccagcgcccgccgctgccggtggccccgatcagcgacgcctgtgacaaggaactccagcgcaagggcctggatcgcccgctgcgctga

SEQ ID NO: 498245 - DNA, 495 bp, Stenotrophomonas maltophilia
atgcgtccgctgcctgtttccctgatgtcgatggtgatcattgccggcctgctcggcgcgaacaccgcccatgccgaacgccgcatcatcatcctgcaggacccgggtccgcaggggccgagcctggaaatgtccgcgcccctggtggcttcggcgcgcgccgccgctgccaaggaagcccgggatgccgggctgccgcccggccacggcgcatcggtgaagctgccgcaaatgcaggtgagcgccatcgccaccaccgtcgacggccgccgcgaagtactgctgcgtgatgccaacaacccgcagaacaccgcgtcgatgcagtggccgaagcgccccggcgatcccgccgtgcagttcaccgtgggccagaccgtgaacttcgagccgaccggcaccgaccagggctggcaggtgaaggacaaccagggccgcccgctggaatatctgcccgaggccaccggcccgcgcgacatcttcgatacccggcgctga

SEQ ID NO: 498246 - DNA, 513 bp, Stenotrophomonas maltophilia
atgttccgttgcctgcgcattcccgcgtccgccctgctgctctcggtgctgctggtgcccactgtccatgctggcgccgcgccgcagttgaacagcagcgaggccagcgtgatcgtgacgtcgttcgtggtgctgtcgttgccactggcggcctcgatgggcttgtccgaactgtccaaggcgccgttcaaggccagcgaacgcaacggccgggccacgcgcaccaaggcagtgccgctgccgccgatggaggtgaagaaggtggagaccacgccggagggcgagcgccaggtacagctgcaggtgccggacaaagccgaccagaccgccaccctgcgctggccggcgcgcgtgcatcaagaccaggcggcaggcttcgtggtcggccagcaggtgcacttcgaccccaccgaagccggtgccggctggaccgtgaaaagcgcgcagggccaggcactggcttacgtgcccaccgcctacgccgctggcgatgtgatgagcgaagcgctgtaa

SEQ ID NO: 498247 - DNA, 2796 bp, Stenotrophomonas maltophilia
atgaccctcgcccccgctgatctgcccgcctccctgcagcctcttgtcgaccgcgccctggcgcgcctggcccaggtcctgcccgagcccatcccggccgacctgctgccgttgctgacccggctggcggtggccagcgacttcgcgctggacaccctggtgcgtcaacccgcgctgctggcgcagctggccacgcccggctgcccgccgatcccggcgccggtgctcgacccactgcagcccagcgactggccggcacagctgcggcgctggcgtgcggcgatgtccacacggctgatctggcgcgaccttgccgggctggacgacgtggcgcagaccctggccggcgccaccaccctggccgaagactgcctgcggcttgcgctggaggccctgcagcaggaattcgcccagcgccatggcgtcatcgccgatgaccaaggcacgccgcagcagctggtcgtgttcggcctcggcaagctgggcggcggcgagctcaacttcagttccgatatcgatctggtctacgcctatccgcacggcggcgaatccgatggcccgcgcgcgctggccgccgaagagtatttcgcccgcctcggccagcgcctggccaagctgctggacgaaaccaccgtcgatggcttcagccaccgtgtcgacctgcgcctgcgtccgttcggcagcgccggccgcgtcgcgctgtcgttcgcggcgatggaccagtatttccagcgcgagggccgcgactgggaacgctacgcgtggctgaaggcgcgcgcggtggccggcgatatcgccgccggtgaagcgtggctgcagaccctgcgcccgttcgtgtaccgccgctacctcgatttcaccgcgctcgatggcctgcgcgaaatgaaggcggcgatcaccgccgaggtcgcgcgccgcgagttgcacgaggacatcaagcgtggcgccggtggcatccgcgaaatcgaattcctgtgccaggcactgcagctgatccgcggtggccgtgaaccggcactgcgcgagcgtcgcctgctggtggcgctggatgcactggtcgccgccggtcagatcgcgcccgaggatggcagtgcactgcgcgaggcttacctgttcctgcgccggctggagaaccgcctgcagatgctgcgcgacgcgcagacccacgtactgcccagcgacgcgctggaccgcgagcgcatcgccgtcggcctcggctatgcggactgggacgtgctgcgcgcggcgttggccgaacagcagcagcgggtcagtactgaattcgccgcgctgctggcgccgcgcaagggccaggccgcgcccgacgcgctggccaactactggcgcagcctgcccgaaggcagcaacgcaccactgctggccgaagccggcttcctcgatgccaacggcgccgaccagtcactgcgcgatttcgcccagggcaccggcgtgaagtccttgtccgatgccgcgcgtgcgcggctggatcgcgtgctgcccgcactgctgcatgcggccacgcgctcgccacaacccgacgccgcgctcaagcgtgtgcttggcctgctgcaggcggtgctgcgccggaccagctatctcgcgctgctggacgagcagcccagtgcgctggcgcggctggtcgatgtgctggcgcgcagcgcgctgctggccgagcgcctggcggcgtatccgctgctgttggacgaactgctggacgtacgcgtgtccgggccgatgccggatgccgccggcatgctggccgagtgccagcaggtgttggcggtggaggatcccgaatccgcgctgcgctggctcaacgaaacgcggctggcgctcagcttccgcatggcgatggctacgctggatggccgccagggcgcggtggacagcacccggcaactggccgaactggcgcaggcggtggttgttaccgtactggcgatggctgaagcggacatgcacgccgcacacggcgggattcccggcggacgtttcgcgatcatcggctacggcagcctgggtgggcttgaactgggcttcggttccgatctggacctggtattcctgcatgacaacccggccggcgtggatgccagtgatggcgcgcgcccgctggagccgggccgctggtatgcacgcctggcgcagaaggtgatggcgctgctcggtgcagtcacggctgccgggcgcctgtacgacatcgacgtgcgcctgcgcccggacggtggcaagggttcgctggtgtcttcgctggccagctacaccgaataccagcgcgaacgcgcatggacctgggaacaccaggccctggtgcgcgcacgcggcgtggccggtgatgccagcctgctggccgacttcgagcaggtgcgtgcacagacgctggggcgtgagcgcgacacgggtgtgctgtatgcggacgtgctgaagatgcgcggccgcatgcgcaccgaactggaccgcagcgatgccgcacgactggacctgaagcagggtgccggcggcgtagtggacctggagttcctgctgcagaccggcgtgctggcacgcagtgcgcagcatgcggcgctgctgcagccgcgcgatacgccgtcgttgatcgatgcgctggcggttgccggtttcctgccggatgccaccgcgcaggcactgcatggcgcgcacgccacgctgctggacgtgggcctggcctgcacgctggatcggcgcccgcggttggcaccgaccacgcctgcgattgaagaggcgtgtgccgcgattacggcagcgtgcagagccgcggagctgccgttcgcctga

SEQ ID NO: 498248 - DNA, 1365 bp, Stenotrophomonas maltophilia
atgagcgcctctttggtttcgcctgatgtgatccgccgcctgttcgcacaggccatgtcccgcatgtaccgcaccgaagtgccgctgtacggcacgctggtggaactggtggagcggatcaacgcgcaggtgctggagcaggacccggcgctggccgcgcagctgcagcgcaacgacgagcgcgcacgcctggatgaagagcgccacggcgcgatccgcgtgggcaccgtgcaggaactggccacgctgcgccgcctgttcgcggtgatgggcatgtacccggtcggctactacgacctgtcggtcgcgggcgtgccggtgcattccaccgcgttccgcccgctcaccggcgccgcgctggcacagaatccgttccgcgtgttcacctcgctgctgcgcctggagctgatcgaagacgaagcgctgcgtgccgaatcggcgaaaatccttgcgcgccgccgcatcttcaccgagggcgcgctggcgctgatcgaccaggccgagcgtgacggtggcctggcgcaggccgatgccgagcgcttcgtcgaggaagcactggaaaccttccgctggcacggcgatgccacggtcgacctgccgacctaccacgcgctgcacaacgcgcatcggctggtggccgacgtggtcagtttccgtggcccgcacatcaatcacctgaccccgcgcacgctggacatcgacgctgcgcaggtggcgatgatcgaacacggcatggcggccaaggcggtgatcgagggcccgccgcgccgcgcctgcccgatcctgctgcgccagaccagcttcaaggcactggaagaggccgtgcatttcccgggcggtgaaggcggcgatgccggcacccataccgcgcgcttcggcgagatcgaacagcgcggccttgcgctcaccccgaagggccgcgcgctgtacgaccagctgctgtcgcaggcccgcgatgccggtggcgaaggcagcaccggcggcgactacggccagcgcctgcaggcggtgttcgccagcttcccggatgaccatgacacgctgcgccaggaaggactgggctattaccgctaccagctgaccgacgccggccgtgccgcgcccgagcgcgtggcggatctgccggctgaagtgctggtggccgccggcctggccacggccgacccgatcgtctatgaggatttcctgccggtcagtgccgcgggcatcttccagtcgaacctgggtggtgaagaacagcgcgcctatgccgcacatgccaaccgcgaggccttcgaacaggcgctgggcgtggcggtgaatgacgagttcgagatctatgagcggctgcaggccgaatcgctggcgagcctgcgcatcgcgtga

SEQ ID NO: 498249 - DNA, 753 bp, Stenotrophomonas maltophilia
atgaacacctccacgcctgcgccgtcgcgcgccatcggcctggtcggttttgacggtgacgatacgctgtggaagagcgaggactactaccgcaaggccgagcaggactaccttgacctgctgtcgcgctacgtcgacgtgcacgacacccagactgcgcgccacctgctggaagtgcagcagcgccacctgggcaccttcggctacggcgtgaagagcatgacgttgtcgatgatcgaagcggccatcgacatcaccgggcagcgcatcgaagcgaaggacatccagcgcatcctggatatcggccacgacaccctgcgccacccggtcgaactgatcgacggtgtgcgcgaagcggtggcggccatcgccgagcactacccggtggtgctgatcaccaagggcgacctgttccaccaggaagcgaagatcaaggtcgccaacctgggcgagctgttcccgcgcatcgagatcgtctcggagaaggacccggaaacctacgcccgcgtgctggccgaattcgatctgcccatgcagcgcttcgtgatggtcggcaactcgctgcgttcggacatcgagccggtggttaccctgggtggctggggcgtgcataccccgtacgcagtgacctgggcccacgagacccagcacggcgtggccgatgatgaaccgcgcatggtcaccgccgacaccgcccacgactggccggccgcactggcggcgatcgaagccaaggccgctgcggcggcctga

SEQ ID NO: 498250 - DNA, 864 bp, Stenotrophomonas maltophilia
atgaccaccatcatcgccccgcgcgtgcacgacatcggcggactcgaagtccgtcgcgccgtccccaccctgcaggcgcgcagcatcggctcgttcgtgttcgtcgaccagatgggcccggcgctcatgcatcccggcacggccatcgacgtgcgcccgcatccgcatatcggcctggccaccgtcacctatctgtggtcgggcgccatcggccatcgcgacacactcggttcggaccaggtgatccgacccggagacgtcaactggatgaccgctggccgcggcatcgcccattccgagcgcacgccgcagccggaccgcgatcacgacaacccgatccatggcatgcagacctgggtagcgctgccgaaatcgcacgaggaaatcgaaccggcgttctaccaccacgccgcggctacgttgcccgagcagcgccgcaacggtgcctggctgcgcgtcatcgccggccgcgcctatggcgaggaatcgccggtgaaggtgttcgccgacaccctcaacgtggcaatcgatctcgacccggatgcggaaatcgatatcgacgacggccaccgcgagcgcgcgctgtacatcctcgaaggcgacgcacagctggatggcgtggacatccctgcacagcatctggtgattcccgaagccggcgcacgtggccgcctgcgcgcgaagacgccggtgaaggcgatgctgttcggtggcgagccgctggatggcccgcgtcacctgtggtggaacttcgtgtccagctcgaaggaacgcatcgagcaggccaagcacgattgggaggccggccgcttcgggaccattccgggcgacgacaaggaattcatcccgctgccgcagtactga

SEQ ID NO: 498251 - DNA, 462 bp, Stenotrophomonas maltophilia
atgaactggaagcatgcggtttcactggcgctgttgttgcccgtttcatcagccgcaagtgctgcgtctgcgatcacctacgacaaggatggccgctacggctattcgatgaaccagtcttccctcaccactgcgatgcagcagtcgctgcactactgcgcagcgcgatcgcgcaattgcggtcagtccgccagcaccaccagcgaaggctattcggccatagcgaccggcacgattgcgttgggctttgcactgggcgagaagacggcggacgccgcgcagcggaaggctgaaagaatgtgcagggaacgtgccaacgactgcacgctcgcgttgctgtggcgggaaattccacctcgtcacattgaaccgccacagctgccgggtacacccgctccggcaccggcgatgacacctgcgctcatgccaacgcctgcctcccgcaccgatcagccaggatag

SEQ ID NO: 498252 - DNA, 1983 bp, Stenotrophomonas maltophilia
atgaccgaccgccgcgacgacgattttcgcatccgtcccggcgctccgacgaaccggggccagggcttcgtctccaaggtgctcaagcaggccggcaaagccagcagcggcaagtcctcgatgcgccgccctgggggcagtgacaagggcgccggcaccggccagcggcccggctcgcgcctagggcgcggccacacggcggcgcgcttcgcgggcgcgaagctgacgcccatgtcgcggcgcgtgaccatcaagaccctgctggtcaatcagcgcaacgccagcccgcagtcgctcgccaagcacttgcgctacatcgagcgcgacggcgcgggccgcgatggcgaaccgggccaagcctacgggccgcaggccgacgccgccgaccttgacgccttcaaggaacgctgcgccgatgaccggcaccttttccgcttcatcgtttcgcccgaggacggggccgagctggacgacctgcgcacctacacccggcatttggtgaaccgcatggaagccgacctgggcacgcggctggactgggtggcggtcgatcactggaacaccgacaacccgcacacccacttgatcgtgcgcggtcgcgacgacacgggtaaagacctcatcatcgcgggcgactacatcgcccacggcttccgccaccgggccgccgaactggcgaccgaatggctggggccgcgcaccgaactggagatccagcagaccatgcagcgcgaagtggaacaggagcggtggacgagcctggatcgcacgttgcaacgtgaagtggacgacgatggccgggctcggatcgaacgcttcaacgaaccccggctgcaacgccagcgcctgctgctgatcggccgactgcaacgcttgcagcgcctgggccttgccgacgagatgcagccgggcacctgggccgttcatgccgatgcggagaagaccttgcgcgccctgggcgagcgtggcgacatcatccgcaccatgcagcgcgccatgcgcggccagccgcgtgaactggcagtgttcgagccgggcgaggatggccgcatcattgtcggtcgcgtagcggccaaggggctggatgatgaactgcgcgaccggggctatctggttatcgacggcgtggacggcaaggcgcattacgtcgcgctcaatgcccgcgacgaaccggccaactatcccaccggcgcggtggtggaagtgcgtggttccgccgaggtgcgggcggccgacaagaacatcgccgcgctggcgagcgatggcctgtaccgcaccgatcatcacctggcaatcgaacaggggcgggccaaggctggccgtgatccgcaggaggttgttgcctcgcacgtgcggcgcctcgaagccctgcgccgggctggcatcgtggagcgcgtggccgaagggctatggaaggtgccggacgacctggccgagcgtggccgccagtacgacgcgcaacgcctgggcggcgtggcggtggagctgaaatcgcacctgcccatcgagcgacaggcgcgcgtgatcggggccacctggctcgaccagcaactgatcggcggcggcccgggattgggcgacctgggctttggtggcgacgccaagcaagccctccagcagcgtgccgatttcctcgaagaacaggggctggcccagcggcgcggacagcgcgtgatcctcgcccggaacctgctgggaacgctacgcaatcgggaactggcgcaggcggcgaaggacattgccaccgaaaccggcctggagcaccgccccacggcagacgggcagcgcgtggccggcatctaccggcgctcggtcatgctcgccagcgggcgctacgccatgctcgacgatggcattggcttctcgctcgtaccgtggcggccggtgatcgaacaacggttggggcagcagctcgccgcaacgatgcgtggaggcgggacgtcctgggaaatcgggcggcagcgtgggcctgccgtcggttaa

SEQ ID NO: 498253 - DNA, 399 bp, Stenotrophomonas maltophilia
ttgaccaatcacagcgtaccaacacttggcgatctggaaatcgccgtgctcgaagacatctggcgcttcggcccgtccgacaccaaggcggtgtatgcgcgcattgggcagtcccgctcgatttctttgaacaccgtgcaatctacgctggaacgtctatttcgcaaggccatgctccagcgcgaaaagatcagccatgcctatgagtattcagcgcgagtttcccgccgggaattgatccagaagctggtggaatccacggtgcgtcgtgtcgcaggcccgcagccggatgcgttgctgagcgcctttgtcgatcttgctgcaagggcggatgacgaccagctcaagaggctggaggagttggttgcccgtcgtcgtgctgaattagatcagacgtga

SEQ ID NO: 498254 - DNA, 996 bp, Stenotrophomonas maltophilia
atgacgagttatggcccattacttcagtttgcattgctatccggcttcgtgctggcggtaacgcttaccctgctgattggagccttcgagcgcccattgcgccgtgcgctgtggggaaaggcaccttctcagcgagcaagggtatcttggtggatgctggtaacacctgcgttggcgggtattgcctacacggccctgaccattgccatgccgtcgatgtttgatagttcggcccgatttgccgctacctgctctgcgcacgctgacgcgctcttgcatctgtgcgtttggcacccgagcggcaatgggcaaagtgcttggctatggggagcattggcattgttggcgggatacgcggcttggctggcttcacgggccgcagtgggtctttggcgtgctcggcgaacccttgcctcgatggtgcgcctaagctggcgtccggggcacccagacaaacttcgcgtgcttgatgtcgatcagcctatggcgctggcctgtggcgtcgggcatggccacatcctgctttcaacctcgttgatgcggcgacttgatccaacgcaattgcgtgtggtgttggcgcacgaacaggctcacatcgccaatcgcgatgtgctgcatcgcttgatcgctgtcgtgttgtcgagcatacagttgccaggtactcgtcgccggttgttgcgtgatctggaactcgccttggaacaacgttgtgattttgccgctgcaaacgaagtggggtgtcctgtcgccgtggccgagaccatcgttgcagtggagaagatatttcggcaacacgccaaggaacaggtgccattggcgatggcgttcttttccgattttatccctgagcgtgtcgaggcgttgctgtcgcccaagcactcgtctgtctcatgcttggggccgatgctaggcattcttgttctggcgttttgcagcctatctacaggatggctgcattctgtgaccgaatctctcatcactgtgatgacgaggtaa

SEQ ID NO: 498255 - DNA, 1248 bp, Stenotrophomonas maltophilia; identical to SEQ ID NO: 323963

SEQ ID NO: 498256 - DNA, 1230 bp, Stenotrophomonas maltophilia; identical to SEQ ID NO: 323964

SEQ ID NO: 498257 - DNA, 3141 bp, Stenotrophomonas maltophilia; identical to SEQ ID NO: 323965

SEQ ID NO: 498258 - DNA, 738 bp, Stenotrophomonas maltophilia; identical to SEQ ID NO: 323966

SEQ ID NO: 498259 - DNA, 633 bp, Stenotrophomonas maltophilia; identical to SEQ ID NO: 323967

SEQ ID NO: 498260 - DNA, 264 bp, Stenotrophomonas maltophilia; identical to SEQ ID NO: 323968

SEQ ID NO: 498261 - DNA, 945 bp, Stenotrophomonas maltophilia; identical to SEQ ID NO: 323969

SEQ ID NO: 498262 - DNA, 279 bp, Stenotrophomonas maltophilia
atgaagaagatcattccgttcttactggtggcggcgttgaccgcctgcggccagtccgaaacgcctcagagggccaacaccacagaagcgaatgtcccgtcggtggaagaactggcggccaaccccgaacggctcaaagagttgcgccagcaatgcaagaccgatcgccccaagctcggcgacttgctgtgcaaccgagtggccgaggccacacgcaagcggttctatggcgacgtcgaaacgccgtacacgccgccgaaggaaccgcccaagttctga

SEQ ID NO: 498263 - DNA, 1380 bp, Stenotrophomonas maltophilia
gtggttttgcccatacgccttgtcgatctggttgagcgactgcgcgatgaggaagctgcggatgccgtagcccgccatgaaggccagcgccgtctcgaagaagtccaggcgccccagcgcagggaactcatcgagcatcagcagcagcttgtggcggcgctcgatgccatcggagccatcgagcgattcggtgaggcgccgtccgatctggttgaggatcaggcgaatgagcggcttcgtccgcgaaatgtccgaaggcggcaccacgaggtacagcgataccggatgctcgaccgcgatcaggtcggcgatgcgccaatcgcagcgcgaggtgacttcggccaccgtcgggtcgcggtacaggccgaggaacgacatggcggtgctcaacacgccggaacgctcgttgtccgacttgttgagcacttcgcgcgccgccgaagcgacgacaggatgcggcccatcgcccaggtggggcgtggtcatcatccggtgcaaggtcagctcgaacgggctggccgggtcggagaggaagttggcgacgccgcgcagcgtcttgtcttcgccggcgtagagcacatgcaagatcgcaccgaccaacagcgcgtggctggttttctcccaatggttccggcgctccaatgcaccttcgggatcgaccaaaatgtctgcgatgttctgaacgtcgcgcacctcatgcgcgcctcgccgcacctccagcagcgggttgtaggccgccgacttcgcatcggtcgggttgaacagcaggcaatgcgagaaacgcgagcgccagcctgcggtgatctgccagttctcgcctttgatgtcgtggatgacggcggatgcgggccaggaaagcagcgtcggcaccacgaggccaacgcccttgcccgagcgcgtaggcgcgaaggtcaggacgtgttccgggccttcatgccgcaggtactggcggtcgtgctggccgaggaacacgccggccggttgcgtgaggcccgccttgcgaatgtcctgcgcgctagcccagcgcgcagagccgtaggtggtaacgaggcgagcttggcgcgagcgccagaccgacatggcgatggcaacgcccacggcgaccatgccgctggtgccggcgatggtgccgccggtgtcgaatacttccggtgcataggccccgaagaagaaccaccactcaaacagtttccaagggtggtagatcgacgtgccaaggaagtcgaaccagggcgagccaaggcgtacttgatagccaagggcggctgctgtccattgtgtggcgccccacacgccggcgatcacgatgccgaatacgacggcgatctgaccgaacagcacgttcgtcccttgcatgacctggcctccgatttctcctga

SEQ ID NO: 498264 - DNA, 135 bp, Stenotrophomonas maltophilia
atggcgtggatctacggtgtcgaccaagtcgacagctaccagagcgagatcggtgccgaccaacggtcggcacccaccaccagccgcgtgaaactgtcgaaggcggggtgggtccggttgcgggggacgccgtaa

SEQ ID NO: 498265 - DNA, 597 bp, Stenotrophomonas maltophilia
atgcctgaccggcctgccggcggggtcggaccaggggtcggatccctttccggaacggaaagggctctgaccccgccactacagggagaaggtttccgcctgcgcccctggcgcccggaagacctggaatccctgctgcgccatgccaacgacgccgaggtatcgcggggcctgcgtgatcgctttccgtacccgtacacgcgcgaggatggcgaggccttcctggcgggccgcgtgctggcccctggcacgctgaacctggccatcgagatcgacggccaggcctgcggcagcgtcggtgcccagcagggcgtggccgagcgtgggcataccgccgaactgggttactggctcggccaggcctactggggccagggcgtgatgacccgcgtggttggcctgttcgcaccgtgggtgatggacgaactgcgcctgttcaggctgcaggctagcgtggtcgacttcaacctcggctcggcccgtgtactggagaagaacggcttccaggaagagggcgtggagcgctgtgcggtctacaagcgcggcgtcctgcacgacctgcgccgcttcgcccgggtacgcacccggctgccctga

SEQ ID NO: 498266 - DNA, 2070 bp, Stenotrophomonas maltophilia
atgaaaatgacttcccgccccgcgggcgcctgcgcgcgcctgccggttgcccttggcctggccgtggccacgtcactggcctacgctgcgcccgccgaagaggcgcgcaccctcgacacgatggtggtcaccgccgccgcaccatcctcgccgctgcactgggtgaccgatccgcgcctgccgcggcagccggtgccggccagtgatggtgccgattacctgaaaaccgttcccggcttctctgccgtccgcaatggcggcaccaacggcgacccggtgctgcgcggcatgttcggttcgcgcctgaacatcctcagcaacgacggcaacctgatcggtgcctgcccgtcgcgcatggacaatccgctgtcctacatcgcgccggaaagcttcgaccggttgaccatcatcaagggcccgcagagcgtgcgctggggcgcaggtgcctcggccggtaccgtgcgcttcgagcgcgacacgccgcgcttcgatgaacccggcctgcgtgccgatgccagtgcgctggtcggttcgcgcaaccgcaatgaccaggtgctggacctgaccctgggcaatccgaccggctatgtacgcgccagcggcaaccgctccgaggccgatgactacaaggatggccacggtgacgtggtgccgtcgaagtggcgcaagtggaacggtgacgtggccatcggctggacgccggatgccgacacgctgctggagatttccgccggtgccggcgatgccatcgcgcgttacgccgggcgcggcatggacggtgccgcgttcgaacgcaccagctatgccgcgcgcttcgaaaaacgaaatctgcccggtgcgtgggacacgttgcaggccaacgtgtactacaacgaagccgaccacgtgatggacaactacacgctgcgcacgccgaatcccaacagcatgatgccgatgccgatgccgatggcgtcgaacgtggaccgccgtacccagggcggccgggtcagttccgagtggcactggcaggacgtgcaactggtggcgggtgtggacggcgaagacagtcgccatcgtggccgcatgggcatgggccgcaacacctaccgccaggccgcctgggagaccgatgccaagttccgccgctacggcgtgttcaccgagttgaccctcggcgccggcaccgatcagcggtggatcagtggcctgcgcatcgaccgcgccagcgtccgcgatgagcggcaatcgatccgcggaatgatggggaacaggcccaatccgactgcgggccagcgccgcaaggaatggctcggcagtggtttcctgcgttacgagcaggacctggccgacggcctgacctggtacgccgggctcggccacagtgaacgcatgcccgactactgggagctgttctcgcccaaccatggcccggccggcgcagtgaacgcgttcaccggcgtgcagcccgaacgcaccacccagctcgacgtcggcctgcagtacaagggaccgcgcgtgcagacgtgggtttcggcgtacgccgggcagatccaggactacatcctgttcacgtaccacggcagcggcatgatgggcatgagccaggcccgcaatgtcgacgcgcgcatcgccggtgccgaggcgggcctggaagtgagcctggccgggcagtggaagctgggcggcacgctggcctatgcctggggcgagaaccgcgaccagcagcgtccgctgccgcagatgccaccactggaagcacgcctgagcgcgaactgggaaggccagagctggagtgccggggcactgctgcgtgcggtgacccaccagcaccgcgtggccgagggccagggcaacgtggtcgcacaggacctcgggccgagtgcaggtttcgccacgttcgcgctcaacgccgcgtaccgtttcagttcgcagctgcagctcagcgcgggcgtcgacaacctgttcgaccgcgcctacagcgagcacctgaacctggccggcagtgccgacttcggcttcccggccgacccggtgcgcatcaacgagcccgggcgcagcctgtggatcaaggtgaactaccggtactga

SEQ ID NO: 498267 - DNA, 432 bp, Stenotrophomonas maltophilia
gtgacccgcctgtcccgcccgcagcgtcttctgctccagctcgccatcctggcgacgctgctgatggtgcttgcgccgctggtcagccgcgcgctgcaggcacagccgatggagcacgccgcgatggcgggcatggaccatgccgcgatgggccatgacatgcacgccatggccatggccgggcacgatcagcacggcgccgcgccggcagcgcccagccccgcggccgatccccacgccatgcatggcgaagcctgcgaatactgtgtactggccatgcgcctgctgtcagggctggcggtgctggtgctgctgttgccgttgctgtggcggccgcgcctggtgttcccgtggtcgcaacaggtgctgcccgtaccgtactggcccgcacacgccgcacgtgggccaccgcgcgtctccatcgtccgctga

SEQ ID NO: 498268 - DNA, 489 bp, Stenotrophomonas maltophilia
atggacgcaacgccccctttgtcgcccgcccccgtgccgccgccgctggcgacggtaccgccgttcagcgcgcaggatgccgaccacctgcgcatgctggccatcgcacactacgtggtcggtggcctgatcgtgctgttctcgctgatcttcatcctgcacatcgtgatcggcatcgccgcgttgaccggcagcctgccgatgaagtccggcggcgagccctcctcgctggaggaacagcgcctgatgggctgggtgttcaccgttctcggctgcgtcgtcgtgttcggtggcatcacgctgggcgcgttcgtggcctatgccggccgctgcctgtcccgccgccgtcgccatctgctgtgcctgatcgcggctggcctggcttgcctgttcacgccggtcggcacggtgctgggggtgttcagcctgatcaccctgctgcgcccgcaggtcaaggccgccttcgaccttcccgccgcgaccgcatga

SEQ ID NO: 498269 - DNA, 423 bp, Stenotrophomonas maltophilia
atgaccgcctccggcaatccaccgccgctgccgcatcagaccctggcgcagctgcagctgaccagccatctgcagacactgagagtgctgttctacgccctggccggtttccactgggtcgccgcggtggcgttcctcggcctcagcggctgggtggcccagtcgcgcgggttggaggatgcctggatgctgaccacggtctatgcgtccatcgccgtgctggccgccgtgctggggttcgtgcagctgcacaccgcgcgccagctgtcacatcgcaccgggctggcctggtgccagcgcgcggcgtggctgggcgtgctggctggaccactgggcatggcgttggccgcctatgcctgggtgttcctgtccaagccggaaatggctgcgctgttcgaccgcggtgatcacctcagtgcctga

SEQ ID NO: 498270 - DNA, 822 bp, Stenotrophomonas maltophilia
atgaagaccacgacgctgctgtccacttcactgctgttgtcgcttgccgtgcttcccgctgtgggctggggccaggcgcagccgcctgcggcttcaccgccgcccacacccgctgcgctgccaccgaacgagcccagtgtgccgctgttgccggcactggcctgggagccgccgccgctgcagccgttcaccgccacctaccaggccttctacaagggcaaggaagcgggtgatgccagcatgcaggtcacccacaccggcggcagccagtggcgcgtggacatgcaggtggtcggccgccgcggctttgccagcgtgctcggcctgaatatcgagcagagcacggtgttcgaggagcgcagtggcgtctacgcaccgctcagccagagcacggtgcgcaagggcctgttcctgggcaagaaggccgtgggcacttacaactggcaggccggcaccgcgcaatggaccggcgacgtcaagaaggagcgcgcgcagccgattccgctgcgggccggcgaccagagcgcgctgctgatcaacctggcgatcatgcgcgatgcgcgtccgggcgccaccatgcattaccgctacgtggacatgggcaaggtccgcgaacacgactaccaggccgcgccgcagaccgagaacgtcgaggtcggcgacctgtcctacaacgcgctgcgggtctaccggaccaacggtggcagaagcgaaaccattctctggatcgccaacggtgtccccaccccggtgcgcatcctgcaacgcgaagacggcgaagaccgcgtcgacctgcgcctgatcgaataccaaggagtctga

SEQ ID NO: 498271 - DNA, 132 bp, Stenotrophomonas maltophilia
atgctccggctgctttgcctggcaccgccagccgaacatggctcggcactgcaccggcgttccagcctggctcagtcgccccagccggccagcgccagcttgcccaccgtgcgcccgctggccaagcgctga

SEQ ID NO: 498272 - DNA, 741 bp, Stenotrophomonas maltophilia
gtgagcaccgaacccgataccctcgccgcggtcgagactgaaaccgcgcccctgcagctgctgcacctggatgagcgcctggctgtggtcaacaagcctgccgggctgatggtccacgacagcaagctggcccgtggcgaagacgacttcctggccgaccgcctgcgcgagcagctgggccgcccgatcttcctcgtgcatcgcctggaccgggccaccagtggctgcctgctgctggcctttgaccgcgagaccgccagtgcgctgggcaaggcgctgatgggtggcgaggtgctgaaggactacctgaccgtctgccggggctggccggccgaactcgcctggcaggtcgatcatgatctggacggcggcccgggcaaaccggtgaaaaagccggcggtcaccgacttccagcgcctggccaccggagagttgtcggtgccggtcggtgaattcacccgctcgcgttatgcgttgctgcgctgccagccacagaccgggcgcttccggcagatccgccggcacctcaagcacctgtcgcatcacatgatcggcgacaccagccatggtgatggccgccacaaccgcatcttccgcatgcagggcgtgcaccgcatgctgctgcacgccgagcgcctgcggttcccgcatccggacggtggcacggtggatgtgcgtgcgccgctggatcgtgagttccagaaggcgctggacctgttcggctggcaggtggacctatag

SEQ ID NO: 498273 - DNA, 588 bp, Stenotrophomonas maltophilia
atggccctggaactgtcggaactgaagaacgaactggcccacttcggtgccgaaaacgacgcccgtgaagtcgaacgcggccgccgcatgctcaacatcacgccagatacgggcgaattcctcgcggtgctggtgcgcttcggcactgcgcgccgcgtactggagatcggcacctccaacggctattcgacgctgtggctggccgaggccgccgatgccatcaacggccacgtgaccacgctggaatacgccgaggacaaggcggcgatggcgcgcgacaccttcgcgcgcagtggcctggccgatcgcatcacgctggtccacgacgatgccgggccgtggctggcagaggccgccgatgccagcattgacctgctgttcctcgattcggaccgcgggcaatacgccggctggtggccgcagctgcgccgcgtgctgcgtccgggtggcctgctggtggtggacaacgccacctcgcatgcgggagagatggaaccgctgcgcgtgctgctggacgcagatccggacttcagcaccagcctggtgccggtgggcaacggcgagctgctggccgtacgcaacgcctga

SEQ ID NO: 498274 - DNA, 606 bp, Stenotrophomonas maltophilia
atgtggtggaatgacctcgccgcgatggccgaggcactgtcgacacttgcgccccacactgatcccgacgcggaggtctcgccacgggccaccctgcacggcgccgtacggatcggtgccggcagtcgcatctgcgacggcgcccatgtccagggtccggtgtcgatcggccgcgactgcctgatcggcaacaacgcactgctgcgcggcccgctgtgcatcggtgacggcacgcgtatcggctttgccagcgaactgaagaacgcacggttgggcaaccaggtcagcatcggcccgcagtgcttcatcgccgacagccgcatcgatgaccgggtctatctcggcgccctggtgcgtaccagcaaccatcgcctggatggggcaacggtcaccgtccacatcggcgacaccgtcatcgacagccagcgcgacaagctcggcgcctggatcggcgaaggtgccgcgctgggcgtcggcgtgatcatcctgcccggccgcatcgtcgcgccgggaagccagttcgggccgcgcatcaccgtggaacgaaacctgccgcccggccgctaccggctgctgcagtcattgcattcccaacccctggagtaa

SEQ ID NO: 498275 - DNA, 882 bp, Stenotrophomonas maltophilia
atgaccagtaacccgttcaacgaatcgcagaaccatcaatcgcccgccgggcagcgcctggaccagcgccatcgcgagcagctgtcggccctggtcgatggcgagctgggcgccgatgaagcgcgcttcctgctgcggcggatggagcatgaccccgaactggccggctgccaggagcgctggcagctgctgggcgacgtgatgcgtgggcaggcgtcggcactggccccggccgggttcagttccgccgtggctgctgccatcgccgccgagcctgcgccgcaggccgagccgcgccgtcaggtacgtcgcagtggctggcgggcctggggcggtggtgccgcactggccgcttcagtggcagcggtggcgctgttcatgggcggtgagaagctgaaggaagccaccccgggcgagccgttggcacctcaggtgatcgccagccaggcggagctgccgaccgtgccgaccgatcctgccccggttaccgaagcctctgcagacacggctgcgatggctgtggcggcggctcccgccctggcgatggccactgccggtcgccgccaggacacccgccgcgccagtgccacccgcagccagcaggccgcgcgtgccgcccagcgtgaggacgtgccgcaacgcgcggtggctgctgcgcaggcgccgctgaccccgaccgtaccggccaatggcagccgcaacatgccgtttggcgaggtcggtgggctgcaggcgcggccgtggccgcgttccagcctggcgcctgccgccggcggcgcgctcaatgccagcttcccggcccataccggtggcgccgccttctacccgttcgagccgcgcctgcaggacgacctgccggtgccgccgcgcccgcgcgactga

SEQ ID NO: 498276 - DNA, 3024 bp, Stenotrophomonas maltophilia
atgaaggcttacagcatcaagcgggcggcgttgtgcgtcgccctcggggcgtgtctgggcgtagtgctgcccggcatcgcgatggcacagaacgtgagcggtgcagtcgccggccgtgcaaccgccggtgaccaggtgaccgtggtcagcagcagcaccggcctgacccgtaccgtcaccgtaggtgccgatggcagctaccgcctcggccagctgccggtgggcgactaccagctgcagctcagccgcgatggccagaagctgggcgatcaggtgtcggtgagcgttgccgtcggcggtaccaccacggtcaacctgggcagcggcggcggtgtcaccaacctggatgcactgcaggtggttggcacccgcgtggtcaaccgcgtggatgtgtactccaccgaaacctcgttcaacatcaaccgccaggagatctcgcggctgccggtagcgcaggacctgtccgcggtcgcgctgatggcgccgggcgtggtcggcggcaactcgtcattcggaggcctgtcgttcgccggttcatcggtggccgagaatgcggtcttcatcaacggcctgaatgtcaccgacatgtatacccgtcgtggcttcagcaccgcgccgttcgccttcttcaaggaattccaggtcaagaccggtggctactcggtcgagttcggccgctccaccggtggcgtgatcaatgcagtgacccgttcgggcagcaacgagttcgaaggcggcgttgaactcaccgccgagcccagtgcgtggcgcgccagtggcggcgatcatttccaccgcgacggcaccccgcattcctacggaagccgcgacaacaactccttcctgaagaccaacgtctggggctcggggccgatcgtcaaggacaagctgttcctgttcgcgatgtacgaggaccgcagcgacaagggccacaacacctcgtccgatggcagtacctggttcaagaacgactccggcaacggcttctggggcaccaaactggactggaacatcaacgacaaccacagcctggcgctgctggcgttctccgacgagggcgatgtcaccaatgcgtcgtacggctacaactggaatgcggaccggatcggttcctggggcggcgactcggtcaccgagaccggcggccgcaactggtcggccacctacaccggccacttcggccagaatttcaccgcgcgcgccatggtcggccagaacaagcagcgtgccttcaccaattcgtcgctggaccaggcctgcagcccggtgttcaccgacagcacctacggcccgcggctgggcaagctgcaggggctgcgcgcgggctgccacccgaccggcgcggcggtggccgagcgcgatgacacccgcgatgtcgcgcgcctggatttcgaatggcagctcggtgatcacctgctgcgcttcggtgtcgaccgcgaactgatgaccaccaagcagtccacccgttatccagggccgaccgagctgagctacaccgcctacgtggcgcgccccggcgatgaagtgtgggatggcgccaacgcctacgtaccggctggcgtcaccgagatgctgcgcgctcgcaaccgccgctccggcggcaccttcgagaccgaggccaatgccttctatctggaagacatctggaacatcaccccgaacctgatgctgaacctcggcgtgcgctgggaccgcttcgagaaccgcaccgccgccggcaaggcgttcatcaagatggacgacctgatcgcgccacgcgtcggcttctcgtgggacatgcgcggcgatggcagcaccaagctgttcggcaacgccggccgctattacctgccggtcaccaacaacatcaacgtgaactttgccggtggcctgaccgacgaatacagctattacgtgctgaacggctgggagcagaaaacctcgccgaccggttcgccgtacatggcaccgatcgtcggccagcagatcgggccgaccgacacccgcatgaacaccggcggtgccgacctgcgccagagcgtggaccgcgacctgaaggcggtctaccaggacgaatacatcctgggcttccagaacatgatcaaccaggcctggtcgtggggcgtcaatgccacctaccggcgcatgacccgcgcgctggatgacatccgcatcaactacaccccgtgcggcccgactcccagcacgctgtggccgatcgccaacccgggcgagagcctgacgatctggggcgacaagagcatcggttgcgccaacgaaggctggatcaccatcgacaccgccaacagcggctatcgaaagggcggcagtggcgaggtgatcggttactccaagcccaagcgcacctacaaggcgctggagttccagatcgaccgcgcctgggacgagaagtggatgttcaacgcgtcctacctgtggtcgaagagcgagggcaacttcgaaggcccggtgaactccgataccaactacggcgacaccggcatggtgcagttctgggaccacccggccaccaatgaacgctatggtgttctgttcaacgatttccgccatcagttcaagctgcgtgccgcgtatgcgctgaacaagcagtggtcgttcggcaccacgctgcaggtgcagtccggtggcccgatcaccgcctatggcgtgatgtggccgaacgactccatcgccggtggcagcacgtccagtgaaggcagtggtggtggcaccggttggctgtgcgtggccaactgttcgggcccgtacaaccagcgccagttcgagtacagcccgcgcggcgcgtttggtcgcctgccgtggacctggaccatgggcgccaacgtgacctggcgcctgccggtggagggaatcgacctcagcgcccggttgtcggtgtacaacctgttcaacaaccagaagaccatcaacgtgcaccagcgctacgaggcgcagcccggccagtatcgcgaggcgacgttcgctaccggtacgcgctggcaggcaccgcgctacacccagctggtggtgacctggaacttctga

SEQ ID NO: 498277 - DNA, 630 bp, Stenotrophomonas maltophilia
atggatgcggctgccaagcctacaaggacgtacttgcggcgtcccccgcgaacccaccccgcccggcctctgacagtttccggttgcttccacccacggaagagaaagaagaagagcaagagcaaagcagcttcgctgggcgcttcttgtagagccgagcccacgctcggctgctctccgcgaaatctccagccgagcatgggctcggctctacagaacagcggggccctcggggtcagatccgttttccgcaggaaaacggatctgaccccttctttctccatccgacatcagaaaccgctcttgcctttgccatccgctccgtcacatgaacctgtcgaggccggggcggtgtgggttggcaggggtgtcagccgcatggatgcggctgccaagcctccacggacggattcacggcgtcccctgccagcccgcaccgccccggcccacccacagcatcacaaggcgccagcgctttggctttggccgctgctgttgctgttgctgtgcgcctctgcctgccgcaggcatcggccctccctccacccgcacccgatacaatggccgcctgccgcatcccggcatcctgtccccgagccaaagagttgcccatgtccatcgtccgcatga

SEQ ID NO: 498278 - DNA, 1146 bp, Stenotrophomonas maltophilia
atgcgtttggcagcaatcacactggccgtagccacggtcctggtcgccggcgggtgcaaccgtatcggcggcggcgcagaggcaggcaaggccgcgtcgctcgatttcgacaagccggtgtccggcgagatcacctcgcgcagcggcatcaacttcaatgacggcagccatcaccagctctaccagatcaagctggaagacaaggatctggtcggcctgaaacttactggtgccctcagcggctcgatcgccgtgttcaacaacggcagtcttgtttccaccagcaacaccggttacgaacgcgaaggcgacgtctcgctggcgttccgtgccaatggcggcggcacttaccaggtggcggtcaatgccgatggcccgaccgcctttggtccgtatcgcctgcgagccgagaagctgaaaccttacgacggcaagccgttggcgggcagtggcgaaatcgtggacatgctggccagtgactcgcaggactacaccctgcaggtggacaaggccggcctgtacgaaatccgcctggtgtcggatgtcttcgatccggtgctgaagctgtcgggccagggcgttgaagccgaaaacgacgatggcaacgacagcaccaactcgcggctgaccctgtcgctgaagccgggcaagtacaccctgaccgcgcgcggcctcggcagcggtgtcaatggcatgttcaccctgtctgccacccgcatcgaactgccggggaatctggtcgagcgcgatggcaccgccctgccgaagtcgggcagcgtgtacaccatgctggacaacgaaggccgtcgccgcttcctgctgaccctggaccggccggccgacgtgcgcctggatgcgatttccagccaagtcgataccgtgctgcgcgtggtcggtggcgatgtcgagctgaccgacgacgacggtggcaacggtaccaactcgcgcctggaagagactctgccggccggtcattacaccgtcgacgtgtccagcctgaacaatggcgcaggcatggtcgaggtgcgcgtgcaggtggaaggggccagcgccgagggtgctgccgcctcggctgcacgtgccgctgccgacgcggcagccgccgtggccgatgacgccgctgcggtggaagctgccagtcgttga

SEQ ID NO: 498279 - DNA, 675 bp, Stenotrophomonas maltophilia
gtggtgatcaccgccaacgtgcgggaacgcgatctgggcgggttcgtcggcgagttgcgcacgcgcatcggccaagatgtcacgcttccagagggctactggatcgattacggcggcactttcgagcagctgatctcggccacccaacgcctgggggtggtcgttccggtgacgctggcgttgatcttcgccctgctgttcatggccttcggttcggccaaggacgcgaccatcgtgttcagtggtgtgccactggcgctgaccggcggtgtgctggcgctggccctgcgcgggattccgctgtcgatctcggccggcgtgggcttcatcgcactgtcgggcgtggccgtactcaacggcctggtcatgatcgcgttcattcgccgcttgcgcgaacagggtgatccgctggacgaggcggtacgcgacggcgcccttggccggctgcggccggtgctgatgaccgccctggtagcctcgcttgggttcctgcccatggccttgaatgtcggtgctggctcggaggtgcagcggccgctggccaccgtcgtcatcggcggcatcgtctcatccaccgcattgaccttgttggtgctgccggtgctttatcgttggctgcatcgcgaccgcgctccccgcgccggcagcactgctttggagtcttcggcaccatga

SEQ ID NO: 498280 - DNA, 288 bp, Stenotrophomonas maltophilia; identical to SEQ ID NO: 351542

SEQ ID NO: 498281 - DNA, 861 bp, Stenotrophomonas maltophilia; identical to SEQ ID NO: 351541

SEQ ID NO: 498282 - DNA, 402 bp, Stenotrophomonas maltophilia
atggagcaactgagtgctgagctcgggctcgtgatcgatcagctttggcccaactacatgaaggccgttgccgaggctgggttgccggcggaacactgcaccacggagttggtcttgggtggttggtcgcccaagaacggccggatgatggccacggcctatgccaagcacgacttgaccgttccagcggttgtccagcccataggaggacagctggcgtcgcccggcgatccgctcagggagcggccgcccagcatggccacccaggacctgctggtggcagcgcagctccaggctcgatacctcaacgccagcatgaggcggaccgtcgccggcggacggttgctattgggctttttgaagcctggccaggcggtggtcaaagacttgggcccgatttag

SEQ ID NO: 498283 - DNA, 369 bp, Stenotrophomonas maltophilia
atgttcattggattcagactgacgaagcggcttgtcgtcaacgccgtggttgtcctgatgctggcgcgattgctgtttatgggcatggacggcttggaccggttttccgacacgtggaaccgcacctttggggcgagcatgcccaacgccagcgggttgcgcggcgccgtcaacggcgcacgccaggttttcccgtctgggttggacgagtatgcgcgccaggccgaacgggacgcggcccaaagcacctcgctgttggacgtgtttgccagcgtgttcggacgcgtgaaaaacgaggaggtcatgttgccctccaccatcaattccgctggaggggagggctcgatctatgaccgctatgaccattga

SEQ ID NO: 498284 - DNA, 189 bp, Stenotrophomonas maltophilia
atgaccgctatgaccattgattttgagtggctgtccatcctctccgggtggtccttgctcaacgacagcgcggcgctgctgcgcacccccggccaacgctgggcgggcttggagggattgctcatcggctacggcctcatcgctggacagtggttcgtcctggccaccatggcaggggcgctggcatga

SEQ ID NO: 498285 - DNA, 198 bp, Stenotrophomonas maltophilia
atgaccaccgtgggcgcggtgttggccgccgtcctggctgcagcgttcctggccaccgtgttgggcctggctggcatcttctgggtcaatgcacggcacgccagcggggcgcttcgtgtgcgttaccgcttgcgtgcccaaatcctggctgggctagtgctggcgtgggtgctcaccctggcgaggctgtccacgtga

SEQ ID NO: 498286 - DNA, 1101 bp, Stenotrophomonas maltophilia
atgacaactcaccatggctggcaggcgtgccgcgcatgccatgcaccaggacttgatgtgcgtgtggagggaggctggcacctccgtgccaatcccggctactggggaaccagcgtccctaaaaccttggtcctggggttttccaagggggccacccaaattgccgccgcccaacacgggagcttcgatggggtcgccttcgcgggtgctatgcgccctcgcctcgcagctgtattgcacgagcttgggatcgatctgggtgggcaaacgatcaacgacgccctgaccgccgaaagccgccacatgggcgccgcctccttggtgcgctgcgggttgtcggtgatggacaacggcaagctggtcagcagtggcaccatcatgcccaaggccatgcgttcgtcgttgcctttggaagccatgaaaacatgcgtggcacgccacctggacccgttgcctgacagtgtggagcgcgtggtcttgttggggaccaccgatgcctacatgaagggggtcaaggcgctcatgcgccagcaattcaacgacttccaagaaatcaacgaggtagccttcagcgcccaaggccggacatgggtgtttgcgtcgcaccccagcccggccaacgggacctttcaagcctggatcgacggtgacaccgccaccgaaccgggccgcaagaagcagctggcgcgccaagcgttgggtcacaaggccccagcgcagcccctttcagctccgcctcgcccggcaccggcaccggcaccggcaccgatccagcgtgccacgccgcctgacccgatttcaccagctagggcgtccaacggcgaccgttttgcccgagccttccacctggttcgccacgatggaagggtgatcgtcgcggtgcggatgagggaccgagacacgggaaacgtggcgttccgggtggccaaaatgggcaacaccaaggatggccagcgcgagatccacgacgaagctgagctgttgcgcttgtgcgagagcgggcaataccaagtgcgcgcccaaccgttggacaagtccacaccggccaactttattcggccgctgcgaaaccaccggatcgtgaagacccctgcccgttga

SEQ ID NO: 498287 - DNA, 600 bp, Stenotrophomonas maltophilia
atggatgatccggctgagttgaacatgggagcgtggccggctgaggtggccttcgtgccctacgtcggccgcggctactggaagggagttgaagggcgccgcgtcttgctactgggcgagtcccactaccgggaggctgggtggaccgacgaccccgttatcactcgtccattcacccgcgagacgttcggcgacatggagacttgcaagaggacaggtggtggcaagttctttgatgagctggatcgcctgctgactggtcaaagcagcctaaatgttgtggatgccgcccacgcctggcagcacgttgcattttgcaacttgtcccagcgctttgccggcacgagagctggacaccgtccgtcaggaaccgacttcagtcaaggcgggaagttgttggtagaggtgatcctccctctgctccggccagaggtgattctggtgctcggccgcaccgcttggcgaatgttcgatcacgggaagcggtcggaccagcctaccttccatgctcgccatgcaaactcagagggcaggaggcggcgctatctggaggagcgccacgtatggtctctcgattatggcaacggggggcgtggatga

SEQ ID NO: 498288 - DNA, 789 bp, Stenotrophomonas maltophilia
atgacgcacaattcgttgaaggatgcgatccgcgatgcgctggagccgcgtgctgccacgcggcagcccacggcgttggacatcgcacaggaggccagagaggccaaggccagcctggaatcgaacatgtcctgcatggcccgcatcactgttcccgccggcagcgagcgtcaccgggtggctttccaactgttgagggcctcgatggactacgggcgtgcgttgctgttcctgttggaaacccatcccatcgatcttccagcggtggccttggcaatgcaccgctcccagattgagcaattcctgcgggcggtgtttgtccagttccttgccgacgacgaacagctggcggactttctccaggaagatcggggcccccgaaagaagaacgagaaaggaaaatgggtgactattgccctcaaagaccttgccgcggacgtggagcaggccattgcacgcatcgggcaggacgatgagcctcagaagctggctgggacggtgaccaactcgtgggaccctctttgcgggctggtccatggcgggaaggccattcgggtgatgtatcaagatcccaatggacagatcggggcgcacgtgccggcggccattctgtttcagaccaccgtcagcgcggtggccaccaccaacttgtgcgtcattgcagcactgacggcggttggggttggggcctttgaggaaagccccgttgttgagcagtgcgccagcgggatgttgcactacatgcaacggaggaaagcccgcatggaagagctggcctggccgccttaa

SEQ ID NO: 498289 - DNA, 363 bp, Stenotrophomonas maltophilia
atgtggacatggatcacccacctcttccgccgcaatcggacggagcccacccggtccgccattgccatggccacgctgatcgaactgaacatgctggagctcaacgcagcggaggcccgcaaccgcgttgaactggacccaccggggcatgaagcagcacttcttgagagattcaaggcatcggcccagctgatcctcaacgaaaagcctccattcgacgccgcagactcaacctgggaatcccttggacagaaggcacgccgcctaaaccgaggattcgcagacctccgattgcaactctccccgccagcgatcgttggtggggatacagagcggcgcgacaatacgcgtccggtcctttaa

SEQ ID NO: 498290 - DNA, 285 bp, Stenotrophomonas maltophilia
atggggatggacaaggacgcagcgtcggcccgcatctctcggtatgaatccgagggcatgtcgatcagcctggaagccctcttcgagctggcccaggccttggaagtgcccccggcctatctcttggcgaccagcccggcgatggccgatgcgatcttggctttgggggagcagagcgcggctcagcaggaacgttttgccgaactgctgggcgttttgggtgagctgtcgtcgaagaagcgcaacgcactcatcgaacaagtgttgtcgcccaccaaggactag

SEQ ID NO: 498291 - DNA, 873 bp, Stenotrophomonas maltophilia
atgaagggagttagaaaggccgtgctgaccggggcgtttgccctgactgcggcggctggagcgcaggcgcaaccgggggccggatcggatctgcttcgccagatcggccgagccatccaaggctcgcccaaggtggtcggcgataggacgcggagcccttacctcgagccggccgggacttactgggatctggaccaggatggcttggaagggattcagcacctgcgggccggggtgacggctgtcgggggtgggggcgtggacacctgcgacatgcagttgctcgccatggcccattcgacctatcgcatcaacgccgacaaacgccaatggtgcctgaggcagtggtggctgatggacacgaaggcccagggcgccaacggcatctcgggcaatgatcaggccgccatcgagcgccgctatgggccggctttcgacgcgcgactgcagcgcttcaagggcatccggcggttcgcccttcgtcccacgttccaagccctgggcgatgtcgcctatcgggccgaccgtggcgtgctggaagggttcatcccgattcctcaggtgtccgcggcgggacaaagcgtcaccggcaagggctttgtgccgtgggttcaccgcacctccacgggggtgtccagcccacccaacgccggccgcttccacctgctggtccgaatggacacccaagaggccgccaatctcgcacgacaaggtcgcagctaccgagacgatctggtggtgttctccgtcaaccgggtctgggtggacggcacggtgccaaaaatggacgtgacaatagagagggttcggctcggataccgcgacgaaaccatcgacgttgatttaacccatacgcaaggagctccggcatga

SEQ ID NO: 498292 - DNA, 363 bp, Stenotrophomonas maltophilia
atgaaagcaaccctcgtttccctcgccctgatcaccgcagggttggccgcctgcagcagcaaggcggatttgcccaccatcgaacaagtcgcccacgcttacgaggcgcatgccaacgccaacctttccagcgaaatgggccaacgaatcgaggttcggggttggaaggacctcacggcggattgctcgtccagtggtccccggcgggccacgtgcgtgacgggtggaacgctggacctggtcggcttccagggcgggcagcagttgaagcccgatcccgttcccgtgccgtcggcttacgacttcctctttgagaagcagcccaccggctgggtcccggtcggagcccagaagaaaggctga

SEQ ID NO: 498293 - DNA, 483 bp, Stenotrophomonas maltophilia
atgtcttacaacgctcaccacaccccggccggtcacatgcagtggggcttgctggcaccggccaccgtcatccttgggggcgcgggcctgctgtttcttgccggggcccaagagatcggcgagaacatgggctacagctgggaggccggcctggcggccgctggtggggcagccttgctgctcttgctgctcctgctctacgtgttgaactggcgcgcggcccgcgtgcgcgcggcaagggccagcgggctcccggtttcgccgcgtaaaggtggctttggaaagggcgccttggtgggtgtgctcttcgtcgttgccctgcagctggccagccttgccgtgggcctgctctacccgggcctggaagagggcgagcgaaacttcttcacctccgtccccccaatggttctgacagcgctgatgccggtggcgctcatcgtcggtggcatcgcaggcaagctctggcgctctaccagcctgtaa

SEQ ID NO: 498294 - DNA, 813 bp, Stenotrophomonas maltophilia
atgcctgaactgcccgaagtcgaaaccacccgccgcggcctggcgccgcacctgcagggccgccgcgtgcatggcgtgatcctgcgccgcgccgacctgcgctggccgattccgccggaagtggccgagctgctgccggggcagcgcatcgaggacatccgccgtcgcgccaagtacttgctgctggacaccgccatcggcagcgccgtgctgcacctgggcatgtccggcagcctgcgtgtgctgcccggcgataccccgctgcgcgcgcacgaccatgtggatatcagcctggacaacggccgcctgttgcgcttcaacgacccgcgccgcttcggcagcctgctgtggcagccggccggcgaagtccacccgctgctgcaggggctgggcccggagccgctggacgatgccttcgacggggactacctgttcgcccgcagccgtggccgcagcgcgccggtgaagaccttcctgatggaccaggcggtggtggtgggcgtgggcaacatctacgccgccgagagcctgttcaaggccggcatcagtccgctgcgcgaggccgggaaaatctcgcgcgagcgctaccagcggctggccgatgcggtgaaggagatcctcggctacgccatcacccgtggtggcaccaccctgcgtgacttcatcagccccgatggcgcgccgggctacttcgagcaggaactgctggtgtacggccgtgacgggctgccctgcccgaactgtggccgcgcgttgaagcacgccaccatcggccagcgcgccagcgtctggtgcagccactgccagcgctga

SEQ ID NO: 498295 - DNA, 1203 bp, Stenotrophomonas maltophilia
atgacgattcaatccaccctgctggccggcgccgtgctggcagcactgtccctttccgcagcgcaggccgcgcagccgctgcaggccgcccgcgcaggcgaccaggtgcccgcggcgctggttgccgcgccgttgccggccgatgacagcgaacgcgcaccgctgtccttcgcctgggccttggacccggcgcaatcgttgcaggcggcgactccgtatgcctcggtcagccgcagctactggcagcaggtcgatggcacgcaactgcagcgcggcctcgatctaccgctgacggccgccgatgcggtgatccagctgagcccggcagaaggcgcgcgtgcagtgccggccaactcgctgcaggtgcgcgacccggcaggccgcagcagcgtggcccgcagtgtcgacgcgcgcgcgctgcaggaggccggtatgccggtgagtgatggcagcagcatgctgcgtaccggcgcgaccagtgcggccggtgcgtacacgctgcagagcgcgcaggcacagggccgctacgtggtgcaggtactggagccgaacagtccgctgcggctggaggtgcaggccaaccaagggcaggtgctggccggtggcaacctgcagctgcaggcgcgcctgctggaagacggcgctactcccgcaacgctggcctcacgccgcagcagcctgggcggtgaagcgttgctggttgcgccggacggccgcagctggccgcagcgcctgctgcgcaccaccgatggtgccctgcgtgcgcaggtgcggattccggctgatgtcggcaacgcgcaggggttgtgggagctgcaggtgttcgcccaggccgatggtgtgttgcgcgatggcaaggtcgccttcgcggtggcgcgtccgaccgcgcgcttcagtggccaggcggcgccggacccggccagtcgacaggtcgcactgccattgcaggtagccgccgctggccgctacgaggcgcgtggcacgctgtatgccaccggccgcgatggccagctgaagccggtcgcgcaggcgcatgcggccgcgtggttcgatggtccggggcgtggccagctggtgctgccgttcgaccaggccgcattgccggccggtttcggtgcgccgtatgagctgcgcgacctgcagctgcaggatcagagccggatggcaccgatcgagtcacgcgcgctggcgttgaggttctga

SEQ ID NO: 498296 - DNA, 879 bp, Stenotrophomonas maltophilia
atgcgcagcaccgcaacaggaagtaccgtcctggccctgctcctcgggcttgcaacagcgccggcgcaggccgccgacgtggtcggcgtggccttcgtgcatggcaccggcgcgcagaccaacgccacccaggactactggcagccggcgatcatcgacaccgtgcgccagggcctgccgaacagcagcaactacgtggtcatcaactgtgacttcacccagtacatgtggaagcccgaagctgccggttgcctggccaaccagctgaccagcttcatcgacagccgtggcatcacccagctggtggtgatcacccattccaacggcggcaatgtggtgcgctggatcctgtccaacccgacctacgacagccgctatccgaagatcatccgcacggtgcgcaaggtcaccgcgctggcaccttcctcggcgggtacgccgttggccgatgcggtactcaacggcaacacctttgaaacctcgctgggctggctgctgggctacaagaacgacgcggtgcgccagcagcaggtggcgagcatggccacctacaacgcgcagaacctgtatggcacggccggtcgcccggcgctgcccaagccgttccgcgcggtggtcggcagcgacgtggaatcggcggtgtgggacagcaacagttactgcggcggctatgccgccaacgtcggcctggagttcacccagaactggctgtcgtcctgctccgatggcttcctggagtgcagcagccagaaggccgccggcaccacctggttcaccgacaaggcgcgtacccagggcgcagaaccgctcagccacaaccagagccgccgcgagtgcttcggcctcggcaccctgctgcgcaacgacctgacccagtga

SEQ ID NO: 498297 - DNA, 300 bp, Stenotrophomonas maltophilia
atgagcatcaaggtcatcgtcctcaagaacgaaattgacgaacgcggcggcagcttcaagaacgacgctggcgagaacgtggaatacaccactcgcaagcagaaggccaagctggaaaccggtggttttgcctacccgttcgacgtgcgcctggacaagggtcagccgggttaccccgagggcgagtacgagctcgatgttgaatccatgttgcaggtcaacaagggcgtggcctcgctgagcaagttcaccgtcttgcgcatggtgcccaaggctgcacctcgcgctgccaccccgtaa

SEQ ID NO: 498298 - DNA, 210 bp, Stenotrophomonas maltophilia
atgaagaagaacctgcgcaagatcggcctgaaggcagctgccatcgcttccaccgccatggcggcggcaccggcattcgctggtgagcttgctaccgctgccaccgaaggcatggataagggcgaactgacgctcatcggcgttgcggtgctgacgctgtgcggtgtcgtcgcgctgatcaagaagggccagcgcgcctccggcggctga

SEQ ID NO: 498299 - DNA, 639 bp, Stenotrophomonas maltophilia
atgagaagaagaactgcgaatccccggccatggcaagtgccggctactactggaacgtcgcgcttcgtgtttgtgagccgcctaagcctcagtgcgagggtggatccaagccaaattctcttgggcagtgcgctcccgaaccttgcccggacggaatggcgcagcaggccgatggcacatgcaagaagaaggacaacgagtgtccggcaggacaggttcgttcccctgatggcaggtgcttacctggcgacggccaatgtgccgcaggtgaagttcgcgggccagacggaacctgcaagaaggatagcgacggtgacggtgatcccgaccccccgggcgaagacgaggccttctcaggcggggatgattgcagtgcgccgccatcgtgtagtggctcacccatcctttgtggtcaggcgcgaatccaatggcgcatcgattgcaacacccgcaagaatcgcaacattgccggtggaatgtgcaacgccatgccggtgtgcacgggcgagaagtgtgatgcgatggaatatgcctcccttctcatgcaatggagaactgcgtgcgccactgaaaagatggctgcgcagggtggaaacaacgggggcggagacggtagccagcccgagtggacgaaagtag

SEQ ID NO: 498300 - DNA, 282 bp, Stenotrophomonas maltophilia
atgagtactgatccgggcgctggcgcatcccctgacgacaccaaggtacttaccgtcaagaagttgggtgtcgaacagctggatcaatccggtttcggtggcggcggcagctgcattggattcgcagttggcggcggcagtggaatcggctcgggctttgcgcaagcgatggcatcgccaccggacttcttctgcaactacatcatcctgattcgcgcagtgatcattctttcggcaacggtcacgtgcgccttcatccttaccagcggggggaagaactaa

SEQ ID NO: 498301 - DNA, 291 bp, Stenotrophomonas maltophilia
atgccaatgatcatcgccgcgcttgtgagcatgctcctgcaggcgctacgtcagtacctgccgggcatcatcgggcgcgtgctgcttgccttcggtattggcctggtcacgcacgaggtggcactgccggccgtcaagagcctcattcagagcaaaatctcctccctcggccccgtacttgtcgcctattttgattacaccgggttcggcgtggccgtcacgatgatcctttcggcatgggcggccacctatgcgcaaaaggccatgcttgcgaagctggggtccaactga

SEQ ID NO: 498302 - DNA, 1170 bp, Stenotrophomonas maltophilia
atggcgctctatctcgttaccggccagcccggccacggcaaaacggcctatgccctggacaaggcgttcaagttccagaaggagggcagggcgatctacgctcacggcgtcaaggacctcgattatgccaaagcggggtggacgtatcttgatgaccctacccagtgggaggcattgcccgacggatccgtcgtgttgctcgatgagtgctacacgatcctcccgaatcgtaaccccggcgcgaaggttccgccgcacattgaggcgatggcacgtcatcgccatcgcggtttcgacttcatactgatcgcacagcagggtttgcagctagacccgttcctgcgcggcctctatgaagagcatgtgcatgttcgacagacgtcaatcatgcgcagcaagaccaagctcaaacgctggaatcagtatcaaagcaacgtacaagctgtttgcgccgacacggtcgactgggtgcggcctaagtacgtgttcgactactacaccagcaccacgatggtgaccaccaagcggcagatgcccatgtggctgcgctacctgatccttggcgttgttgtcctggggatcatcctcttcgggatccggtggtacttcgcatccaagatcgcggaatatggagccgaacgaccggcggctacacaaccggtagcgcgtgctgccgcaactgccgacagcggagcggcggcgggtgcggcggctccgcgcgtctacgagacaactgctcagtacgcaacggctcacaatcctcgcatcgggactatgccctggactgcaccgatctacgaccagcgcgccgtgactgctgatccgcagctgtactgcatctcgagcggcgaggggctagacggaaatggccgacacactgaggccacatgcacgtgcctgacagagcagggtacgcgctacgatttgagtcagcccgaatgccgcacactcgcgcgcaatggaccggcatacaacccatacaggacgacgcaaccgccaccgcccgcgccagttccgcccatgccagccgcgtcaggcgaccgggctactgcgggcatacagggcgctgtgatcagccgcggtgatcgcgccaatggcagctttccggagtcgcccgcgtttgagaccagcacctacatgacgagcccgacgatgcccaccaagctctga

SEQ ID NO: 498303 - DNA, 381 bp, Stenotrophomonas maltophilia
atgattgagttcgacccgcaccaccgtatcgacttgaccggcccttgggccggtttttctttcctcggtgatcgtctgatcacgcccgaaggccgcgagctgcttcccgaagatctggcttggctgtcgctcaccgcctgccaagcgcaggaatggcgccggatgatggaagctgcacgctcgatgccgtcgatcgacagttccagaaatgtgagtaatcgcaacgccggcatccgccatcatcctgccactgtcgtcaatctgcgggacgtggtgagccggcgcaaacagcggtcggcggtggcgatagctggtcccgacgccgagtcaccagtggcagacctgccgatacaggggccgatgcctcgccagcgcgtgtga

SEQ ID NO: 498304 - DNA, 375 bp, Stenotrophomonas maltophilia
atggaacgcaaacgaccggattacctacccgaactgccgaagccgcgctgggaattcccatggatgggcttgtgggcggtactactgctcggaatggccggtgccgggatctggctgcacctgaaaaccgggaatgcatggaatgcacgcttcaacgcgccgccagcgcaaccagagacgacggccgcgatcccagcgccgaagacagagccaaaccctgccaaggaagcgaagattgcccagattcgcatgtaccgcgaacaggcggagcgccgcgagcagcaacagcgcggcgaaatccgctgcattggaggcgttctgttccgccggatacctggaggctgggaaaacgtccccggcgagacctgtccgtga

SEQ ID NO: 498305 - DNA, 285 bp, Stenotrophomonas maltophilia
atgccgtggttagcagccttcctcgtccagcttctgggcaactctctcgcccgcgtcctcactggcgctggcctcggtctcgtaacaggtgcagccctgttgccgcttgtgaagggtgcattgaatctcatcacccagaagtggtcaggcatcgcagccgatctcgccaatgtgatgcttatggccggggcaggggaggccatcaccatgatcggctctgccatcgtgaccaaggtggtcatcgatgcaggcaaggtcgccgtacagaaggcagcttccaaatga

SEQ ID NO: 498306 - DNA, 393 bp, Stenotrophomonas maltophilia
atgcacgacaaatcacacgtttccctcgaacagcacgtttgcttggtctgcggcacagcgttcgataccggcgccatcctgttggacaagcgcctgcgcgcgagcatggagcgccatacggcaaccggctgggggctttgccccgagcatcagaaactgtccgacgacggctttgtcgcgctggtcgaatgcgatccgcagcgcagcggctcgcaggccggtggccgcatgaagcccgagcaggcatatcgcacgggccgcctggcccatctgcggcgcacggtgttcgcgcaggtgttcaacgtgccgatcgcggccgagcaggcttgcgtgttcgttgagcctggcgtgatcgaccagttgcagtcgatgactgcgccggcggcgaactga

SEQ ID NO: 498307 - DNA, 192 bp, Stenotrophomonas maltophilia
atggcaagcagtgatgtcgttcgcgcccggattgataaagaaatcaaggaggaagccagccatgtcttatccggaatggggctgtcaatttcggatgcgattcgcatgctgctaacacgcatcgcgaccgataaggccttgcctttcgatctgaatcgtgtcgcttctccgctgaagcgcaagactccatga

SEQ ID NO: 498308 - DNA, 1293 bp, Stenotrophomonas maltophilia
atgacagagccaacgatcatttgcccaaactgcaagaccgagattcgcttaacagagtctctcgcagctccgcttatcgctgcgacgcgtcagcaatacgaacaacaaatcgcacaaaaagacttggattttgccaagcgcgaacaaagcctgcgggaaaaggaaaaacaggttgccgaggaaaaacgcgctctcgatgaccaagttgcagatcaggttgcagcacaactaaagactgagcgcgcacgagtcatagccgatgaagccaagaaagcgaagctcgcgagtgcggcagaattagacgcgaaagcacgtgagctagttgagcttcaggaggtattgaagtcacgcgatgagaagttggccgaagcccaaaaggcgcaggctgaattgatcaagaagcagcgtgaactcgacgatgccaagcgcgaattggaattgactgttgagaaacgtgttcaagagggcttgaccgaagtgcgcgctatggcacggcgggaggccgaagatggtttgaagctcaaggtaatggagaaagatcagactatcgcgtcgatgcaacagaagatcgaggaattgaagcaaaaggcagagcaaggctctcagcaattgcagggcgaagtccaggaaatggatctcgaaaacctgctgcgcgcgaaattcccatttgactctatcgagcctgttgcaaagggcgagttcggtggtgacgtgctgcaacgtgtgatcagccaaactggacaaccgagcggcgaaatactctgggagtcaaagcgaaccaagaactggagcgatggctggctctccaagttgcgcgacgatcagcgaaccgccaaagcggaggtgtcggttctcgtgagtcaggtattgccaaaaggcattgaaacttttgatgttattgatggtgtttgggtaaccagtccaagggcggttctgccagtagcaacgatacttcgccacactctgcttcaggtaagcatggctaggcaagtcagcgaagggcagcaaaccaagaccgaaatggtttatcagtacctgaccggaccgcgattccgtcatcgcgttgaagcgatcgttgaagcattctcctcgatgcaacaagacctggataaagaacgaaaggccatcacgaagcaatgggcgaagcgtgaagagcagatcgaacgcgtgatgggcgctactgttggtatgtatggggatctgcaaggcatagcaggcaagtcactgcaggaaatcgaaggcctgagcctggtggctctgcccagcccaaatgatgaagaacagggaagctga

SEQ ID NO: 498309 - DNA, 1329 bp, Stenotrophomonas maltophilia; identical to SEQ ID NO: 352149

SEQ ID NO: 498310 - DNA, 1905 bp, Stenotrophomonas maltophilia
atgcacaaccagccgggtaacccagacccatcacggctcggaaccgttgaagatgtcaatggttcgagtgtgagcgtgaagctctcagagagcacgcccggtggccttctttttgttaatggggaggcataccgtgttggacaagttggagggttcgttcgtattccatcaggatatgtcgatctgtatggagtgatatctcaggtcggggccggagctgcacctggaccgcccgagcttgctcctcagctcggtaatcggtggctcagagttgaacttgttggtcaaggacgacggggaacgaagttcgagcgagggatagcccagtacccctcgatcggagactcggttcacgtagtcactgagtcggatttgaagacggtgtatgcaccaggggacgatgatggatacgtcgccgtaggacgcgttgccagcgccgagtcgatccgtgcgtacctggatatgaatcggcttgtcactcgtcactctgctgtcgttgggagcaccggctccggaaagtcgaatgccgttgcaaatctgttgggagcagtttctgaccaagcacgcttcaagtccgcacgcgtcgtactgtttgacctccacggggagtacgcaaaggcctttggcgatcaagctagggtattcagagtcggagcggatacgaccataggcgagcgcgagctgcatgtcccattttgggcactgacggccgaggaattcatttccataacgatgggtgcagtctcagggacacctctgaccttgctgcaagaaaagctgctatcaagcaagcgcgcgtcaaaggcggcaggtgtcgcacatggccttccagatctcacggtcacgatcgacacgccgctgccattctccgtttaccaactctggcatgatttgtattcgctacattgcgcaactcacagcgtaagtaagaaccaaaaccagactgaggctacgcgcacgtacattgaggaaggtgcgcccccagtcaaagcagttggcgatggcgaccagcttgttcgtccgagatttcgtccgctcaaagacgaaaagaatgatgctgacaaggtgtatgcggggatctacggtgatatgccgcgtggacacctcgatagtttggaaagcaaacttcgagatcctcgcatgcagtttctgtttcgtcctggccagtgggcacccgacaaggatggaacaacgggcgctgatctagatgcgttgcttgaggcatggataggcgcagataagccgatctctgttttcgatttgtcaggtattcctactgctgttgtggatgacttggtaggggccgtattgcgtattctgtatgacgcaatcttttggggtagaaacaagcaagaaggcggtagagagcggcctcttcttgtcgtccttgaagaggcacatgtataccttggccctcaatcaaagaatagagctgcgattgcagcacggcgcatcgccaaagagggacggaaatacggcgttggcttgatgctagtcagtcaacgaccatccgaagtggacaccacaattctttctcaatgcggtacggttgtcgccttacgtttaaccaacgactctgatcgatcccaagtaacttcctgcgcatcggacaatctcaaagggctgttttcaatgcttccagttctccgaactggtgaagcattgatcgtgggcgaagccgtcaatatgccaatacgggcaatcattgaccgtccacctgagggccgacgcccggaaagtgacgatcctatggtcgtcgtgcccaagggggaaggcggcaagcgtataaggtctggcggatggacagaacctgtcaaagatgaaaattacaagcctctagtcgaggcgtggcgcaagcaagatcctaatgctggcaaaacacaggcagcggattcagaaacctga

SEQ ID NO: 498311 - DNA, 210 bp, Stenotrophomonas maltophilia
atggaacgcacctcagtcacttcaagcaacatcaactccattggctatgatgccgacagccagatactggagatagagttcaataatggagctgtttacgaatactcaggggttcctgagggcgagcatactgggcttatgaacgcggactccaaagggacgtacttcaatgccaatattaagaatcggtatcccttttcgaaacactga

SEQ ID NO: 498312 - DNA, 303 bp, Stenotrophomonas maltophilia
gtgagcaagatcattgaatcgctgcgtggcgacctggctgcgctccacgaagtgggcgcgatcagcaaggtgacgatgcgcaagttcgacgcgatctgcccgccaccggtgcgggagttcggcgctgccgacatcaaacgcctgcgcgaagccttgaagttcagccaaccggtgttcgcgcttcacctgcacaccacagcctcgacggtgcgcaaatgggagcaaggcgagactcgcccggccggcccggccctcaagctgctcaacgtcattgcagacaagggcttgcgggccattatctga

SEQ ID NO: 498313 - DNA, 384 bp, Stenotrophomonas maltophilia
atgacggacatcctcaagcgaaaggactttgcacgctggcagtcgggcgagaagctgcccgatgccgcgttgtgcaaggcggttcaggagatggagagtggtctgatcgacgcggacttgggcggctccctctacaagaagcgggtggcccgccccggcggtggcaagagcggtggctaccgcacgctggtatcggccaggatcggcagccgctacgtgttcctgcatggtttcccgaagaacgacaaggcgaacatcacgcaggacgaaaagaaggccctgcaattcgccggcaaggtgttcctggaactgtccgcggaagccctgtcaaaggcattgcaggccggcgtgttattggaggtgcattgtgagcaagatcattga

SEQ ID NO: 498314 - DNA, 318 bp, Stenotrophomonas maltophilia
atgagcaagaggacgctttcggtggcgccccccgctgccttgccggccgactatccccgttccgcaatttccgagacagtgtctgggaaattcggcctcgccgagctggccaaggtcttcgcgctgccgtggtcggcctatgcgctgctgatttcggccaaggatgcccgcgtgaccggtggccggcatcccgttctgtcggctccgattgtcgtgccggcgtcacgacaatcgggcgggtcatcccttctatcaaggtgctataccggagactggaaaagtatgcccgtatcgggtatagtttggaggtcgaaatga

SEQ ID NO: 498315 - DNA, 147 bp, Stenotrophomonas maltophilia
atgaagctcacgggtcacaagaccgtggcgatgttcatgcactacgtccacaccgaggacaagccggtgcgggatgcggccgaactggtggcgagccggcggcaggccatcacgggcgcgcagcgacctgcggaggccacggcatga

SEQ ID NO: 498316 - DNA, 246 bp, Stenotrophomonas maltophilia
atgagcacgaccaagaagctgcggctcgggccgctgcccaagaccgagagcgtcaagatgacctttgcctgcccggccagcctgaaagccgacctcgaacgctacgccgcgttgcacgcgcaggcgtatggcgaggcggtcgatgcagagaaattgatcccgcacatgctggaggcgttcatggcgggggatcggggattcaggaagagcacggcgacccggagcacgccatcgaagccgacatga

SEQ ID NO: 498317 - DNA, 498 bp, Stenotrophomonas maltophilia
atgaaaattcatcacctcgtcagcgacggcaaccaagcggtcgccatcacgcaatcggcttcgagtggcggtggctacgcgcacccggtgaagctctccgccattcgcttcaacgtgaaagacgccgaagcggtgctccaagaactcagcaagtctggccatcgtcatgagaagacgttcgaagtgttcgagcgttgggacgccgatgctcgcaaccaaggaccaaagtcgaagttcggtcgaacccttgccgcccttgtggacgaagcgcgggatcacctggaggcgcaggttatctacgaagccaaaggcatggaagagggcaccgtgcgtgcgatcaacgccgcggcgaaacaagccaggctttcgcaggtccttcctgctgtaggcggtccgagcatggtcatcggtgggcaggtctggaaccgacggcaagaggcgcacagcgaagctccggcggctgttctcggagctccccgtcagcgcgtgcgcctgtaa

SEQ ID NO: 498318 - DNA, 222 bp, Stenotrophomonas maltophilia
atgaacgttcaaattgcggaagccatgaacaaagccaaagacgacgcggaccgctacggaatccttgcagggttcgcctcctgcaaccgggccctgcttgagaagggggccgcgcaagaactggtggacgccttgtatttcgccggcgctgcgatcaaccgttggcgtgccatcgcggtggtccgagaggcggctgccaagccgttggacgcggcgtcctaa

SEQ ID NO: 498319 - DNA, 360 bp, Stenotrophomonas maltophilia
gtgcttcaacctgtcccttccccaaaacttgtcacccttccgtcctcccggggctactcccgtgatttggagcgcttgcaggcggccgccgcgcgcgcgcaggtcacccgaaacgaggccgtgcgccaagtgctcgccatgtatgccgccaaaccttacccactgagcaagcgtcggctgggtggggaacgggacgtgcggctggcctaccttccgctgcagcgcagcgtcttggaggcggtggagcagggcgcggtgaacgctgggatttccaccgcagaagcggtgcgccagatcatccgagactacgtccaaggacatctcattcggaaccaggttaggggcagccgccatggctga

SEQ ID NO: 498320 - DNA, 489 bp, Stenotrophomonas maltophilia
atggctgaccgccacccaccaccgccaggaagtccgagcgctgagctgattcacgcgtgcgtcgagggaagccttttcggcgctctacaggccctgcggcagggcgccaaccccaacgcgtggcgcctcaacgaaggtcccgcgctccattccgcacttgcctggccccgcatcgtcgaagccctcctgcaagctggtgcgcaccctcaagagaggaaccactggtgcgagcgcccgctggaaaagctggcggcggactaccagctgagcgacgacgccgacgagcgcagccgacttgaacagacggcgttgctgctgttgcggctgggcggcaaccctcaccggggcagcccgttctggaacacgccatcgctgaaggcggcgatgccgcacgtggtggccacggtggaagccgaacaacgtgctgtccacctggagcatgcatgggcagcccggggaagtgtcagtgcaaagcgggcaaggctgtag

SEQ ID NO: 498321 - DNA, 255 bp, Stenotrophomonas maltophilia
atgaccacgcgtgccgcccgccaccgctattacgcatacgagcgccgcgatggttctgtgtgttacctgccaaaactgttgcacgaggggattcagcgctacccacgaacgattgcgcactaccacctggtgcagtggctgggagtgtccaagttgctcagcaaagacgaatacaagcaaatggcgtggctgggttcacagcggggcacgctccgaaacacccatgattcaacgcaggctcgtctcaccggctga

SEQ ID NO: 498322 - DNA, 441 bp, Stenotrophomonas maltophilia
atgttcgagccttccgacctcatccattcctacacccgcgcccaggcgatcgaggacggcgtcttggtggacgtgtccgacgtggccaaagaagccggtttcaagttgcccgtggccatcacccgcgctgcgtgggcacgctacgtggaagtgcccgcgggactggaggtgcgcggccagtcggtggacggccggctctgggatgtgctttttatgctccacgtcgccatcaagcggcatcagggcaacggttcggagatccactaccagctccacgtggctctgtccgacgccggcgactggttgtcaaacgaagcccacccggaggccgggtctggcctgacgcggtcgacccatcgccttgtcaccttgaaagcactgtgtgggcccggggacgccctggagccggtggtcaccatcatgctgcccaacgaggattga

SEQ ID NO: 498323 - DNA, 918 bp, Stenotrophomonas maltophilia
atggaaaagttcgattggtcgaaggtggagtttgcacgcacaccctggcggagccgggttatcccggacgcgctgcccatcctcatccggtgggcgcaggagggcgaagctcattcctacagcgacctggcccaagagctgcacgacaccttcggacacgagatcaaaccccgcaaagacctctacggcaccgtcgccgggggagtggcccaggccctgcagtggctcagcgagcagtggaaggaacccatcccgcccctccacgcaatcgtcgtcaacaagaacacgaaacaccctggcgagggggcgatcaccatctcgccagcttacttcgcggggaagaagctggacaccgaggaagagcgccgtgcgcacttgcgagaggcgatggaagacgttttcacctatcccaattgggaccgggtcgcccgcgctctgggagccaccatgctgaccccgtccgccggggcggttgaagaggtggcagcggatgcgcctcttccccttcctaaagtccaggagggggggcggccagagagcgacgagcacaaagcgttgaaggcgtgggtggccagccatcccgaagagttcgtggactttgggtgcttccccatggggagcaacgagaagttgttgagctcgggtgaccgactggacgcgcatttcgataacggaagacatcgcctggcggtggaagttaaaaccagcaagtgctcggaggacgaactccagcgaggcgtctatcaagcggtgaaataccgcgccgttctccgggccgagcagaaggccatccgccacgtgcccaacggggagacggtgctggtgtccacgcgcgctccgaacgcggaaacccgtgcgctcatcaagcggctgcaggtgcgtttccagcaggtgccgctggaggcggagcaagaatga

SEQ ID NO: 498324 - DNA, 762 bp, Stenotrophomonas maltophilia
atgaagcctgaggaactggaacaacgtattcgccaaatcgatggattcgttcgggtgctcacgcaggagtgccacatcctcgacgagcgccggcacattttgtccccactcattcaagaccccgcgatccaggcagggctcaaagccaaattggataagacccccggcgccaatgcgtggaaccacttggctccgcttcttgggcaagacctggtgcgcgatcagtcacggctttttctggacaacgatctcaggtcgggtagcctgaccaacctgtggagaaagctgcaagcagatccagccatcaaggagcgctaccgggagcgctacgggcgcatgttcgatcacttccacgacgaaccgatcagtgacctgccgcccgaaagctcggctgttttccaggagaagttcagacagagcgatcgggacgaaaattactcgcgcttcgataatggctgggaaaaggtctccaatgaaatggtgatcctttcggctgatcccgtggcagcgaaaatcaagaccctacgggacaagcaccacgcccacctggaaatgcgcaagctggacgaggagcctggcgcgtttgacatcaacacgcttgggttgaccttcaatgaggtcttggcttttggcgatcgctgtcaggccatcgtggcagagctggggctgctgctgaccgggaccagctgggatccacagcaatacgcatcggttcacgaagcccagggcaaggcgatgtggaaaaccctggctggggtttga

SEQ ID NO: 498325 - DNA, 939 bp, Stenotrophomonas maltophilia
atgccgtgccgagagtggagcgagaaccgaacgatcaactgcccagtgggccaggtgggccaggtgttccaacaccgccgtcaccactgcggaaccgacccgagtgtttacgaggcgtgggctgggtccacgacggccggcagttggaccacgaccagcagcacctgcactccgtgccctgctcccgagacccgcaacgtgggatgccctgcaggtcagtttggctcgatcggccagcggcggaccttctcatgcacgggcaccggttcgtgggacgcttggacgcaaaccaacaccacctgcgcggcttgcccagcacctttcccacaagccgaaacccagtgggtcgccgcgagtgccgcttgcccggcaggccaaagtggatcgcacacgtggcaggccgagcagcggcggaccaggatggggtcttacaactgcccggccaccacgtggtcgctgcccagcccgacgttcaccacttggacaaattgggcggagacgggggttcgtcgcaacgaggccaatacatgcacacccaacgcaccacccccgacgtttcccgaatacaccgggcgatcttggcattcgtggggagacggagggcactacggctgggcgatcttctgcaacgctccccggaccctggccgagcttcaagccacctcgttggcatgcacctggcaatacgaaacgaacgacacccccacgtttacgccagagccacctggcgtgacccgcccaacaccggctttggaagcctgtgtctacgcgctgcgcgccaacttaactccgatgccaggttacggcttcgtcaaccacccaggcaccgcggtttggccggcggcttgctcgtgcagcgtcgtgggtccaggcgcgcggttctactggcaatacctgggagcgagcgactgggtgggctttgaattcaaatgcccctga

SEQ ID NO: 498326 - DNA, 393 bp, Stenotrophomonas maltophilia; identical to SEQ ID NO: 323941

SEQ ID NO: 498327 - DNA, 258 bp, Stenotrophomonas maltophilia; identical to SEQ ID NO: 323942

SEQ ID NO: 498328 - DNA, 1311 bp, Stenotrophomonas maltophilia
atgctctccgtcctgaagaaccgtacctaccgtcacctgttcgccgctcaagtgattgcgcttgtcggcacgggcctgatgacggtagcccttggcctgcttgcctacgatctggccggggcgaatgccggcgcggtactcggaacggcacttgccataaaaatgcttgcctatgtcggagtcgccccggtcgcgcaggctttcgccgaccggctgccgcgacggtcgttgctcgttgcccttgacttagtacgagcatccgttgcgctctgcttgccctttgtcagcgaaatctggcaaatctatctgctgatcttcgtcttgcaagcggcgtccgcaggcttcacgccgacctttcaagccactatcccagacatccttccggacgaagacgagtacacgaaagcactgtcgctttcccggctggcctacgatttggaaagcctgatttccccgatgctggccgccgcgctactgacagtcatcagcttccacaacctgtttgccggaacggttctcggcttcctcgtgtcagccgcgctggtggtcagcgtgaggcttcccacaaccgttcccggcccgcgtcgtggcatatgggatcgcactacgcggggcacgcgcatttacctcgccacaccgcgccttcggggtctgctggcgatcagcctcgctgtggcagcagcggggtcaatggtgatcgtgaacacggtggtcatcgtgaaggcacgcttcggcctgggcgaatccgaggtggcgtgggcgctggcggccttcggaggcgggtcgatggttgcggccttcgcgctgcctcgcctgctcgacaagattgctgatcgacctgtcatgattgcgggagcgacgatgctggttgtgggaacggcagccggggcaatgattccgacctatgccgttctggtggtgatctggtttgtggtcggcttcggctacagcgtggcgcaaacaccttccggccggctgttgcgccgctccgctcatcccgaggatcgccctgcggtctttgccgcgcaattcgccctgtcccatgcgtgctggctcatttgctatcccttggccggtcgcttcggcgctgcctttgggctgcaatcgaccttcatcatcatgtcgctgattggtcttgtcggagtgggactggcgctgtggctctggcccgctagagattcttccgacatcgcccacgatcaccctgatctatcgccagatcatcctcacttgcgcgaacatgcagaccgaggcgggcaccgtcatcccatgatcgttgacgatctgcaccgggactgggcgcgcatttaa

SEQ ID NO: 498329 - DNA, 351 bp, Stenotrophomonas maltophilia; identical to SEQ ID NO: 323944

SEQ ID NO: 498330 - DNA, 279 bp, Stenotrophomonas maltophilia; identical to SEQ ID NO: 323945

SEQ ID NO: 498331 - DNA, 465 bp, Stenotrophomonas maltophilia
atgagccaataccgcctcaatctgttcatccagcacgagcacgccaagcgcctggaagaactggccgccaagaacggcgtctcgaagtccagcatcgtcgcggcggcgttggcgtcctggctgtcgccggacgcggacgatcagcgcgaagcggccattgccaagcggctggatcggctgtcgcggcagaccgagcgcctggagcgcgaccagaacatccagatcgaaacgctggcgctgttcgtccgctacttcctgaccgtgagcacgccggttcccgaagcgcatcaggaggcagcacgcgcccagggcaaggcgcgcttcgagcagttcgtcgaacagctcggcaggcacctgctgcgcggccgcagcctcgtgcgcgacgtggtggaagaactgcacccggacaccgcgcggatggatgacgcggcggcgctggccgaagcccaggagcgtgcctcatga

SEQ ID NO: 498332 - DNA, 384 bp, Stenotrophomonas maltophilia
atgacgcagatgaacgctgttgctttccgtttttccgtaaatccggcctcaatccttgcgcgcctgcggcgcctggccgcgccggcacaccacggcctgctgctggccgccgtcatgctgatgacggccggcacggcgaaggccgccggttcctcgatgccgtgggaaggcccgctgcaatccatcctcgattccatccaggggccggtcgcgcgcatcgtcgcggtcatcatcatcatcgctacgggcctggcgctggccttcggcgacacgtcgggcggctttcgcaagctcatccagatcgtgttcgggttgagcatcgcgttcgccgcgtcctcgttcttcctgtcgttcttcagcttctccggcggggcggtcgtatga

SEQ ID NO: 498333 - DNA, 270 bp, Stenotrophomonas maltophilia
atgagcacggccagcgaccttccgggcttcgaggtgccgctgcaccgctcgctgaccgaaccgatcctcatgggcggtgcgccgcgcacggtcgccattgcgaacggcacgctcgccgctgccgtgggcctgggcctgcaactgtggattccggggctggtgctctggctcgtcggccattcgctggcagtgtggggcgcgcgcgttgatccgcagttcatgcaggtcttcgcccggcacatcaagcacaagccgctgctggacgtgtag

SEQ ID NO: 498334 - DNA, 2451 bp, Stenotrophomonas maltophilia
atgctgaaccttgctgaataccgccagcgcccggccttgctcgccgactggctgccgtgggccgggctggtcgcgcccggcgtcgtcttgaacaaggacggcagtttccagcgcacggcacgattccgtggccccgatctggacagcgccacgcaaggcgagctgatcgccgcgtctgcacggctcaacaacgcgcttcgccggctgggttctggctgggccttgttcatcgaggcagagcgccaatccgccgccgactatccgcattccgacttccccgaaccgttgtcctggctcgtcgatgaagaacgccgcgccgcgttcgaggaatcgggccatcacttcgagagcgcctatcacctgacggtggcgttcctgccgccggaggaatcccgcgcccgcgccgccaagctgctctacgagaactcgcccggcgatggcgtggattgggacggccgcctcgatgccttcgtggcggaaaccgatcgcgtgttcgacctgctcgacggcgtgatgccggaaatcgcctggctggacgacagccagacgctgacctacctgcacgcgaccgtctcgacgcggcgctatcgcatcggcgtccccgaagtgcctttccatctggacgcgctgctggccgactccgcgctggtcggtggcctggcgcccatgctgggcgaccagcacctgcgcgtggtgtcggtgcgcggctttccgacctcaacctggccgggcctgctggacgacctcaaccgcctcggctttgcctatcgctggagcacgcgcttcctgtgcatggacaaggccgaggcggaaaaggagctgggccgattgcgccgccagtggttcgccaagcgcaaaaacatcatcgcgctgctgcgcgaaaccatcttccagcaggaaagtccgctggtcgatacagacgccagcaacaaggcggccgacgccgatgccgccttgcaggagcttggcagcgatcaggtcgccttcggctacctgacggcgaccgtcaccgtcatggatgcggacgccgccgtggccaacgagaagctgcgcatggtggagcgcgtcatccagggccggggcttcgtgaccatccctgaaaccttgaacgcggtcgatgcctggctgtcgtccatccccggcaacgcctacgcgaacgtgcgccagcccatcgtctcgacgctgaacctggcgcacatgatgccactgtcggcggtgtgggccgggccggagaagaacgaccacctcgacggcccgccgctgatcgtcacccgcaccgatggcgcgacgccgttccggctggtgacgcacattggcgacgtggggcacacgctggtcgctggccccaccggcatgggcaagtcggtactgctggcgacgctggccttgcagttccgccgctacttcggctcgcggatcttcgccttcgacatgggccgctccatgcgcgccaccatcctcggcctcggcggcgagcactacgacctgggcgccgatggcgacatcgcgttccagccgctcgcccgcatcgaccacgagggctaccgctcctgggccgccgaatgggtggaaggccgcctgctgcatgagggcgtgaccgtcggcccggacgagaaggtggccatctggtcggcgctcggcagcctcgccggtgcgccgcaggaacagcgcacgatgaccgggctttccgtgctgctgcaatcgaacgcgctgcgccaggcgctttcgccctacgtgctcggcggcgcccacggcaagctgctggacgccgaccacgaccggctgggcatggccgacgtgcagggcttcgagatggaagaactgatgcacagcaaggccgccgtcatggccgtgctgcattacctctttgcgcgtttcgatgaacgcttcgacggcgcacccacgctgctgattctcgatgaggcgtggctgttcctcgatgagccgtcctttgccgcccgcatccggcaatggctcaagacgctgcgcaagaagaacgtcagcgtcatcttcgccacgcagtcgctggccgacatcaaggattcgagcatcgcgccagcgatcatcgaaagctgcgcgagcaggattttcttacctaacccgcaggccaccgagccgcagattcgcacgatctacgagggcttcggcctcaacagccggcaaatcgaaatcgtcgccaccgcgcagcccaagcgcgactactactaccaatcgcgcctcggcaatcgcctgttcgacctcgacctggggccggccgcgctcgcgttcgcgggcgcatccacgccgcaagaccaacgcgacatataccgcgtgctgacgcaggccggcgcacccggcttcgccggcgcgtggctgcgccatcgcggccttgattgggccgccgacctgctgccgtccgcaccggcggccgcttcgttcctcaacgcccaaccactggaggtttcaccatga

SEQ ID NO: 498335 - DNA, 2271 bp, Stenotrophomonas maltophilia
atgtccccgacccgtacttcccgtggccgccttccggtcgcgcgccccctcgttgccgctctttccgccctgctgccgctggtagcagccgctcaggaaacccccgccgccaaggatccggttgccctcgatgccctgcaggtgaccgcgcagcgccgcgtcgagaacgccaaggacgtaccggtcgcactgagcgcgatccagggcgagaagctggatgtgctcggctcggccggcgatgacatccgcttcctggccgcgcgcgtgcccagcctcaacatcgagtcgtcctacggccgtgccttcccgcgcttctacatccgcggcctgggcaacaccgatttcgacctcaatgcttcgcagccggtgtcgctggtgtatgacgacgtggtgcaggaaagcccgctgctgaagggcttcccgctgttcgacctggccaacgtggaagtgctgcgtggcccgcagggcacgctgttcggccgcaacaccccggccggcgtggtcaagttcgattcggcgcgaccgtcgcaggatgccgacggctacgtgcgcgtgggctacggcagctacaacagctggaacgtgcagggcgcctacggcggcccgctgaccgaccgctggtcggcacgtgtctcggcgatctaccagcgccgcgatgactgggtcgacaacacccgcgccggtgcccccaacagtggtttcgaaggctatgacgaagccgccggccgcgtgcagttcctgtacgaaggcgacgacttcgaagcgctgttcaacctgcacaagcgcaagctcaacggcaccgcccgcctgttccgcgccaacatcatccagaagggtggcaattcgctggtcgagaacttcgaccgcgacaaggtggccaacgacggcgtcaacttctccgacctggaaacctggggcggcagcgcgcgcctgcagtggaacctcggctcggtgacgttgcattcgatcaccggctacgagaccgccgaatcgctcaaccgtggcgacatcgacggcggctacggtgcggccttcctcggtgccggcaactacggcccgggcctgattccattctcgtcggagtcggccgacggcctgccgcaccaccgccagtggacgcaggaagtgcggatcgagtccaacgagtggggccgcttcgactggcaggccggcgtcttctacttcgatgaagacgtgaccatcaacaacttcaactacgactcgctgaccccgggcaatccacagaccggccacgtggtgcagaaccagcgcaacaaggcgtgggcggtgttcgcttcgggcgacttcgatgtcaccgatcgcttcaagctgcgcgccggcgtgcgctacacccaggacaagaaggacttcagcgccagcgtgctgcaggccgttccgttcggcaccccggtcagcggcccgtacctggccaacaccgacgtcaacgacgtcagctgggatgtcagcggcgtctacaagctgaccgacgacatcaacgcctacgcccgcgtggccaagggtttccgcgcaccgtcgatccagggccgcctagccttcgcgccgggcctgtcgcaggccgactcggagaaggtcctctcgtatgaagccggcatcaaggccgacctgttcgagcgccgcgcgcgcctgggcctgagcgtgttccgctacaacgtcgatggccagcagctgatcgcggtgggtggcagcaacaacaccgccaccctgctcaacgccgacaagaccatcggccagggcgtggaactggacctggaagcctacctggccgacaacgtcctgctgaccttcggcagcagctacaacgacaccgagatcaaggacaaggatctggcggtggcgatctgcggcggtggctgcaccatcaacgacccgaccacggtgatcaacggccagacctatgcgctggtgaacggcaacccgctgccgcaggcgccgaagtggatccacaacgcgaccctgcgcgtgggcttcccgctcagcgatggcagcgagctgtacgcctacaccgattgggcctaccgcagtgcggtgaacttcttcatctacgagtcgccggaattccgcggccgtagttcgctggaaggcggcctgcgcctgggctacaactgggattacggccagtacgacgtggccgtgttcggccgcaacctgaccaaccagacccgcgtggtcggcgcgatcgacttcaacaacctgaccggcttcctcaacgagccgcgtacctggggcgtggagttcaccgcgaagttctga

SEQ ID NO: 498336 - DNA, 288 bp, Stenotrophomonas maltophilia
atggtaatgaagtcacgcactgccaagtcactcggtctgatctcagtccggcgctggcgccggctgccgcctcgcgcgacgccgtttgccttcgctttctacatgtccaccatcatggccctggtgatgtgcacggccattgtcggtaccgccaacgaattcgatgctgaactacccatcaaggtgcttagtgcgtattcgcgagcaatgccaattgccttcgtatctttattagctgtccgtccggtggtcttttggttagtgcgacacacagtaaggcaaagctga

SEQ ID NO: 498337 - DNA, 945 bp, Stenotrophomonas maltophilia
atggaactacgtcatttacgttgttttcttgccgtggccgaagaactccattttgctcgcgcggctgagaaactgcatatcgaacagtcgccgctgtcgcgcgccatcaaagagttggaggaagaactgggcgtggtgctgtttgcacgcaccacgcgcagcacccgactgacgcgcgccggcaagctgtttctgaagcatgtgccacgggtcttcatagcgatacagcaggcacgcgacagcgtgaaggcagcggccaatggtttccacggtcagttgcgtatcgccttatccgacggcattacgccgtcgcgcctgccggctctgttggcgctgtgccggcaggaggaaccggaagtcgaaatccgactgtccgaggtgccgctgtcgcagcagatcaaaggactgcatgacgacttttacgacgtgggcttcgcccagtctgatgaggtcggcgacggcatcgcggcagaagcggtttggagcgatccactgatggtggcagtgccggcacggcatgacttgctcaagtacaagcggattccgctggaggaagtgctgcgctttccgctggtactgtgcgacccgcaggtgtgcgaaggccatgcgcggcaaattgagcgcgtgctgcgccgggtggacatggagccgctagtagctgagcgggtggcttcgtgcgacctgatgatggcgctggtatcggcaggtttcgctctcggctttacaggcgcggcccacatcgccgccagccgggaaccgggcgtggtggcccggcctctggcggggcgctcgccgctgctcaccacctatttgctgcgtccggcaggcgaaccgtcggagacgctggcgcacttcatcgagcgggtgcaggccatcgaatctcccgaagccagcaggcccgtgtcgggccgtcattcccatcgtgcggaggaacccaagccatga

SEQ ID NO: 498338 - DNA, 264 bp, Stenotrophomonas maltophilia
atgaagaagaccatcccgcttctgctggccgtagtcctgacggcctgcggccagtccgaaacacctcaacaggcgaacctgccaaccgtcgaagaactggcatccaacccggagcggcttaaagagctgcgccagcaatgccggcaggaacgcgcgaagctgggcgacgagctatgcaaccgggtcgccgaggccacacgcaagcggttctatggcgatggcacggtgccctatacgccgccggagaatccgcccaagttctga

SEQ ID NO: 498339 - DNA, 795 bp, Stenotrophomonas maltophilia
atgcggcgcatcgcccaggtgcgcggtcgtcatcatccggtgcagcgtcagctcgaacgggcacgctggatcggacaggaaattagccaccccgcgcaaagtcttgtcggtgccggcgtagagcacatgcaggatggcgccgaccagcagcgcgtgactggtcttttcccaatggttcctgcgttcgagcgcgccatcgggatcgaccagaatgtccgccacgttctgcacgtcgcgcacttcatgcgcgccgcgccgaacttccagcagcgggttgtaggcggccgacttcgcatcggtggggttgaacagcaggcaatggctgaaccgcgaacgccagccggccgtgagagtccagttctcgcccttgatgtcgtgaaccactacggacgcgggccagctcaacaaggtgggaaccaccaggccgacgcctttgccgctgcgcgtcggtgcaaaggtcaggacgtgttccggcccttcgtggcgcaggtattggtcgcggtgcaggccgaggaagactccggccggctgggtcagcccagccttgcggatgtcggcggtttcagcccagcgcgccgagccgtaggtcgtgacgaggcgcgactgtcgcgaacgccataccgacatggcgatggcgaccaccacggcaagaagaccgctgccgcccgcaatcgcaccgcctatgtcgaagacatgcggcgcgtaggcatcgaagaagaaccaccattcaaagagccgccaggggtgatataccggcgtgccaaagaagtcgaaccagggcgagccaaggcgtag

SEQ ID NO: 498340 - DNA, 618 bp, Stenotrophomonas maltophilia
atggtgcagaccatcttgcaggacagccactacggccacgacttgccgctgggcgtgcgcctgacggtgcaagaccggctggaaggcatggccccggactggccggaatcgcctgccgccgtggcgctgcgcgaactgcaacaggtagccggtgaagccttgccggaggacggcgccgaactgttcgccgcgctgctggcgaagccgcaagacgaactggtgcggctgctggccgtgtgcgtggcttccacggtggacgtggtgacgcctcgcgccacagcgcaccggcccggcgaggaactggcgcaggccgtgggcctcgacatggccgcatggtggaagccgaccgcagaaggctacttcaagcacgtttccaaagccgtgattctggatgccgtgggcgcgtttgcaccggaatccgtcacccggctggcgaagctcaagaaggccgacattgccagcgaggccgagcggctggccgatggcacgggctggatgcccgccatcttcaaagccacgggcccgcaggatgatgcgcaggaggaaagctcggagcaggaagccccggaggatgccgaagcaatggcggatgaacccgccgaggcgctggccgcttga

SEQ ID NO: 498341 - DNA, 519 bp, Stenotrophomonas maltophilia
atgaccctccagctccgacacgaaaccccggacgacattgccgccatcgaggccgtgaccatcgccgcgttcgctgatgcaccacacaccagccacaccgagcaattcatcgtgcgcgccttgcgtgccgccaacgaactgacgctttccatcgtggccgaagaatatgggcgcgtcgtcggtcacgtcgcgctgtcgccagtaacgatcacccatgagcacgggcgaaagaccgagggctggtatgggttggggccgatctccgtcctgccgccaaggcaggggcaaggcatcggttcgcgcctgatggaacaggcgctgtctgaactgcgggctatgcaggccgcaggctgcgtgctgctgggcgatccaacgtactacacgcgctttggcttccaggcccatgcgggcttgcaactgccgggtgtgctgcccggctatttcatggcgctggccctgcatgggacagtgccggaaggcatcgcgcactacagcgatgccttcaacgccgccgcctga

SEQ ID NO: 498342 - DNA, 315 bp, Stenotrophomonas maltophilia
atggccaacatcggcaccttcaccaccgacaaagacggcttcaccggcacgcttcgcaccctgacgctcaacgtcaaggtcaagctggttcccaacgacaagggcagcagcgagaacgcccccgatttccgcctccaggccgccagccacgacatcggcgcggcgtggaagaagaccagcgaggctgggcgcgagtacctgtccgtgaccctcgatgacccttcgttcccggcagcggtctatgcccgcctgatcgaaggtgaggacggcacgcacgacctgatctggtcgcgcagcaagccccaggcggcgtga

SEQ ID NO: 498343 - DNA, 306 bp, Stenotrophomonas maltophilia
gtggcggctgggaactcattggcgaaggcgttgaagacagtcagaaaggcgcgtggcttgagccaggaagccttttctgacgtgtccagccgcacctatatgagtaccctggagcgcgacctcaaaagcccgactctgaataagctggccgagctgtgcgaggtgatgaagatccatccgctcacgctgctgacgctggcctacgcgggcgacagcccgcgcaaggccgacgagctgctggcgcaggtgcgccaagagctggaggcggtgttgagcgaacgcgacgcggcggagccgcgcgcgtga

SEQ ID NO: 498344 - DNA, 351 bp, Stenotrophomonas maltophilia
atgccccagccattcgccaccgccccggagcgcgcgcaattgctcgccaacggcgaggcccgcgccgctggccgggccatcgacccggtgcccgtggtgcggctgttcaccccggacgcgcacgtgacctggctgctggccgcactcgatcctgccgatggcgacacggcctggggcctcatcgacctggggatcgggatgccggcacagggcaccgtcaagctgtccgagctggccggcatcgttgggccgcgccagcagcccgtgatgcgcgacctctatttccgtcccacgcgcacgctgtcggagtacacccgcgcggccgagcgtgacggcgccatcccggactga

SEQ ID NO: 498345 - DNA, 1257 bp, Stenotrophomonas maltophilia
atgactggcgaaactgcggcggccgttgaaggccgtccctccattctcgataccggcaccgacacccgcatccagcagggcaccccggccttccgccgcaccgcgctggcgctgttcctggccggcttctccaccttcggcctgctgtacacggtgcagccgctgctgcccgagttcagccgtcacttcggcgtgtccgccgccggcagcgcgatgtcgctgtcgttgaccactggcacgctggcggtggcgatgctgctggccggcctgctgtccgacgcggtcggccgtcgcccgttgatgatcgttgcgctgttggcgtcggccatgctgtcgctgtgcaccgcgctggtggacgactggaccacgctgctggtgctgcgcaccctgcttggcctggcgctgagcggcgtgccggcggtagcgatgacctacctggtcgaggaaatggacagccgcgcgctgggcctggcgatgggcctgtacatcggcggcaacgccatcggtggcatgagcgggcgcctgctggccggcatcatcgccgaccattggggctggcgctggggcatcggcgtggtctcgatcatcgccgtggccagcaccgtgctgctgtggctgcagctgccaccgtcgcggcacttccatgcacgtcgcggcggcctgcgccaattgccgtcgcgctggcgcacgctgttcgccgacccgggcctgccgtggctgttcgccacctcgttcgtactgatgggcgtgttcgtcaccctctacaattacctgggctatcacctgctggcgccgccctaccatctcagccagaccgtggtcgggctgatcttcagcgcctatctggtgggtaccttcagttcggcgtggatgggccagcaggccacgcgctacggacgcggccgcatcctgtcgatctcgttcgcgctgatcggcgccggcatcgcgctgctggcgatgccgtggctgagcacgatggcgctgggtatcgcactggtgaccttcggcttcttcggtggtcattccgtggccagcagctgggttggaagccgcgccggcgcgatgcgtgcggaagcctcggcgctgtacctgttcgcctactacctggggtccagcgtgctgggcggtgtgggtggcctggcctatgcagcctgggactggcttggcgtgtgtgcgttcgccgccgtgctgaccctgatcggcggtggcatcgtctgggcgctgcagcagcgcgcgccgcagccggtcacggcgtga

SEQ ID NO: 498346 - DNA, 507 bp, Stenotrophomonas maltophilia
atggcaaccaagaaagctgcgaagaaaaagcccgccgccaagaaggcggtgaagaaggtcgcgaagaaggccgctgccaagaaggcagtgaagaaggtcgcgaagaaggcgaccgccaagaaggcagtgaagaaggctgcgaagaaggtcgccaagaaggccactgcgaagaaggcagtgaagaaggcggcgaagaaggtagccaagaagtctcctgccaagaagaccgcgaagaaggccgtcaagaaggtagccaagaaggccaccaagaagactgccaagaaggcaacggcccgcaagccggccaagaaggtcgcgaagaaggcgactgccaagaaggccgtcaagaagaccgccaagaaggcagtgaagaagaccgcgaagaaggccaccaagaaggctgccccgaagaaggcagcgaagaaggttgccaagcgcaagccggccgcccgcaagaagaaggccgccccggtcgctctgccggcaaccccggcgccgctgatctaa

SEQ ID NO: 498347 - DNA, 207 bp, Stenotrophomonas maltophilia
atgatcatcctccacaacgtagaaggcatgagccggaccttggctgagatgcggaaggagggagttgaactgacgcccgagatcctggccggactgtcgccgtttcggaccagccacatcaaccgcttcggcgactaccatctcgaccttgatagggaagtggcgccgctgagctatacagcgaaagtccttgaacaggccccatag

SEQ ID NO: 498348 - DNA, 294 bp, Stenotrophomonas maltophilia
atgcagaagcgatccgttcaacccggccgaccggccggtgccaccaccttcgatgccgagctggcgcaagccttcggcgcggcggtgcgtgcgctgcggatggaacgcgggattgcgcaggaatcgctggccaacctagctggcatcgagcgttcccatatgggcaaggtcgagcgtggcgagcacatgcccacgctggcgatcatcttcaagatcgccagcgcgcttagttgcagtaccgccgtgctgatggccgcgacggaaagccagctcgcgtccgtgtccgagacgtag

SEQ ID NO: 498349 - DNA, 351 bp, Stenotrophomonas maltophilia
atgacccagccgctcgtcaccgctgaacagcgggcgcaactgctcgccgtcggcgcggcacgcgccgctgaccggggcatcgacccgatgccggcggtgcgactgttcacccctgacgcgcacgccacctggctgctggccgcgctcgacccggccgatggcgatacggcatggggactgatcgacctgggaataggcatgcccggcctgggccatgtgaagctgtccgatctggcgtccatcgttgggccgcaccagcaaccggtgatgcgcgatcgctacttccagccggcgcggccgctgtcggagtacctgcggctggccgaggaaaacggctcgatcaccgactaa

SEQ ID NO: 498350 - DNA, 285 bp, Stenotrophomonas maltophilia
atgcgacccgctcccttgcggcctgccgccgctgctgtcgctgcgcccgtgcagccccaacgctacctgaccaacgacgaagccgccgaatacttgcggctgtcgccgcgcacgctggagaaacagcgcgtgatgggcggcggcccgaagttccgcaagttcggccgccgcgtcatgtacgcggtggccgacctcgatgcctgggccgaccagcgcagctacgaggccacgtccgacccggaatatgccgagcgtcatgcgggcgactaccgtgatggccgctga

SEQ ID NO: 498351 - DNA, 189 bp, Stenotrophomonas maltophilia
atgcccgcgtcgcgcgcctccacgatctgcgaggccgcccaaatcagaacgtcggcatcccatatcgtggcgatgccatgctcggccgtgccttccacgcggatggtgatgttcccgctgcggaagtcgatcggcgcggtgcgccgcgacttcgccaacgagaagaacggaaaggccatcaagtcctga

SEQ ID NO: 498352 - DNA, 147 bp, Stenotrophomonas maltophilia
atgcccagcggcgtgccgctggcgtcggccagctcgcgccattcgttcacccacgaaaagcggtgcaagcgccggccggtggtttcgcggatggaagtcgccacgctggtcgattgcagccggtcgagtgcagctttcaagcgctga

SEQ ID NO: 498353 - DNA, 2421 bp, Stenotrophomonas maltophilia
gtgtcttctttcctgcgatcgatccgtgcacgggggccttggctggccctgctgctgtgcactgccttcctgctgtccgcaccggtgctggcccaggatgaggaccccacgccgaagcagcaactggcggacatcgattccaggctgaaggaggtcgagcgcaagcggggcgatgcagaggccatcgagacactggcgatgctgtccgagaatgcctcgcaggcccggcgcgatgccgaagcgctggagaaggcgttgcagccgcagctggatcggatcagcgaacagctggcgcagctgggcacgcctgcggaaggcaccaccgaaccgccggaactggccgcgcaacgacgcaccatcaccaaacagcgcgacggcctggccgcgtcggtagcgcaggccaaggccagtgccgtgcgtgcccagcagctggcagccgacatcgaccagcagcgcactgcgcaacgcgccgaagacatggggaagaaggtcgcctcgccgttgtctccggcgctgtggagcaaggtggccgagcgcctgccgatcgatatcgcacgcgtcgcgccgttggccgagcaggggcgcgatacgtttgttgctggtgtccgggccaatggctggggcacgccgttgctgggcctgctggccgcgttggtgatgatgttcccgctgcggctgtggctgcgcaggctggggcggcgctttgcggcgtccgagcgtgcgccggacggtcgcctgcgccgctccggcctggccatgtggctgctgctggtcggtacgctgctgcccggctatgccgtggtggtgctgatggcagcgctcgatgcgatcgatgcgatcgcgccgcgcctgcaggtggtggccgacggcctggagacggccaccttccgcgccgccttcattgcggcgctcagcgcgtgcatgctggtacccaagcgtccgtcgtggcggttgctgaatctggatgacaccgccgcactcaagctgcgcaagtacgcgtggggcgcggcggcgctggcctggctgagcacggtgctggtcgccctcgatcaggccacgcgtaccagcgacgtcaccacggtggcgctggacggcctgattgcgctgacctacctcggcctgatcatggccatgctggtgaccctggcacgcctgcatcgccggcagaccgccgaggccgaggccaagctggaggcacaggccgatggcgtgggcgcggccacgccggtgcgtcgcagcagctggctggtactggcccgggtagcgggcaacatcgcggtggtggcggccatcattgccacattgctgggctacctgaacttcgccaagttcgtgaaccagcagctgatcggcggcagcatcgtggtgctggccgcgaccctgctgttcaagttcgtcgatgacctgagcacctggatgctcaacgccgacagcaaggttggccagaccatcctgctcagcaccggcctgagcgtatcgcggctggagcaggccggcgtgctgctgtcggcggcgctgcgtaccgtggtcgtgctgctcacgctgcttgccctggtggcgccgttcggcaacatcggcgcggtggtggagcgcttcacttcactgttcacgaccggattcgatatcggtggcaccaagctggcaccggcggggatcgtgttggcggtactggcgctgctggccggcctggcgatcacccagctggtgcagcgctggctgaccgacacctacctgcccaagaccgaactggatctgggcgcacgcaattcggtcagtacggttgcccgttacgtgggcatcatcatcgcggtgatctgggcgctgagcgcgatgggcctgcagctgagcaagctggcgttgctggtcagtgcgctgtcagtgggtatcggttttggcctgcaggtgatcacccagaacttcgtctccggcctgatcctgctggccgagcgcccggtgaagatcggcgactgggtgaagctgggcgaccaggagggcgacatccgccgcatcagcctgcgttcgaccgagatccaggtgggcgacaagtcgacgctgatcgtgcccaactccgagctggtcaccaaaaccgtgcgcaacatgacgatgggcaacaaccagggccgcatccagatccagttcgcggtgccgcccagcaccgatgtcggcaacctgcggcaggcgttgctggatgcgtacaccgcgcataccaacgtgctgaagcagccggcgccgacggtctacatcgacagcattgccggtggccagatcaccatcaacagcttcgcgtacgtggccagcccgcggcaggtctacgccacccgcagcgatctgtacttcagcctgctgcagatactggccgagcggaacattccgctgtcgaccccgaccgatatccacatcacccgcgatccgcaggagtag

SEQ ID NO: 498354 - DNA, 549 bp, Stenotrophomonas maltophilia
atgaacgcatccctcgcgaccgccgcgaacgcggccacggctacgccgccgcattcgcttccaacactcgccggccgacccggcaacgtgccgctgacccgcgtatcgctcgcctacatcgagccgcgcttcaagctctatctgcgcttcggcgaacctgcgcgcacgctgcggctcgaccactggcggcgctgcgcggtgttcctgccgggcgcgatgttctgccgcatccgctgggaagcaaacgactacggcacgatccgctggcagctcatggtgatgcaggccggcacgccgctggacgacgtgcagcgcatccccggcgtgcggcccggcgcacgcttgctgctgcacgccgaaggcgagaacgctgtgcgtgccgtgctggaacgcatcgacggcatcgacgacgcgcaaggcatcgccgccatcgacgtgtcgcccgcgtactggcgcacgctgggcaaccgtctggcggcccgcctggcgctgcccgaatacaccgccgagcggcacgccgcctggctggccgggagggcgctgccatga

SEQ ID NO: 498355 - DNA, 600 bp, Stenotrophomonas maltophilia
atgaccgctgattccagcatcgcacgcacgcccgaagccgcgccgcttcctcgctcgcgcctgcgcgctcgcatcgtgctggcgggcttcgccgccgtcggcctcgctgcgctggcctgggcggcttttgtgtcgccgctgccgcgtctgacttacaacccgtccgacagcgtggcggtcggctggtatcgcatcgaaccgttcgacccgcgcaccgcctcgctaccacgtccgttgtccgtggacagcatcgtgctggtgccgctgcccgacagggccgccacgctgcctgcgaagcgcggctacctgccgacgcgcgtgccgctgctcaaacgtgtgggcgcagtcgcgccgcaacacgtctgcatcgtcgccgggcaggtacgcatcgacggcgtgcctgcggccgccgcgctgcctgccgaccggctgggccggccgctgccatccttgcagctttgccgccgcctcgaaccgggcgagctgttcctgttgagcgtgaccaatccggcgtcgttcgacagccgctatttcggcccggtcagcgcatccgccgtgatcggcgtcgcgcatccggtctggctggagacacgcccatga

SEQ ID NO: 498356 - DNA, 414 bp, Stenotrophomonas maltophilia; identical to SEQ ID NO: 494223

SEQ ID NO: 498357 - DNA, 1530 bp, Stenotrophomonas maltophilia
atggccggtgcggcgatggccgcattgggtggtgcggatgcgctgaacggcgcggtgagtgctgccggtgcggagaaggccaagatcgcgatctcggaattcctcgagaacaacaagggcagcctgagctgggaggactaccagtcgctgatggaaatcggcagcgcgatggtgggtggggccctggggggaagtacgggcgccaacattgccgtcaccggggatcggttcaatcggcagctgcatccggatgaggtgaagtggatccgcttccatgcagaggaattcgcccgcgagcagaagatctcgaaggaagaggcctatcgcatccttcttgtggaagcggctgcgtacgttgactcgaaaatacagtccgacctgagtggagtagaaaacaacactgacgcaattgatttcctgcgcaagaaccagaacaagtacgactggggtaccgcgttcgacagcagcgatcgggacaacttctctaagttcagcgaagagcttgggcgcgaaaccggctatttcaaagacgtctacactgccatctcgggaactgcttacgccgccggatcaaccaaggactggcgctttgagttccaggagccactgcgctactacggcgacgcctcgcgctctcagaagggcgttgccatggtccaggctggcgcagccgctcttggcatcggtgcggcggcggccgttgaattcggtggctggtgcatcatcaatccatacagctgtggcagggctgccagcggggcgatcgatgcggtgatgggtgactacgtgggtggtcactcgcttgcaccagtgctgccagcgttggttgcggcaaaggccgctaccactgcggaacaaacgcttcgactgtcgagcggcgcggtgggtgctgagatcgcggggaatgctgcaaagaagggggggctgcaatccgagcaggtgctgaagccgatgcaggctgccggtgcggatgtggcagaggcaggcgcgaaggccggggcaagcgaacaatcttctctggcaaatctgaatcgtctgagtccgcaggaagaggctgagctactaaagcgacaactgatccaggccgagcggcatgatccatggatcggtacaacgcttccgggggccgaggcgccagtgacggttacggcagaagcaaccgtcggcgggcgaatgctcaaagacaccaatcagaccgcccgacctaccaagctcgctgatgcagaccacccgacgctggtggccgatctccttccgcctggtgcgccaaattccagtatgaagtccgctcatgcggaaattgcggtcatccagcgagcctatgagcaaggacttacaaatgcgcagaaaatgctcattgtggttcgcggtgagggagtttgcagctactgtcaacggagtgacaatttgatcgcagctgcgcaacgctctggtcttagtaagctcgaaataattgacgttgagaggaatacgaagatggtgtggaatagaggtgagaaatccttcttcgaggtgactttgcatgaataa

SEQ ID NO: 498358 - DNA, 705 bp, Stenotrophomonas maltophilia
atgcgattcaaacgaccgcaggtgcgctacgccgacacgccgcagcctgccacgccgtaccaagctgccggccaagtatgggacgagcgtatcggctcgtcccgtgtgcaggcgaagaactggcgcttcatggctttcggttgcctgacgttggcgctgctgatggccggtggtctggtctggcgctcggcgcagtccatcgtcacgccctatgtcgtggaagtggatagcgcgggccaggtgcgcgctgtcggcgaagccgccacgccgtaccggcccagcgatgcgcagacggcgcaccacatcgcgcgcttcgtcacgctggtgcgctcgctgtccatcgacccgatcgtggtgcggcagaactggctggacgcctacgactacacgaccgacaagggcgcggccatgctcaacgactacgcgcgcgtgaacgatccgttcgcgcgcatcggcaaggagtctgtgacggtgcaaatcaccagcgtcgtgcgcgccagcgacacgtcgttcaacgtgcgctggacggaacgccgctacgtcaatggcaccgcggccggcctggagcggtggacggccgtagtgtccgtcgtgctccagtcgccgcgtaccgaagaacgcctacgcaagaaccccctgggcatctacgtcaacggcctgtcgtggagccgcgaactggattcttccgaaggagcaaaaccatga

SEQ ID NO: 498359 - DNA, 1173 bp, Stenotrophomonas maltophilia
gtgctctacgtcggtgccttcgcctacatcatcaataacttcaactggctggccagcatcgtgttccgctcgtttgcgggattgggcatcaccgccaccggctcggccatcacgatggagaacttcttgcagccgggccggctggcgaaaaccggcatcgacgctggcgcgccgattctggagcagatcggcgacatggcaggctttcccgaggtattcgtgaacctcgatcccatcgtggtgatgttccttgcctggctggtcgtggtcttgtgtttcttcgtgctggcgatccagcttttcatcacgctgatcgagttcaagttgaccacgctggcgggcttcgtgctagtgccgttcgcgctctggaacaagaccgcgttcctggccgagaaggtgctgggcaacgtcgtgtccgccggcatcaaggtgctggtgctggccgtgatcgtgggtatcggctcgggcctgttcgcggagtttcaggtgcatcccgccgagccgtcgatcgaccacgcgctggtcatcatgctggcctcgctcaccttgctggcgctgggcatcttcggccccggcatcgccaccggcctcgtttccggtgcgccgcagcttggcgcgggcgcgatggcgggtgctgctgtcgccgcaaccgggatagccgttgccgttggcgctgccgcgactggcgtgggtggcgcggtcatggccggagcgcgcatggcgccagccgctgccaagctcgctggcagcggcgcacgtgcggtcgcatcgacggccagcagcgcacgatcggcgttccaggtgggttccgctgccgcaggcggtggcgcaaagggcgctgccgctgggttgggcaacgtcgccaagactggcgcgcaggccgccgggcgtggtgctgcatcccgtgcttccgctgccgggcaacgcatggcggctcccttccgcgctggctggaacggcccggaggctggcagcggcgtgggtacggcatccgcaggcgaggccgcttccagcgccgccaacgctcagaaacaagaacagcccgcctgggccaagcgcctgcatcgccgccagcaactcacccatgccgcgaccaccaccgcccacacgctgcgcggtggcgatggcggcggctccggccaggggccgagtctgcgcggctccgacgattaa

SEQ ID NO: 498360 - DNA, 1476 bp, Stenotrophomonas maltophilia
atggaagccgacctggggacgcggctggattgggtggcggtcgatcactggaacaccgacaacccgcacacccacctgatcgtgcgcggacgcgacgacaccggcaaggacctcatcatcgcgggcgactacatcgcccacggtttccgccatcgcgccgccgagctggcgacggaatggctggggccgcgcaccgaactggagatccagcagatcttgcaacgtgaggtggaacaggagcggtggacgagcctcgaccgtaccctgcaacgcgaggtcgacgaggatggcctggtgcagatcgaacgctttaaccaaccccggctgcaacgccagcgcctgctgctgatcggccgcctgcaacgcttgcagcgcctgggcctggccgacgagacgcagcccggcacctgggccgtccatgcggacgcggagaagaccttgcgcgccctgggcgagcgtggcgacattatccgaacgatgcagcgtgccatgagcggccagccgcgcgagctggcggtgttcgagccgggcgacgacggccgcaccatcgtcggccgcgtgtctgccaaggggctggccgacgaactgcatgaccgcggctatctggtcatcgacggcgtggacggcaaggcccactacgtcgcgttgaacgcccgcgacgagctggcgaactatcccaccggagccgtggtggaggtacgcggttccgccgaggtgcgggcggccgacaagaacatcgccgcgctggcgagcgatggcctgtaccgcaccgatcaccacttggcgatcgagcaaggccgggccaagctcggccgcgacccgcaggaagtcgtcgcgacccacgtccgccggctggaagccctgcgccgggccggcattgtggaacgtgtggcggacggactatggaaggtgccggacgatctggcggagcgtggccgccagtacgacgcccagcgcctgggcggcgtggcggtggagctaaaatcgcacctgtccatcgagcggcaggcccgcgtgatcggcgcgacctggctggatcagcagttgatcgggggcggcaaggggctgggcgacttgggcttcggtggcgacaccaagcaagccttgcagcagcgtgccgatttcctcgaagaacaggggctggcccagcggcgcgggcagcgcgtgatcctggcgcgcaacctgctaggcacgctgcgcaaccgggagctggcgcaggtcgccaaggacattgccgccgaaactggcctggagcatcgcctggcggcggacgggcagcgggtcaccggtatctaccggcgctcggtcatgctggcgagcgggcgctacgccatgcttgatgacggcatgggattcagcttggtgccgtggcggccggtgatcgagcagcggctgggacagcagcttatcgcgacagtgcgcggcagtggcgtgtcgtgggaaataggtcggcaacggggcccgtcgccgggttga

SEQ ID NO: 498361 - DNA, 171 bp, Stenotrophomonas maltophilia
atgcacaaaggggtggctttgatgctcggcacagccaccgatgcccactttgatgagctgaacatggtcagcctgctgacgatgagcgccatgatcggcccggtgcaggccctgaagaggatgcgtctgttgaatccacacaggctttgcgcgcacatctatgcaggatga

SEQ ID NO: 498362 - DNA, 1098 bp, Stenotrophomonas maltophilia
gtgttccgctcgttcgcgggcctgggcctgacggccagcggctcgaccttgagcatggagaacttcctgcatccgggaaggctggccaagatcggcatcgacgccggggcgccgatcctcgaccagatcggcgacatggcgggctttcccgaggtgttcgtgaacatcacgcccatcgtcgtgatgttcctcgcgtggctgatcgtcctgctgtgcttcttcgtgttggcgatccagcttttcatcacgctgatcgagtttaaattgacgacgctcgcgggcttcgtgctggtgccgttcgccctctggaacaagaccgcgttcctcgccgaaaaggtgctgggcaacgtggtgtcgtcgggcatcaaggtgctggtgctggccgtcatcgtgggcatcggctcgggcttgttcgccgagtttcaggtgcaaccggccgagccgtccatcgaccattcggtcgtcgtgatgctggcctcgctgacgctgctggcgctgggcatcttcgggccaggcatagcgaccgggctggtgtcgggcggcccgcagctcggagcgggcgcgatggccggtgccgcgctgggcgcggcgggcgctgccgttgccgtgggcgctgctgccacgggcgtcgggggcgctgtcgctgccggcgcacgcatggccccggctgccgccaagctggccggcagtggtgcgcgtgccgccgccggggtcgccggcagcgcgaagtcggcgttccaggccggctccgcttccgctggcggcggcctcaagggcgctgccgccggtgtgggcaatgtcgccaagaccggcgcgcaggcggccgggcagaaggtggcgcaaggcgcgcgctcgatccgcgaacgtgctgccgcagcgttcagcgcagacgcgcccgcgtccgcatccacagcggggagcggtgcccccagcggcgacgcgccgccgtccacgccgcaggagcagcccgcctgggcgaagcgcctgcaccgacgccagcagctcacccatgccgccacaactgccgcccacacgctgcgcggtggcgatggcggcggctccggccaggggccgagcctgcgcgattctgattcataa

SEQ ID NO: 498363 - DNA, 705 bp, Stenotrophomonas maltophilia
atgcgattcaagaagccgcaggtgcgctacgccgacacgccgcagcctgccacgccgtatcaagctgccggccaggtgtgggacgaccgtatcggctcgccgcgcgtgcaggcgaagaactggcggctgatggccttcgggtgcctcacgctcgcgctgctgatggccggcggcctggtgtggcgctcggcgcagtccatcgtgacgccctacgtggtggaagtggacaacgcgggccaggtgcgcgccgtcggcgaagccgccacgccgtaccggcccagcgatgcccaggtggcctatcacctgggccgcttcatcgagctggtgcgctcgctgtccatcgaccccatcgtcgtgcgccagaactggctcgacgcctacgactacaccaccgacaagggcgccgtggtgctcaacgactacgcgcgcaccaacgacccgttcgcgcgcatcggcaaggagtcggtgacggtgcagatcaccagcgtgacacgcgccagcgacacgtctttcaacgtgcgctggacggaacggcgcttcgtcaacggcgccgcggcgggcactgaacgctggaacgccgtgatttccatcgtgcagcagaccccgcgtaccgaacagcgcctgcgcaagaaccccctgggcatctacgtcaacggtctgtcgtggagccgcgaactggattcttccgaaggagccaagccatga

SEQ ID NO: 498364 - DNA, 1278 bp, Stenotrophomonas maltophilia
atgcatgtgcgattggcggccttggccgcatggctgctgctgactgcggcgacaacgccggcggcagcggccgaactgatgaccttggacgacgcgttcgcgcgcgtggcccaaacccaccccgagctgcgcttggtcgatgcgcgggccaccgtgctcgctgccgagcgcgaccaggcggtgcagcgcccaccgtggacgctcggtgccgaggtcgaaaatgcgttgggcactggcgcggcccgcggtctggacagcgccgagttgaccttgagcctgagctcggtgctggagcgcggcggcaagctcgacgcccggcgcaccttggcccaaagccggattgatgcactggccgtgcagcgcgagaccgggcggctggacttgctcgccgagacggcgcagcgctatttggccgttgtcggtgccgaccggcaacacagcctggcggacatggatgttggccagcgccagcgaaccgtggccgctgcccggcaacgcctgcaggccggcgcttcacccgaatcggtgctgctcaccgcgcaggcagcgctggcgcgggccgagctgacgcgtgatcgggccgagcaacagcgattggccgcccgtcagcatctggccgcgctgtggggcgaacgtactcccaccttcgaggtggctccggccgatccgatggccctgccggcgatcgcctccatgcagacgctggccgatgagctggagcggactccggaactggcgcagtttgccgacgcccgacggatcgcgcaggcacgactgcagctggcacgttcagcggcctcaccggacctgtcctggcagctcggcgtgcgccgcctgcaggagaccgacgacactgcactggtcgctagcatgtccataccgctgggcagccgcagccgcgcacagccagagatccgcgccggcgaagccgagctggaggtcctgacgatcgagcgcgaggccaagggcctgtcgctgtactccacgctggtcgaggcccatggccgctacaccgtggcgcaggccgaggtggcgcggctgcaaggagacgtactgccgaagttggcccgggccgagcaggctgccgagcgggcctatcgcgccggcgcgatcagctatctggaatgggcacagttgcaatccgaacgcacggccatggcccagcagcagcttgacgtcgccttggatgcgcagcgcgccctgatcgaaattcaacgactgaccggccaggcgcttgtcacgccgccggcggccgcttccaccggagagaccccatga

SEQ ID NO: 498365 - DNA, 357 bp, Stenotrophomonas maltophilia
atgaccgcccgtggccggctgcggacgggcctacgctggctgctgctggcgcagctggcgatgggtttgctagtccagccggtcttgggtctggcgagcgaactgcacgttcacatccatccgaccattgccgcccatgggccggcagtggtcgcaccagcacctgagcgtggcatcggcgccgccttgcaccggcttcaccagctggcgctgtgctgcagccaagccgcacagccccctgagatcctgctgtccgttgcggacatcggccggcatttgtcggtgatgcacgtcaacacggtcccgtatccgcacgagcagccggtcgcgccgttccggcctccgatcgcagggtga

SEQ ID NO: 498366 - DNA, 372 bp, Stenotrophomonas maltophilia
gtgctgcttgtgctgggtgtgggcgtgttggccgaggtcggccgccgcgtaatgttcggtgccgagccggtcagcggctggatgattggcaccgccctgctgtcgctggtggtcaacgtgacggtgctgcgcatgctggcgccgctgaagtccggcgaggtgcacctgcgggcgacctggttgttcacccgcgccgatgtggtggccaatgttggggtgatcctggccggcctgttggtgtggtggttggctagcccgtacccggatttcgtgatcggcgccctgatcggtctgtatgtgatcaaggaagccttcgagatcctgggtgatgcccgccgggcacgtgccgacgcgcgcaagacccctgcatga

SEQ ID NO: 498367 - DNA, 1149 bp, Stenotrophomonas maltophilia
gtggaagcggctgcgtacgttgactcgaaaatacagtccgactggagtggagtagaaaacaacactgacgcaattgatttcctgcgcaagaaccagaacaagtacgactggggtaccgcgttcgacagcagcgatcgggacaacttctctaagttcagcgaagagcttgggcgcgaaaccggctatttcaaagacgtctacactgccatctcgggaactgcttacgccgccggatcaaccaaggactggcgctttgagttccaggagccactgcgctactacggcgacgcctcgcgctcccagaagggcgttgccatggtccgggctggcgcagctgctcttggcatcggtgcggcggcggccgttgaattcggtggctggtgcatcttcaatccgtacagttgcaccaaggccatcagcggagcagccgatgcggtgatgggtgactacgtgggtggtcattcgcttgcacctgtgctgccggccctggtggtggcaaaggctgctaccactgcggaagacacgcttcgattgtcgagcagcgcggcaggtgctgagatcgcagggaatgctgcaaagaaggggtggctgcaatccgagcagatcctgaagtctgtgcagaactcatcgacagaaacggcaggccaggctgcaaatggggctctgactgctgggcgtgagctgacacctttgttcaaagatgttgaaacaggtctaaactcgataaatcctgtccgctccaataatcgaggtggaattttggagcttggtttggatccggataaggggaaaattgcagtgcatgaaggtcaggcggccgtccagttagagaattccctgggagggactctgaagaggacagacccggtgcagggcagtaaaaatcccgacttcgtatttgtcagtgggccctatgcggggaagaccgtggatttcatgtggacagacggtacaaagtctactcaaataaataaattcttctccaataattctgcgcagaatcagcggcagctgatagatcatgtaaacaaggcggatatggttcctctggattacaggaatcttgctcctgaaaatcaggctttggtaaactcttggataaaaatgctcactccggagcagcagggtaaaattattattttgaggtaa

SEQ ID NO: 498368 - DNA, 261 bp, Stenotrophomonas maltophilia
atggccgcattgggtggtgcggacgcgctgaacggcgcggtgagtgctgctggtgcggagaaggccaagatcgcgatctcggaattcctcgagaacaacaagggcagcctgagctgggaggactaccagtcgctgatggaaatcggcagcgcgatggttggtggtgctctgggtggaagcacgggcgccaacattgccgttttcttgtggaagcggctgcgtacgttgactcgaaaatacagtccgactggagtggagtag

SEQ ID NO: 498369 - DNA, 1278 bp, Stenotrophomonas maltophilia
atgcatgtgcgattggcggccctggccgcgtggctactgttgagcgcggcggcaacgccggcgacagcagaagagctgatgaccttggacgacgcgtttgcacgcgtggcccaaacccaccccgagctgcgcctggtcgatgcgcgagccacggtgctcgctgccgagcgcgaccaggccgtgcagcggccaccgtggacgttgggggcggaggttgaaaatgcgctgggcacgggcgcggcccgtggcctggacagcgcggagttgaccttgagcctgagctcggtcctggagcgcggcggcaagctcgacgcccgccgcaccttggcccaaagccggattgatgcactggccgtgcagcgcgagaccaggcggctggacctgctcgccgagacggcgcagcgctatttggccgttgtcggtgccgaccggcaacgcagcctgacgaacatggatgtcggccagcgccagcggaccgtcgccgctgcccggcagcgcctgcaggctggcgcgtctcccgaatcggtgatgctcaccgcacaagcagcactggcgagagcagagttgacccgtgatcgggccgagcagcagcgcattgccgcccggcagcaccttgctgccctctggggcgaacgtgctccgagcttcgaggtggccgcggcggatcccatgaccctgccggcgatcgcgtccatgcagtcgctggccgaggaattggagcgcactcccgagttggcgcagtttgccgatgcccgccggatcgcgcaggcacgactgcagctggcgcgttcggcggcctcgccggacttgtcgtggcagctgggcgtgcgccgcctgcaggagactgacgacaccgcgctggtggccagcctgtccatgccactgggcagccgcagccgcgcgcagccggagatccgcgccggcgaagccgagctggaggttctgacgatcgagcgcgaggccaagggcctgtcgctgtattccacgctggtcgaagcccatggtcgctacaccgtggcgcaggccgaggtggcacggctgcaaggcgaggtgctgccgaagttggcccgggctgagaaggccgccgagcgcgcctatcgcgccggcgcgatcagctacctggaatgggcacagctgcagtccgaacgcacggccatggcccagcagcagctggacgtggcgctcgatgcgcagcgcgccctgatcgaaattcaacgcctgaccggccaagcgcttgtcgcgccgccggcggctgcttccaccggagagaccccatga

SEQ ID NO: 498370 - DNA, 372 bp, Stenotrophomonas maltophilia
gtgctgctggtgctgggcgtaggcgtgctggtcgaagtcggccgccgggtgatgtacggcgccgagccggtcagcggttggatgatcggtaccgctctggtctcgctggccgtgaacctgaaggtgctccgtatgctcgcccccttgaagtctggcgaagtgcatctgcgagcgacctggctgtttacccgcgccgatgtggtggccaacgttggggtgattctggccggcctgttggtgtggtggctggccagcccctacccggatttcgtgatcggcgccctgatcggcctgtatgtgatcaaggaggctttcgagatcttgggtgatgctcgccgggcgcgtgccgacgcgcgcaaaacgcctgcatga

SEQ ID NO: 498371 - DNA, 246 bp, Stenotrophomonas maltophilia
atgagcacgggtaagaagctgcggctcgggccgctgccgaaactggaatccaccaagatgaccttcgcgtgcccggccggcctgcgggccgatcttgaccgctacgcggcgctgcacgcgcagacctacggcgaagcggtcgatgccatgacgttgatcccgcacatgctggaggcattcatggcgggggatcggggattcaggaagggcactgcaacacggagcgtgccgtcgaagccgacatga

SEQ ID NO: 498372 - DNA, 1143 bp, Stenotrophomonas maltophilia
atgctcatgggtggcctatcggtcgccgtgctgggcgcgaccatctggtcattgcagccgcagcggcgcggcgggagcgagcagaccgagctttacaacgtcgatcgcgtctcgaagtccgaagggctggacggcctgccggccgactactcgaagctgccgccgaaggtgccggagctggggccgccgctgccgggcgaccttggcccggccatcgtgaactcgcagcagcccgtgacgccgacctatgcgccgcctgggcataaccccgaggacgccttgcgcaaagaggcggacgcggcggcggcctcggcggtgttcttccgctcgggccagcagggcaaggccgcagcgcctgccacagcccaagccgctgcggctgtgccgggcagcgccttcgacccgctggcggccgggccggcctcgacggcggcacagcctgccgatccgaccgccacgcagaaccggcaagaccagaaggaggcgttcttgaaaggcggttctacggaaactcgcaattccggcaatctgcaaatgccggcctcgccatatcaggtcatggccggaacagtgatcgccggggcgctggtgacgggcatcaagtcggacttgccgggcgacgtgatcgccacggtgacggagccggtctatgactcggcgacgggcaagttcctgctgatcccgcaggggtcgcgcatcctcggcaaatacaacagccaggtcagctacgggcagagccgcgtgcaggtggtatggaaccggatcatcctgcccgacacgtcttcgctgaccatcgacaaccttgtgggcaccgatccggcgggctattccggccttgaagatggcgtggactaccactggggccgcatcgtcgctggcgcggcgctgacgacgctgctgggcgtgggcgcggaactggctgcgccggagaaccggcaggacggcaaccgcatcgtgatcgcggggcgcgacagcgcgcaggacagtatcaatcaggtcggacaggagatgacccggcgcaatatgaacatccagccgacgttgacagagcggcctgggctgccggtgcggatcatcgtcaaccgcgacttggtgctgcggccttatcagccgatgttcttcaacaggggagcgatgcgatga

SEQ ID NO: 498373 - DNA, 630 bp, Stenotrophomonas maltophilia
atggtgacgcaaacccgcgtgcgccacgacgaccgccgcgactacaccaagcacatgatccggctgcgccacgccagccagatcaacggccgcgaggccaacgaaatcatcctgctgaactcccatgacggcaccagcagctatcagatgctggccgggatgttccgcttcgtttgcagcaatggccttgtctgcggcgacaccgtggccgacgtgcgtgtgccgcacaagggcgacgtagctgggcacgtcatcgaaggcgcttacgaagtcctgcacggcttcgaccgggcgcaggaatcgcgcgatgccatgcgcgccatcacgctcgacgccggggaatcggaagtgttcgcccgcgctgcgctggcgttgaagtacgacgaggacaagcccgcgcccatcacggaatcgcaaatcctgatgccgcgccgccatgacgacgaccgccgcgacctgtggagcgtgttcaaccgcacgcaggagaacttgaccaaaggcggcctgtccgcccgcgccgcgaatggccgccgtcagaccacccggcccgtgcagggtatcgaccaaagcgtgcgcctgaatcgcgccctgtggctgctggccgatggcctgcgccagttgaaagcctga

SEQ ID NO: 498374 - DNA, 1164 bp, Stenotrophomonas maltophilia
ttgcagcgaggcaatgcggcgggcttcgcgggcggtcggttcgcggcgctggcgcggcgcgttctggaatgcctgccgctcggcgtagctcatgtgcggcacggcttccacccacgaccaaccctcggcgcgcacgttcccggccagcgcatccagcttgccgcgcaccagcgtttccagcagcgcggcgtcggtcaggtaggttccggcatcgccttccgcgaacaggtcgcggcggatgccgccgcccgccgccgtgtaggcgtccagcccggcgaagcgcaccagcggatgcgtggcgtcgatttcgcgttcggtcaggcgttcgcgcagcgcggatgcgccgcgctgccattccggcgcaccgtagaacgcggcttcctgtgcggggtggtcgtcggtgatggtcagggccatcaactgttccagcgtcacgccaccggcgcgatagtcggccatgaggcgcggcgagacgttcgccagcttcaagcggcgctgcaccaccagcggggacacgccgaagtcggcggcaatgtcctcgatgggtcggccttctttgacaagtgcggcgaaggctgcgaactggtcggcggggtgcatgttctcgcgctgcacgttctccgcaaggctgacggtgcgggcggacgcatcggccaccagcaggcacggcacttcgtagtcggtggcgatgcgtttcttcttcgccagcagcttcaaggcggtcaggcggcggtcgcctgcgacgacttcgtattgctcgccatcggcggcgaggatgacgatcaggttttgcagcaggccgatgcgggcaatgctcgcggccagttcgggaatggactggcgcggggtcgtgcggacgttgcgcttggaacggcgcggcagcaactgcgacagcggaaccaagatcaggttcttggtcgggtcggccacttccagtggcgcggcggcttcgatggcgatggcttcggttttgagtacggcgttcatggtgataactccttgcggttcagggatgcagcagcgaaggaagcggcaagggctgctgcctgcccctgccgcgtggggattcaggctttcaactggcgcaggccatcggccagcagccacagggcgcgattcaggcgcacgctttggtcgataccctgcacgggccgggtggtctga

SEQ ID NO: 498375 - DNA, 927 bp, Stenotrophomonas maltophilia
atgttcttcgcattcggccaacaaggtcgacacttccgcttccagactgttatcgatggcatccacgcgctgactatcgctgccgtcgagctgataggcctgcaggatttccttgagctggccgatcaggaagtcggcccgcttggcatgttcgagctggtaggccagcagcttttgctgggccgtgttctccagcccgcgcacctgcttgatgaacagctcggctgcgtcatccagcgtcttggcatgctgggcgcgaatgaagatggtggccaacgcatagcgcttgtccggagccaattcggccaactcgctggcgtcgtacgcacgagccattgcacggaattgcttgagcttgggcaccggcacatcgatgggaggcagttgctcggccaactgctgcagcatgcggatgtgctgcagatagaaccggacctccttgttggtcgggcggccaggctcgcgcttgagcgagtgccagccggtgaacctggacccttccggtgcgcgcagcagttcatcaatgagcgtgcgcgtggcaggcgtcagtgcatggctgatgctgcggtagtaccccaaattgacccgctcgcgggcaccgatggcggccagctccagggtgcggaagccaggcagttcgtagcgatggtgcaccagctcttcaagcaggacgttcacgatgtctgggatggtgtgcttggtctgggctgcggcggtggccaccgtatccagccaagccagccccgacttgtccaagggacgtaccccaatgaacttccgaagttgtggcatatgccggcgcttgctgccggagacgtcatagcgttcgagctggtcggaggccagcacccggccgagacgtgcggccttggcgatgtgctgccggatccgctcaggcacctccgccaacagcgtgaagtagcctaa

SEQ ID NO: 498376 - DNA, 273 bp, Stenotrophomonas maltophilia
atgagtgccacggacaccttcgcggccgggttcgaggtgcctttgcaccgctcactcacggagccgatcctgctgggcggggcgccgcgcaccgtggcgattgccaacggcacgctggctgccgctgtcgggctgggcctgcaactgtggattccgggcgtggtgctctggatcgtcggccattcgctggcggtgtggggagcgcgcgtcgatccgcagttcatggctgtgttcgcccggcacatcaagcaccgcccgctgctggacgtgtga

SEQ ID NO: 498377 - DNA, 393 bp, Stenotrophomonas maltophilia
atgacgcagacgaccgttcctgctttccgtgtttccgtaaatccgccttcgcacccgtccaacctggcgcggttgcgcagcctggcccgccctgcggagcaagggctgctgctggccgcgctgctgctgttcctggccggaaccgcgcaggccgccggttcctcgatgccgtgggaaggcccgctgcaatccatcctcgaatccatccaggggccggtggcgcgcatcgtcgcggtcatcatcatcatcgccaccggcctcgcgctcgccttcggcgacacatcgggcggattccgcaagctgatccagatcgtgttcggtctgaccatcgcattcgcggcttcgagcttcttcctgtcgttcttcagcttctccggcggggccgtcgtatga

SEQ ID NO: 498378 - DNA, 273 bp, Stenotrophomonas maltophilia; identical to SEQ ID NO: 351380

SEQ ID NO: 498379 - DNA, 384 bp, Stenotrophomonas maltophilia; identical to SEQ ID NO: 132310

SEQ ID NO: 498380 - DNA, 1107 bp, Stenotrophomonas maltophilia
atgcctcacactccctccgcctacgaccacgacgtcgtcatcgtcggcgccagcttcgccggtgccgcctgcgcactggctgccgcccagtacggtctgcgcgtctgcatgcttgaacgcaaggccgaccccggcgagcgcctgcacaccaccggcatcgtggtgaaagaagcgatggagcagacctggttggggcgcatgcccgagcatctggtgcagcgcgtcgccaacgtgcgcctgtatgcgccgaacctgcgcaacgtgttgctggccgcgccgggctattacttcctcaccaccgatacgccgaacctgatgcgctggctggccatcgagctgcgcgcgaatggtgtcgacctgcgcctgcaacggtctttcaccgatgcccatcgctgtggtgacggctggcaggtggatggggcagggcgatgcgcctatctggttggtgctgatggcgcacgctcacgcgtggcacatcgcaccgggctcggccaggtgcgtgacaacctctacggcgtcgagcgtgagttcgccgacctgcaattgccgcagggtgacgcgctgcattgcttcgtcaacaagcgctacgcgccgggctacatcggctgggtcgcgcagaatccaaccggcctgcaggtgggattggcgctgcgtcatgacccgcaacaggtacggccgccggacattgatggcttcctcgagcacgtgcgcgatgtcgtcggcattccgccttccgtgcgcccctcggccactcgtgcagggctggtgccctgcggccggccggatgggccgatcaccggccagcggctgatcctgaccggcgacgcggcgggcatcgtctcgccgctgtccgccgggggcatccactcctcgtggcggcacggctgggcggtcggcgaggcgattgcccgccatctgcgtgggcaagggccggaagcggaacgggtggcgcggcgggtggcgccggcattccatggcaagcgcctgctgcgctgggcgatggaccatctgcaggccgactggccgctcaatgcactgctgcacacggcggccacgcggcgcatcgccgagcaggtctacttccaccgccgtggcgtgcgcacgtga

SEQ ID NO: 498381 - DNA, 282 bp, Stenotrophomonas maltophilia; identical to SEQ ID NO: 323954

SEQ ID NO: 498382 - DNA, 351 bp, Stenotrophomonas maltophilia
atggccgtggcctatgcccaacggagcggcaccgccgcgcctgcgcgcggtcgtgcgctccacggagcactggcggccgccaagcccagaccgacacctaccgcactgctggaactgcacagcttgcaggcgctcgacgcgaccctggcgggcgcatccctgcgtgaagtcgcggaaggactgttcggcgtagatgccgcagccgattggtacagcgatggcgggctgcgctccaaggtacgccgcctggtacggcgcggtgatgcgctgatgcgcggcggctatcgccgtctagcacagcttccgccgcttgagaagggtcgttttgaggacgacgcaaaacgaccctga

SEQ ID NO: 498383 - DNA, 411 bp, Stenotrophomonas maltophilia
atgttctggttattgcgcatgaccgcggcgaccacgtcgttcaacgtgaagcccagcgccaccaactgggccgggtcgggggtgatgtggatctgccgctcaaagccgccgatggtgttgacctcggtgacgccgggcgtggtgcgcagctgcggccggatcacccagtcctgcagggtgcgcagatccgtggccgtgtacggggtgccgtcgggcttgcgagcgttgggctcggcctccacggtgtacatgaagatctcgcccagtccggtggagataggccccatttccgggtccaatccttcgggcagctgggaagcgatttgctgcaggcgctcggcgacctgctggcgggcaaagtacaggtcggtgccgtccttgaacacgacagtgacttgggagagcccgtag

SEQ ID NO: 498384 - DNA, 471 bp, Stenotrophomonas maltophilia
atgatggtgaacagcatcgccagcggaatcactgcggcggtgatcagcgaagcgcgcacattgcccagcagcaggaacagcaccaccaccaccagcagcgcgccctcgatcaggttcttggacaccgtgctgatcgtgcggtccaccagcgcggtgcggtcatacacggcctttgcatgcacgcccgggggcaagctggcgttggcggcgtccagcttggccgcagccgcttgggagacctcccggctgttggcgccgaacagcatgaaggcggtgccgaccacgacctcatggccgttctgggtggccgcgcccgtgcgcagctccttgccttccccgacgctggccacatcgcgcacccgaatgggcacgccatcgcgccggtccagcacgatgttgccgatcgcctccagattggccagctggccgggcacgcgcaccaggaactgctggccgttgcgctcgatgtag

SEQ ID NO: 498385 - DNA, 618 bp, Stenotrophomonas maltophilia
atggtgcagaccgtcttgcagcccgacgcctacggcgatggcctgccgctgggcgtgcgcctcacggcgcaagaccgactggaaggcatggccccggactggccggaatcgcccgctgccgtggcgctgcgcgaactgcaacaggtggccggtgaagccttgccggaggacagcgccgaactgctcgctgtgctgctggcgaagtcgcaagacgaactggtgcggttgctggccgtgtgcgtggcttccacggtggacgtggtgacgcctcgcgccacggcgcaccagcccggcgaggaactggcgcaggccgtgggcctcgacatggccgcatggtggaagccgaccgcagaaggctacttcaagcacgtttccaaggctgtgattctggatgccgtgggcgcgtttgcaccggaatctgtcacccggctggcgaagctcaagaaggccgacattgccagcgaggccgagcggctggccgatggcacgggctggatgcccgccatcttcaaggccgcaggcccgcagaatgccgcgcaggaggcaggcccggagcaggacgccccggaggatgccgaggcaatggcggatgaaccagccgaggcgctggccgcttga

SEQ ID NO: 498386 - DNA, 210 bp, Stenotrophomonas maltophilia; identical to SEQ ID NO: 323948

SEQ ID NO: 498387 - DNA, 162 bp, Stenotrophomonas maltophilia; identical to SEQ ID NO: 323949

SEQ ID NO: 498388 - DNA, 315 bp, Stenotrophomonas maltophilia; identical to SEQ ID NO: 323950

SEQ ID NO: 498389 - DNA, 249 bp, Stenotrophomonas maltophilia
ttgagccaggaagccttttctgacgtgtccagccgtacctatatgagtaccctcgaacgcaaccttaaaagcccgaccctgcataagctggccgagctgtgcgaggtgatgaagatccacccgctcacgctgctgacgctggcctatgcgggcgacagtccgcgcaaggccgacgagctgctggcgcaagtgcgccgggagctggaggcggtggccaaggaacgcgactcggcgaagcctcgtgcgtga

SEQ ID NO: 498390 - DNA, 315 bp, Stenotrophomonas maltophilia
atgtttttgaataggttgccggattggctagtggtgtgcttcagggtggcgctcctcggtgagatatatcaggagatccgagccatagctgtagggtacgacgagaaggggagggttttgattcgttattatcttgagcgtgacccgactgatcttgattgggaaagcgtagaggtcgtggcgacaaatgtcgatgcagcaagttcggaggttggtatttcaagaatcgacgttgaatgcctgtatgtttcaggccctctgaggggcttgccatcacttagtggttttgtatatgcacgccgagagtttaattag

SEQ ID NO: 498391 - DNA, 858 bp, Stenotrophomonas maltophilia
atgtccagcaccgcgctgccgtcccggcagcggccgttgcaggagcgcgaacagctcgacctgttccgcgccttgcccggcgacatggcaccgcgcgacagccaggatttgatggcctatccgttcttctcgctcggcaagtccaagcgggtcaagcccatcgactttcgcgcgggcaacgtcacgatccgcgtggaaggcacgcaggagcacggcatcgccacgatttgggatgcggacgtgctgatatgggcggcctcgcagatcgtggaagcgaaggacgcgggcctgcggccgtcgcggctgatgcgcgccacgccctacgagatcctgcgcttcatcgggcggggcaagtcgctgcgcgactaccagcgcctcaaggccgcgctggatcgcctgcaatcgaccacggtggccacgtccatccgcgagacgaccgggcggcggctgcaccgcttctcctggatcaacgaatggaaggagctggccgacgccagcggcacgccgctgggcatcgagctgatcctgccggactggttctatgccggcgtgctcgacgccgccctggtgctgaccatcgacccggcatatttccggctcaccggcggcatcgagcggtggctgtaccgcctggtgcgcaagcacggcggcaagcaggaatacggctggcagttcgactttcgctacctgcaccagaaatccggcagcactgcgaagccctacgacttcgcctgcgacctgcgcgcgctggtcgcgcggcagtcgctgcccggctacgtcctgggcatcgagcggatgccggacagcggcatggagctgctgacgttccgacccgtgccgcatacggcacggggataa

SEQ ID NO: 498392 - DNA, 879 bp, Stenotrophomonas maltophilia
atgtgtgccacggcctccatccatgccaccgcaaagtggcatggcctggactggaagacggtcaaggcgcttgatttcaggcatctggtgcggacgctgggtccggtggacctatcgaacgtccgggtgatcgcgatggatgagtttgcgatccaaaaggggcatcgctacgccacggtggtggtcgaaccatcacgcaagcgcgtgctttgggtcggtcgaggacgcagccgcgcagacgtacgtcccttctttgagctactcggaaaggacggctgcgaacgcatccaggcggttgctatggacatgaattcggcattcgacctggaagtgaaagcccaatgcccaaacgccgaagtggtctacgacctgtttcatgtggtggccaaatacggtcgggaggtcatcgaccgggtccgcgtggatgaagccaacaggctgcgtcaggacaaacctgcccggcgtgtggtgaagacctctcgctggctcttgctgcgcaaccggcagaacgtcccggccgatcaacgagtgaagctcaaggagctgctggctgccaacaaggccctattgacgagctatgtgctgaaagacgacttgaagcagctctggcgctaccgtagccaggcctgggcagcaaaagcgtggaagagctggcgacagcgcgcattgcgtagccgcctggagcccctgcgaacgtttgtccgtcgcctacagccctatctgccaggcatcctggctcattgccgatggccccttggaacgaatctggtcgagggaatcaacaacaagatcaaggtcatcaagcgcgtcgcctacggataccgagacgacgcctatttcttcctcaaaatccgtgcagccttccccggacttgggtga

SEQ ID NO: 498393 - DNA, 282 bp, Stenotrophomonas maltophilia
atgcgtcccgctcccttgcggcctgccgccgctgtctcgaccgctgccgcgcagccccaacgctacctgaccaacgacgaagccgccgagtacctgcgcctgtcgccgcgcacgctggaaaagcagcgcgtgatcggtggcggcccgcgctttcgcaagttcggccggcgcgtcatgtacgccgtggccgacctcgatgcctgggccgccgaccgcagtttcgagacgacctccgatcccgaatacgccgagcaccactcggccgacagccgtgcgcgctga

SEQ ID NO: 498394 - DNA, 351 bp, Stenotrophomonas maltophilia
atggctgtcgcctatgcccaacggagcggcaccgccgcgcctgcgcgcggtcgtgcgctccacggagcactggcggccgccaagcccagaccgacacctaccgcgctgctggaactgcacagcttgcaggcgctcgacgcgaccctggcgggcgcgtccttgcgtgaagtcgcggaaggactgttcggcgtggatgccgcagccgattggtacagcgatggcgggctgcgctccaaggtgcgccgcctggtgcgtcgcggcgatgcgctgatgcgcggcggctaccgccacctagcacagcttccgccgcttgagaagggtcgttttgaagaccaagaaaaacgaccctga

SEQ ID NO: 498395 - DNA, 603 bp, Stenotrophomonas maltophilia; identical to SEQ ID NO: 323959

SEQ ID NO: 498396 - DNA, 348 bp, Stenotrophomonas maltophilia
gtgttcctgccgggtgccatgttgtgccgcatccggtggcaggccaacgactacggcacgatccgctggcagctcatggtgatgcaggcttgcacgccgctcgacgcggcgcagcgcatccccggcgtgcagccgggcgcgcgcctgctgctgcacgccgagggcgagatgcaggtgcgcgccgtgctggagcgcatcgacgccatcgaggcgcagggcatcgcgcctgtcgccgcttcgcccgcgtactggcgcacgctcgccaaccggctcgctgcgcgcctgccactgcccgaatacaccgccgagcggcacgccgcctggctgaccgggagggcgctgccatga

SEQ ID NO: 498397 - DNA, 915 bp, Stenotrophomonas maltophilia
atgaacgggatcgggatcgatgtgagcaagcgccgattggatatcggcacgacagacggccagaccctgcaggtcagcaatagcccctctggctatgccgagttgagcacttggttgagtacgcggccggccattcagatcgttttggaagccaccggcggctatgagcagactgtcctggacttccttcacaaggccggccatccggtgatccgtgccaacgcactgcgagcgcgtagactggctcaggggctgggtaaagtggccaagacggaccgcttggacgctcttgtattggcgcagatggccgcgctggtggaattgccttcctatcagccgctggagccctggcagcggaaactgcgtgagtttgtgcgggcgcgtcgacaaacgatgcaggcactgaccgtagcccgccaacagcaggaaatggtgactgaccgcgagctacgccggcagatgcaaggcaacatcattcgcctgcaaacactggtcgagcggctgggcaagcagatctctgaacaggtcgcgcagcagcctcaactggcagtgctgaagtcaatgaaaggggtcggcccggcattgcaggcggtactggccagctacctgcctgagttgggtcagatcagcggaaaagccattgccagcctggtcggcgtggcgccgatctcccacgacagcggagccatgcgagggaggcgaagcatccatggcggcagggccgagatccgccaggtgctctacatggcagccatgtcggccatgcgacatgagccacgattgcgggacttttaccggtcgctgcgggcccgcggcaaggaaggaaaagtagcgatcgtggcggtgatgaggaagatgctggtgatcctcaacgcccgggtgcgcgacgctgaaaacgggctggtccctgcctaa

SEQ ID NO: 498398 - DNA, 348 bp, Stenotrophomonas maltophilia
gtgttccagccgggcgctatgttctgccgcatccgctggcaggccaacgactacggcacgattcgctggcagctcatggtgatgcaggcttgcacgccgctcgatgcggcgcagcgcatttccggcgtgcagccgggcgcgcgcctgctgctgcacgccgagggcgagaatcaggtgcgcgccgtgctggagcgcatcgacgccatcgaggcgctgggcatcgcgcctatcggtgcctcgcccgtgtactggcgcacgctcgccaaccggctcgctgcgcgcttgccgctgcccgaatacaccgccgagcggcacgccgcatggctcatcgggagggcgctgccatga

SEQ ID NO: 498399 - DNA, 597 bp, Stenotrophomonas maltophilia
atgaccgccgtttcgactgccggcaccgcgccgcgtcctcgctcgcaccgcgcacgtttgcgcgctcgcaccgtgctggcgggcctgtccgcttgcggcctcgctgcgctggcctgggcgtccttcgtgcatccgctgccgcgcctgatctacaacccgtccgacagcgtggcggtcggctggtatcgcgtcgatccgctgggccacggcaccggctcgctgccacgtcctttgtctgtggacagcatcgtgctgaccacgctgccgccagatgccgctgcgctggccgcgcagcgcggctacctgccggcgcgcgtgcccctgctcaagcgcgtgggcgccattgcgccgcaggaggtgtgcatcactggtcgcatcgtccgcatcgatggcgtgccttcggccgcggtgctgcctgctgaccgctggggccggccgctgccatcttggcagcaatgccgtcaccttgagtcgggcgaactgttcctgctcagtgtgaccaatccggcgtcgttcgacagccggtatttcgggccggtcagtgcatccgccgtgatcggcattgcgcatccggtctggctggagtcacgcccatga

SEQ ID NO: 498400 - DNA, 273 bp, Stenotrophomonas maltophilia
atgagcacgaagcggtacaccgatgagttcaagatcgaggcggtccgacagatcgttgagtacggccgtccggtagcggaggttgccgagcgactgggcgtgtcgatccatagtctttacggctggaagcggcaacaaggcaaaggcgatgttggccggcgtgtcgagcaggaccagaacgcggaagtgcgccgcctcaaggctgagctacgcagggtcactgaagagcgagacatcctaaaaaaagccgccgcgtactttgcaaaggggtaa

SEQ ID NO: 498401 - DNA, 852 bp, Stenotrophomonas maltophilia
atgaagcaacacgcagatgagttcggcctcgcggcgatgtgtcggatgcttggcgtccatcgcagtggctactacgcctggctaaaagagccggcaagcgctcgcgacaaggacgatcagcggttgctcggcctaatcaagcacagctggctggaaagcggctctgtgtatggccaccgcaaagtgaccacagatctgcgcgagcttggcgagacgtgtagtcgtcatcgcgtggcacgcttgatgaagagcgaggggctgcgggcaatggtcggctacggtcggcgaccacgcccattgagcggccctgttggatcagtcgccaagaacgttctggctcgcggcttcaaagtcagtgagccaaatcgcgcgtgggtcacggacatcacctacatccgcacgtacgacggcttcctgtacttggcggtagtgcttgatctgttttcgcgtcaggtcgttggatgggcaacccgaccaactcaacatacggacctggttttgcaggcgctattggctgcagtgtggcggcgcaagccaagccccgggcttctgcttcactccgaccagggaacccagttcaccagcgaagactggcagagcttcctgcgcgagcacgacatcgtgtgcagcatgagtcgacgaggaaactgccatgacaacgcagcgatggagagcttcttccagctactgaagcgggagcgtattaagcggaggatctacagcaatcacgacgaggcacgggccgacgtcttccagtacatcgagatgttctacaacccaaaacggcggcacagttccaacgacgggctgtccccggtagagttcgagaagcagtacgcactaaacggctga

SEQ ID NO: 498402 - DNA, 831 bp, Stenotrophomonas maltophilia
atgccagtccacgtcgtcctccaggccggcgtagccggccgggtcggtgccgacaaggttgtcgagcgtcagcgaggacgcgtcgggcaggatgacgcggttccacaccacctgcacgcggctttgcccataactgacctggctgttgtagcgcccaaggatgcgcgatccctgcgggatcagcaggaacttgcccgtggccgtgtcatagaccggctccgtcaccgtggcgatcacgtcgcccggaagatcggacttgatgcccgtcaccagcgcgccggcgatcaccgttccagccatgacctgatacggcgacgccggcaacgtcaggttgccggaattgcgggtttccgtagaaccggctttcaggaacgcctctttctggtcttgccggttttgcgcagcggtcgaatcggcgagctgggccgccgtcgaggctggcccggccgccagcgggtcgaaggccgccagggtgcttgcggtgccaggcgcacccggcgctgcctgcgccaccgtggcggcggcttggccttgattgcccgagcggaagaacaccgacgaagccgcagcggcttctttctccttgcgcaaggcatcggctgggtcatagccaggggccgcataagcggccaccgccggccgctgcgagttcacgatggccggccccaggtcacccggcagtggcggccccagttcgggcacatcgggaggcaaggccggcggcagcttcgagtagtccgccggcagcgcatccagcccttcggacttcgacacgcgatcgacgttgtaaagctcggtctgctcattggcaccacgccgctgcggttgtag

SEQ ID NO: 498403 - DNA, 246 bp, Stenotrophomonas maltophilia
atggacgccggcaggcaggctggcgttggcggcatccagcttggccgcggccgcctgggagacttcccggctgttggcgccgaacaacatgaaggcggtaccgaccacgacctcgtggccattctgggtggccgcgcccgtgcgcagctccttgccttcgcccacgctagcgacgtcgcgcacccgaatgggcacgccatcgcgccggtccagcacgatgttgccgattgcctccagattggctag

SEQ ID NO: 498404 - DNA, 255 bp, Stenotrophomonas maltophilia
atgatgatcaccgccccgtccacgatcaggccgaagtccagcgcgcccaggctcatcaggttgcccgacacgccgccacgcaccatgccgatgatggtgaacagcatcgccaacgggatcaccgccgcggtgatcaacgaggcgcgcacattgcccagcagcaggaacagcaccaccaccaccagcagcgcgccctcgatcaggttcttggacaccgtgccgatggtgcgatccaccagcgcggtgcggtcatag

SEQ ID NO: 498405 - DNA, 915 bp, Stenotrophomonas maltophilia
atgtttgggatcgggatcgatgtgagcaaagccacgctggatgtggccgtccatggagagcagtttcgccaattcagcaacgacaagcgcggctttgtgcgcttgattcggtggctgaagacgtggccgatcaagcaggtcgttcttgaggcaagcgggggttacgagcgtgctgctctggatgtattgcacgccgctggcctgccgatggtacgaatcaatccggcgcgtgcacggcgatttgcccaaggcacgggccgtgccgccaagaccgatcggctcgatgcgacagtgctggcacagatggcccatttgttgccgctgacccgctacgtaccgcctgctccttggcagcagcgtctggctgaatttgcgcaatgccgcaggcaactggtgcagatgcgggtcagtgagatgcagcgcttgcggcgattggtcgatccggatctgattgcgatgaagcaacgccatatagctcagctatctgacgacctgaagcagttggataaagctattgccgagcagcttgaggggcagcctggctggaagaatatcggcgcgctcaaaggcgtcggccccatcctgatcagcacactggcctgcgagttgcccgaactgggcagcttgggaagcaaagccatagcatcgctggtggggttggccccgatgaaccgcgaaagtggcacctggcagggccaacggcggatcagtggtgggcgcgcggtggtacgcgaagccctttacatggcggccctgacggccatccggtacgagccaaggctgcgcgcgttttacgctggcctgaaggccaagggcaaagcgagcaaggtggcgctcgtggcggtcatgcgcaaaatgctggtgatcctcaacgcccgtaagcgagacgccgaggtggccctcggctgcccctga

SEQ ID NO: 498406 - DNA, 321 bp, Stenotrophomonas maltophilia; identical to SEQ ID NO: 323978

SEQ ID NO: 498407 - DNA, 507 bp, Stenotrophomonas maltophilia
gtggaccagttgcgcgccaatctggcgacgaccgagcggctgatcgcccaggccaggggcttggcctacgacgtgacgagtctggatcgggagttcgcgcgcctgtatcccgagcagtacgccgccaccgtcagcggcgaccagatgtaccgcgacgcgcaggagcgttggcggaacacgctaaacggcctgcagaccaccatgcagatgcaggcgcaggtgtcgcagaacctgggcgaagacgaaagcgtgctggccgatcttgtgggcaagagccagtcggccgaaggtgcgttgcaggcgatgcaggccatgaatcagttgctggccttgcaggccaagcagtcgatccagtcgcagcggctccagatcacgcaagaccgggcggcgtcgctggagctggcgcggcaggcggcagccacggagcgcgcccgcgaggtgcggcggcgcttcctgggcgacggcacgccgtacacgccgcagtccgtgaacttctacggcaactga

SEQ ID NO: 498408 - DNA, 507 bp, Stenotrophomonas maltophilia
gtgggccagttgcgcgccaatctggcgacgaccgagcggctgatcgcccaggctcgcggcttggcctacgacatgacgaacctcgatcgggagttcgcgcgcctatatcccgagcagtacgccgccaccgtcagcggtgaccagatgtaccgcgacacgcaggagcgttggaagaacacgctcaacggcttgcaaaccaccatgcagatgcaggcgcaggtgtcgcagaacctgggcgttgacgaaagcgtgctggccgacctcgtgggcaagagccaatcggccgaaggcgcattgcaggcgatgcaagccatgaatcagttgctcgccttgcaggccaagcagtcgatccagtcgcagcggctccagatcacgcaagaccgagccaccgcactggagctggcgcggcaggccgcagccaccgagcgcgggcgcgaagtgacgcggcgcttcctgggcagcggcacgccgtacacgccgcagtccgtcgatttctacaaccactga

SEQ ID NO: 498409 - DNA, 300 bp, Stenotrophomonas maltophilia; identical to SEQ ID NO: 342969

SEQ ID NO: 498410 - DNA, 363 bp, Stenotrophomonas maltophilia
atggcgcatgacgcccgcgaacgctggcagaacagcctgaacggcctgcacaccgccatgcggatgcaagcccaggtgtcgcagaacctgacccaagacgaaagcgcgctggccgatctggtcagccagagccagtccgccaccggcgcgctgcaagccatgcaggcgacgaaccagctccttgccttgcaggccaagcagtccatccaggcgcagcagctccagatcacgcaagaccgtgcggcctcgctggaactggcgcggcaggcggcggccaccgagcgcgcccgcgaagtgcggcggcgcttcctcggcaccggcacgccatacacgccgcagcgcgtggacttctacggcaactga

SEQ ID NO: 498411 - DNA, 333 bp, Stenotrophomonas maltophilia
atgcgatgcgtcctcgccctgtcggcttcgctgctggccctgctgctgaccgcgtgcggccagcagcaggccgaagacctggccgatgccttggccgccgatcccgcgcggctcaaggcgctgcgcgcgcaatgcgcggccgaccggcaggccgtgggcgaggacgcctgccgcgctgccgccgaagcgttccggcggcgcttcttcgccggccagaccgggccggacgaataccggacgctggccgatctgccgcccattccgccgagcttcgatgaccccgccgatggcggcgaaacgccggcttcgcctgcacccgaggacacgccatga

SEQ ID NO: 498412 - DNA, 945 bp, Stenotrophomonas maltophilia
atgaaccaccataaaaatgcccgtttgaccgtccatagtcgagcacttcttattcgccgcatcctccacgagggcctgcgcccagaggaagcagcccaagcatgcggcgtaagtgtgcgtacggcctacaaatggctggcccgattccgccagttcggggcaccggggctggaaaaccgcagctcacggcctcaccagacgccgcatgccacacctgctccggtaatcgagcaaatcaaggagcaccgccgtaaacggcagacctacctgaccatctccaaggcgctgggggtcggccacagtacgatttcaaggctgatgcgtgcccacggcctcaatcggctgtgtcggcttgaaccgcccaaggaggtcatccgatacgaatacgatcagcccggagggctgctgcacctggacatcaagaagctgggcaacttccagcggccagggcacagaaccgatgccaaacgtcggggaaacgccgctggcggtggctggggctacgtccacgtggccatcgacgatcactcccgggtcgccttcagcagcgtccaccccaatgaacaggccggaaccgcctgccaggcgctgctgggcgctctgcagtactacgccagcctgggaatcaccttcaagcggatcctgaccgacaacggtgcctgctatcgctccaccgcctttgccaagctgctcaaatcccttgggatcaagcacatcagaaccaagccctacacgccgcggaccaatggcaaagccgagcgcttcatccaaaccagcctgcgcgaatgggcctacgcccgcgaatacgcctcctcggaccagcgcaattccgtgctgacccaatggctgcaccactacaactggcaccgccctcacatggggatcggtggccagccacctatttccagagtcctgctgaacaacgtggtgggtttacacaactaa

SEQ ID NO: 498413 - DNA, 351 bp, Stenotrophomonas maltophilia; identical to SEQ ID NO: 323952

SEQ ID NO: 498414 - DNA, 285 bp, Stenotrophomonas maltophilia
atgactgcgaagccgccaccgaacagcaagcgcacggcaaagcgcgtcggcatcggcgcgcgtccgcccgcgaatccgcacgccgaggcgtggattcgccaaggcgacgccgatgcgctgggcaagggcgacctctacaccgcccgcctgaccctcgacatcacgcccgcgctgcgcgcgcgcatcaaggtgtcggccttcacgcagggcgtgaccgtggccgatctgctgcgcggcctgttggagcgtgagtttcccgagcatcgcagggagaacgcaccatga

SEQ ID NO: 498415 - DNA, 561 bp, Stenotrophomonas maltophilia
atgcgcggccagcatgtcgtgctgctggatgccgacccgcaaggctccgcgctggactggacgcagcgccgcagccagcaaggtttgccaaggctgttcagcgccgtgggcctggcacgcgaaacgttgcatcaggaagcgcccgaactcgccaggcgagccgatcacgtcgtcatcgacggcccgccgcgcatcgccgccttggcgcgctccgcactgctggcggccgagcgcgtgctgatcccggtgcagccgagcccctacgacttgtgggccagtgccgaaatggtggcgctgattcgggaagcgcaagtcttccggcctgtgctgcgcgcggccttcgtcatcaaccggcgcgtcagtaccaccgtcattggacgggaggcgcgcggcgcgctggccgagcagccgcttcctgcgctgcgctcagaagtgcgccaacgcatcgtcttcgccgacagcgtggccgctggccggctggcacgcgagacggcgccggacagcgccgccgcgcgcgaaatcaccgcgctggtggacgaactgctgcggtggccgacatga

SEQ ID NO: 498416 - DNA, 771 bp, Stenotrophomonas maltophilia
atggtcgatcacagcgccgagccttggtatccgactgccgcgtatctgtacgtgctgcatctggacggccttgcgcttgcctgggaatacctgcgccggcatcccgactaccggctcgactggctgcgccgtcatcgtcggccacaagcagcccagcaggcggcgcatcactggggcttgcgcctgctggaagacccggcactggatgcgcgtgacgcgcatccggcctggctgcctggtcatgccgccgtggtgcagctctaccccgatgccgatccgccgctggacgcggcgacgttcgcgttctggcgtatccccggccacaagcaactgctgcatgacggcaaagggctggcgctaatcgcgcgcagcccaggccactgcctgcgcttcgcgctcgcggccggcctggaggacggcatggctgtcgcctatgcccaacggagcggcaccgccgcgcctgcgcgcggtcgtgcgctccacggagcactggcggccgccaagcccaggccaacacctaccgcgctgctggaactgcacagcttgcaggcgctcgacgcgaccctggcgggcgcgtccttgcgtgaagtcgcggaaggactgttcggcgtggatgccgcagccgattggtacagcgatggcgggctgcgctccaaggtgcgccgcctggtgcgtcgcggcgatgcgctgatgcgcggcggctaccgccacctagcacagcttccgccgcttgagaagggtcgttttgaagaccaagaaaaacgaccctga

SEQ ID NO: 498417 - DNA, 561 bp, Stenotrophomonas maltophilia
atgcgcggccagcacgtcgtgctgctggacgccgacccgcagggttcatcgctggactggacacagcgcagaagccagcaaggcttgccacggctgttcagcgccgtgggccttgcacgcgaaacgctgcaccaagaggcgccagaactcgccaggcgggccgatcacgtcatcatcgacggcccgccacgcatcgcggcactggcgcgctccgcgctgctggcggccgagcgcgtgctgatccccgtgcagcccagcccttacgacctgtgggccagcgccgagatggtggcgctgatccgcgaggcacaggtgtttcggcctgcgctgcgcgcggccttcgtcatcaatcggcgcatcagtaccaccgtgatcgggcgcgaagcgcgccaggcgctggccgaccaaccgcttcctgcgctgcgcgcggaagtgcatcagcgcatcgtgttcgccgacagcgtggccgctggccggcttgcacgcgagacggcgccggacagcgccgccgcgcgcgaaatcaccgcgctggtggacgaactgctgcggtggccgacatga

SEQ ID NO: 498418 - DNA, 273 bp, Stenotrophomonas maltophilia; identical to SEQ ID NO: 323957

SEQ ID NO: 498419 - DNA, 762 bp, Stenotrophomonas maltophilia; identical to SEQ ID NO: 323953

SEQ ID NO: 498420 - DNA, 327 bp, Stenotrophomonas maltophilia
atgtggatctgccgctcgaagccgccgatggtgttgacctcggtgacgccgggcgtggtgcgcagctgcggccggatcacccagtcctgcagggtgcgcaggtccgtggccgtgtacggggtgccgtcgggcttgcgagcgttgggctcggcctccacggtgtacatgaagatctcgcccaacccggtggagatcggccccatttccgggtccaacccttcgggaagctgggaggcgatctgctgcaggcgctcggcgacctgctggcgggcaaagtacaggtcggtgccgtccttgaagacgacggtgacctgcgaaagcccgtag

SEQ ID NO: 498421 - DNA, 351 bp, Stenotrophomonas maltophilia; identical to SEQ ID NO: 323952

SEQ ID NO: 498422 - DNA, 669 bp, Stenotrophomonas maltophilia
gtggtggctgatgctgcggagtcggacggcaagatcaccggcatggagatcaatggcgtcgccatcgctgatgtgagcttcaaggccggcgcaacagccagcgacatcaacaacggcatcgtcaacgcgatcaatgacaagatggaccagaccggcgtctacgccaagctggacaaggacggcaatctggagctcacctcgctgaagtcgggcaaggatttcaccttcaccgccggcactgccgacggcggcggcactccggacgctgaccccgccaatccgccggccgatctggccattgacttcgctggtatcggcggcactgccaccgcggttgtcgcttcggagaagaagaccgtcgccgacctggacatcaccacggtggaaggcgcccagcgcgctctgtccatcgttgacgatgcattgacttcggtgaactcctcgcgtgccgacatgggtgcgatccagaaccgcttcacctccaccatcgccagcctgaacaccacctcggaaaacctgtcggcctcgcgcagccgtatccgcgacaccgactacgccaaggaaaccgctgaactgacccgcacgcagatcctgcagcaggccggtaccgcgatgctggcccaggccaaccagtcgccgtccagcgtgatgagcctgctgcagggctga

SEQ ID NO: 498423 - DNA, 150 bp, Stenotrophomonas maltophilia
atgcccagcggcgtgccgctggcgtcggccagctccttccattcgttgatccaggagaagcggtgcagccgccgcccggtcgtctcgcggatggacgtggccaccgtggtcgattgcaggcgatccagcgcggccttgaggcgctggtag

SEQ ID NO: 498424 - DNA, 561 bp, Stenotrophomonas maltophilia; identical to SEQ ID NO: 498415

SEQ ID NO: 498425 - DNA, 351 bp, Stenotrophomonas maltophilia
atggccgtggcctatgcccaacggagcggcaccgccgcgcctgcgcgcggtcgtgcgctccacggagcactggcggccgccaagcccagaccgacacctaccgcactgctggaactgcacagcttgcaggcgctcgacgcgaccctggcgggcgcatccctgcgtgaagtcgcggaaggactgttcggcgtagatgccgcagccgattggtacagcgatggcgggctgcgctccaaggtgcgccgcctggtgcgtcgcggcgatgcgctgatgcgcggcggctaccgccacctagcacagcttccgccgcttgagaagggtcgttttgaagaccaagaaaaacgaccctga

SEQ ID NO: 498426 - DNA, 459 bp, Stenotrophomonas maltophilia
gtggacctgcacatctttggggccgacgtccagcacatcggtgccggcgtaccggtgacggtcacccgcttgagcgatggcgtcaccgcgcagaccaccttggagcgcgtcctgcccggcaccgccacggccagccaaagcaccattgcgcgcgccaccgtggccaacaccgatggcctgtggcggccgggttcggcggtcaaggcgcgggtcaccgtggatcgccagtcggcggcactggtggtgccgatcaccgcgctgcagaccgcagaagaccaggacgtggtctacgtgcagcagggagagacctaccacacccggtcggtcaagctggggcgccgcgacgctgagcgcgccgaagtgctggaagggctcaaggccggtgaacaggtggtggtggcccagagcttcctgatcaaggccgacatcgaaaaatccaccgtcgaagaagaccattga

SEQ ID NO: 498427 - DNA, 456 bp, Stenotrophomonas maltophilia
gtggacctgcacatcttcggcgccgacgcccagcacatcggtgctggcgtgccggtgacggttacccgcttgagcgatggcgtcaccgcacagaccaccttggagcgcgtcctgcccggcaccgccaccgccagccaaagcaccattgcgcgcggcacggtggccaacaccgatggcctgtggcggccggggtcggcggtcaaggcgcgggtcaccgtggatcgccaatcggcagcgttggtggtgccgatcacggcgctgcagaccgcagaagaccaggacgtggtctacgtgcagcagggcgaaacctaccacacccggccggtgaagctggggcgccgcgacgccgaacgcgccgaagtgctggaaggcctcaaggccggtgaacaggtggtggtggcccaaagcttcctgatcaaggccgacatcgaaaagtccaccgtggaagaagaatga

SEQ ID NO: 498428 - DNA, 138 bp, Stenotrophomonas maltophilia
atgccggccagcggccggcactacctggcatcagcccagcgcttcggccacggcgcggaagaccagctgcatctgctgcggctggaacaggcgatggacgccctgccgcgtttcccctgggaaactgccgaacggtag

SEQ ID NO: 498429 - DNA, 357 bp, Stenotrophomonas maltophilia
ttgcagcgccaggcgcaggcggccagcgccgccgcgccggtcgataccgggctgtcgctggagaacctgcgcttccgctacgcgatcagtggcagcaatccgccgtggaaaccgctgcgcgccttcgacgatgggcagaaggtctacatccaactccccgccggtatcgcccaaggtgaattgccgccgctgttcgtgatcggcgttcagggcgacgggcaactggtgaactaccgtttccgttcgccgtactacatcgtggatcgcctgttcggcgcggccgaactgcgcctgggcggcgacaagggcgacgtggtgcggatcgagcgcacggatggcgtggcacggaggaactga

SEQ ID NO: 498430 - DNA, 354 bp, Stenotrophomonas maltophilia
ttgcagcgccaggcgcaggcggccagcgccgccgcgccggtcgataccggcttgtcgctggagaagatccgcttccgctacgcgatcagcggcagcaatccaccgtggaagccgctgcgcgccttcgatgacagcgagaaggtctatatccagttccccgccggcatcgcgcaaggcgagctgccaccgctgttcgtgatcggtgcgcagggcgacgggcaactggtgaactaccgcttccgagcgccgtactacatcgtggatcgcctctttggcgcggcggagctgcgcctgggtggtgacaagggcgacgtggtgcggatcgagcgcacggacggcacgcggaggaactga

SEQ ID NO: 498431 - DNA, 306 bp, Stenotrophomonas maltophilia
atggtggtggcgaggctggagccgctggtcgacaggttgcgctgtgcgttcagggacatcacgttggtgttgatgacttgtgccattgccgttctccgagagttgtatctggtgctggaaaggggaggtccccgggggaggaccgctggggtgttgtgccccgttgataccaataacgacaccccgcgccagacctttagggactgcgcgaaaagttttttcgccaatgtcaacgggggcgtgattccgctctcgcccacacgcagaaaggccgcccgaaggcggcctttccgtggtgttgcatga

SEQ ID NO: 498432 - DNA, 225 bp, Stenotrophomonas maltophilia
gtgcgcaagcacggcggcaagcaggcatacggctggcagttcgacttccgctacctgcaccagaagtccggcagcaccgccaagccctacgacttcgcctgcgacctgcgcgcgctggtcacgcggcagtcgctgcccggctacgtcctgggcatcgagcggatgccggacagcggcatggagctgctgacgttccgacccgtgccgcatacggcacggggataa

SEQ ID NO: 498433 - DNA, 192 bp, Stenotrophomonas maltophilia
ttggccccgttccaggctatgcgcctgaacaccgccagcagcgagtaccggttgactgttcccaccgatcccgaccgggatctggatgaaatcctggccacgttgctcgatgacatgcaccgcatggccgatacgcaccagtgtttcctggaagcgtcactcagtacagacgacggccggcactgggactga

SEQ ID NO: 498434 - DNA, 480 bp, Stenotrophomonas maltophilia
atgagcgagacctttgaaggctccatgcaggaaatactgggatccatgctcggcgtttgtctggagtacggagagaatcgcgtggatggtgtgtacctgtacggcgcagcggaagctggtacttcctctgcagacgtcttctatgaaataggtagtggcatctacaggattcacgagttgaacgacactcccgccgcccggaatggacagcagtttgatgtatcagatgaccgcgggttcgccttactgaaccttcttctggacgactttgaccgcttgattgagcttcatgaaggtcacaatcgggagcctcctacccagctaaaggcgcacttcgacgccgttgctggaaagctaagcctcaagttcagctatgaccttcatttcaccaataccgaggatctcctacccagtgactttttcgaagcgtggctccaggaagtgaagcagcgcacctcaaacgccagtgttgacggttag

SEQ ID NO: 498435 - DNA, 384 bp, Stenotrophomonas maltophilia
atgaacgccctgctcccgcacgtcctgctgccggcagttctgctggtcagcctccccctggcggcattcgccgctgaacccagcaagccctccaacgcgtccgagtgcattgccctcggcgccaatcgtgatatccgcccctccagcacggaacgcgaggtgctgctgcgcgacggtgacaaccactatcgggtgcacctgcagaagcgctgcctgggcgctgccgcctcggccagctatgtcttcttcacgcccagtacccctgaacggatctgcggcgatgcccgcagcacactgaaaaccgacagcaaccactgcaccgtgacccggatcgaaccgatcgatgcggcgaccttcaggcggctggcgcagcaggggcgttga

SEQ ID NO: 498436 - DNA, 1269 bp, Stenotrophomonas maltophilia
atgagtgacgcgatcaccgccatcctcgatgtgcacgacaacccgcgcacgtgcaacgacagccagagcatgctgctggcgttggcgactgagcagccgggccagctcggtgcgctgatgcggctggcccttgcccggcgttcacccagctcggcctttctcgacatgacgctggatctgctgcccgacgaagcggttgcgccggtctgtgccgaggcctggcgtcgctatcgtgatggtgagcgcggtgagctgcaggccagcgtgatcgaattcgccagctaccaggcgccgcaggtgctgcaggacgactgggaggccttgctggcgattgccagtgagaatgagctgcagctggcttcgcaggtgtggcggggtctgccgtctgccactgccgtgcagtgggcacagattctggccgaagccgatgacgatcgcgaaatggcgcgggccagggcgctgctgctcgcggcgcagcccgagagctatgccgttgcccgcgggtacctcgctgactggggcgcgctggatgctgaggtctgggcgcattgggccggcgtggccgatgggccgctgccgcgccgcctgcatggggagcggccgctgcacatccgctttggccgcgagcagcatcgcgcgcagcaggcggacgaaccgagctggcgcaagcgtatctggcgtctgcacccgacctggaacggtgggcaggtgcaccatgcggggcagatgggagggccgctggaagcgttgtgtggcagctgccatgcaccgctgcagcgcctgatgcgaactgacgctgctgcgctgcagccgggcgcggcgggtgagatcacgctgggcctgtgtctggactgctgcggctgggaagacccgcccgtgcgcttctatcgccacgatgccgtcggcctgcccagctgccacccaagccagcgtctggaggtgccggccacgccgatcgacagcggcgacctgatgcgtgccgagatcggcctggtcgccatggataccatgcggtggcagcagcaggactggggccagtccaaccatcggcagaacctgtcgcgcgtgggcggcgcgcccagctgggtgcagagtgcctggtacccggcgtgcatcgattgcggcgaggagatgtccttcgtgatgcagctggattcgacgctgccgaccacgagtgagggcacgctgctgtggggcagcggcggcatgctctatacgttctggtgcgcgacgtgtcgggtgagcgggcacttctggcagtgcacctga

SEQ ID NO: 498437 - DNA, 849 bp, Stenotrophomonas maltophilia
atggccgcgcgctacgcgatcaaggagcgctttccagagaatcccaggatctggaactcaaaaggagatcgcatctacgccaggcgcgactatgacgacgacatcaacagccgacccctgctggcaaatcacgtaggttccgaggtcgcactgcacctccatacaaacggtgttgatgaccagcgtgtgacaggcgcccgcgttgtcgtgcagccggggcgcccgcaggacgcggagctggggcgcaacatcctctgttacatgaaggagctgatccgaagtgtcgacggttacgaggaatttcaggtcaccagcgagccgtttcttgaggacaaaggcgagaatcgccttgcggagatgccgtcggctattgtggagatggccttccatacaaacccaaccgatgccgcagccttgctggacccggcatttcgcaccgcctcaatgaagggggtcgagaagggctatcggctgttccgcgaaggtgagggttgtgtgccgttgaaggtggagcccatccagtccatcgagctgtccgcggggaattcacggcgcgtcgatgtggtgtttgagggccacccccggtacccgattgatctggtcaccaccaatgtgggttgcccgcccggatggacctgcaccgacggcaaggtccacatcgctgcgccggatgagaagcccagtcagatcatcatgaagtgcgagaacgctggcagcgcccccttgttctggaacacccaggtggtcgatgccgatggcgtgaagtcgccgccggtcaggcacagggtgcagtgcatacggcggccgggtgggttgagtgttgcggcgacagctctggccggctcgtga

SEQ ID NO: 498438 - DNA, 285 bp, Stenotrophomonas maltophilia
atgggcagcctcaaggcaaacccgtctccgatgcctgccgcgctcaaagcaatggatgcgaaatgggaaatggactacaaaacgctgcgccgtttcctgttaaaggctggatgggtcgcgacgccacgcgagtattctcaccctaccgtctacggatttcccgaggtcaattgtggccaaggttggcaggcggtctgctcgtccggctttcacaaaggaaagcaggaagtctttctctggcttcatccaacagacaccaacctgatcctaatcggcgcagattga

SEQ ID NO: 498439 - DNA, 1074 bp, Stenotrophomonas maltophilia
atgagcgcgatcccgtcactgaacccggccgcagatgcggaaaccgggctgatcgcctgggccgaacgcgggctggtccccgatgcggcgctgcgtgcgggcatccgccgcttgtgcgcgcagcgcctgcatgaggaaagcgagggtggcatcgagggccaatcggcacgcttcagccggcgcatcgccgagctggccgacagcccgctcgcgttgcataccgacgcagccaaccgccaacactatgaagtgccggcagccttcttccaggcctgcctgggcaagcgactgaagtacagcagctgctactaccccaccgggcgcgaaacgctggaccaggcggaggacgccatgctggaactgtacggccagcgcgccggactggccgatggccagcagattcttgagctgggctgcggctggggctcattgaccctgtggatggccgaacgctacccgcaggcgcatatcactgccgtctccaactcgcacagccaacgccagcacatcatggcgcagtgccaggcgcgcggcctggacaacgtcgaggtgctgacctgtgacgtcaaccaacttgatctgccgacagcccggttcgaccgctgtgtctcggtggagatgttcgagcacgtacgcaactacgagcgcctgctggcaggcatcgcacggtggctgaaaccggatggcgcgttgttcgtgcacatcttcgcccatcgcacactgatgtacccgttcgagacagacggcggcgacaactggatgggtcgccacttcttcaccggcggactgatgccggccgccgacacgctgctgcatttccagcgcgacctgcgcctggaccaacgctggttgctggacggcacccactaccagcgcacggccgaccactggctggtcaaccaggatgccgcccgcgagcaggtgatgccggtgctgatcgccacctacggccaggctgcagcgaaggtctggtggcagcgctggcggatgttctggatggcgtgcgccgagctgttcggctacgacgatggccagcagtggctggtcgcccactatctgttccgaccccgctga

SEQ ID NO: 498440 - DNA, 285 bp, Stenotrophomonas maltophilia
atgggcttgtggctggcggtacagcctccgggggttcttctcctgatcggggctttcgtgacactcatggcgctgggggcagcgctcaccgcaatccggtttttccgctactggcagtgggccaggtcagccgaccagcgccgacaggacttcatcgtcagcgccgtcgccgccaccttggccgcgggggctgcagccgcggcgatcgccgcctccgaaccacccgtcgatgacccggagacggtcaccgacctgcagcaggggagggtggggtatggcgactga

SEQ ID NO: 498441 - DNA, 177 bp, Stenotrophomonas maltophilia
atggcgactgacaccaaggcccagcaggccgtgcctgcggcacccgccgttgatccctcagccgccgcacggcgcgagatggaccacctcgtttttctaatggcccttccgatcctgattgcggccttcgtggtgtgggtcaggcgcgacatcacccaccgcacgcgtaatcagtag

SEQ ID NO: 498442 - DNA, 240 bp, Stenotrophomonas maltophilia
atggtcactctccgtaaagccatcgcgatccttgccattggccttgtgtgcttctccctgctgctcgccgtgttcactgcctacgcgtggtcgatgcttggcggtgcgagcctctatgacgcgtttatcgcggcggtcaagctgctttctggcttcattgctgcgcttgtcgcagctgcttccttcaacgttgcttggcgacgctgcgtcagcgcgttgtccgaaggggaggggggctaa

SEQ ID NO: 498443 - DNA, 846 bp, Stenotrophomonas maltophilia
atggaaatcaccacggcttcaatgaagcaagcacgcctgtcaaagctggcgaagggtgtcaaagcatctgcgctcgcaatcgatcacaagttccgtgatgcgttcggcgctccgattctccggcagggcggaaagacgggcgtgtatgcccgcaatagtccgtaccgcgtcgccttgatcacgctcacatatcggcgtgatggccagtgggaccccggccacatatccgcactgatcaagcactaccgcgagtggttccgtcgcaatgcaaagggccaggacgtgcctgaattccactacgtgtgggtgatggagctgactgagattggccgaccgcactaccacatcgtggcgtggttcccgaaaggcattacgcctccgctgcctgatcagcagggctggtggcctcatggctcaaccaatgcagtgttcgctaaatcgccggttggttacatcaccaagtacgcgagcaaggctgagtcgaagtccggccatcacttgcccaagggtgcacgtctatggggctttggtggcctaaagatggtggagcgcgcacctgtcgcttttgccactgcgccccggtggctgaaaggggtgatccatcacgaaagccaccctaagaagcggcacatcagcatcactgaaaaaaccaagtttggtgcgtcgatcaccaccaaggtttctgcatgggttctcacggctggcctgtccgcaggctgggccttcttctcgccgttcgattacgacggtttcaccggtaccggtatcgccctaagccatcggggaaatatcgaagttcttacccctgatggcgatcaattccacataccacacaggagtcattga

SEQ ID NO: 498444 - DNA, 324 bp, Stenotrophomonas maltophilia
atgaacgttcgcatcgaaatcgtttcgacctcggtcaacaccatcgaaggcgtgtcgaagtccagcggcaagccttacaagatgcataagcaggaagcgtatctgcacaacggccaccactacccggaccgtttcgacgttgctcccatcgaggttgatggcaagccggttccgtacgagccaggcttctacacgctggctccgggctccattggcgtgaaccgcgagtacggcaaccttgagatcaaccgctacgaaatgaagctgctccgtatcgaagaagcccaggtcaagcctgtggccgctgcgaaggctgcggggtaa

SEQ ID NO: 498445 - DNA, 267 bp, Stenotrophomonas maltophilia
atgaacaagaacatcgccatcgctcgccgtccgtccatgaagtcccgcgtcaagtccgttgccaccaagctttcggcggtcgtcgtcagctcgatggtgtcggcctcggccttcgcgcaggctgctggcggcgacatgcccgccagcgtcgatggtgccgccaccttcatgaccaccaagggcggcattgccatcgctgtggcagcggccatcaccctgatcacgctgggtatcactgcggccaagctgccgcgtaagggcagctga

SEQ ID NO: 498446 - DNA, 1398 bp, Stenotrophomonas maltophilia
atgtcacctcacttccgagggctagctgtcgtccttgcgctcgctggttgtgccgccagcccttctgcattcgctcaggctgttacctgctctccaagcccggaggttgtctactcagagtgttcagatcaaggcgaggcttactccgccgcctgggctgccgcaacggagcaagctgctcgctcaaatgcggcgggcggtcagcagtggaggcctttcgtggatcccgatggccctacggtctacatgggttacgtgaggccctcgacgtcgtctactggtgcttacgcggcggttcgccgtgctttcaaggcgacgtgcctatctcgcactgaagagaccggctgggccaatagttcgcagatggtttgcgagcgtggttgtgcatacaagctgtacggcgatggggcaggtggccactactactccaccttcaacgatacgacgaattcgtcgtatggcacttgcaagtcgagtgatgaaaccccgcctcccaagccaaagcctgatcccggcccgggtaccgatcccggcaccgatccgggtggaactgatcccggcggtggtggtacggaccccggcggcggtggtggtactgatccgggcggcggtggtggcaccgatcccggtggcggtggcggtactggccctgatcccaagccgtgcccggcaggtggcaaggatgccgatggcaagccgtgtccaggggagggtggcggcactgatccgggcggcggacccaatcccggcgaaggcagtggcagcggaagtgggagcggcacctgtgccaagccccctgtttgcagtggcgatgccatccagtgcgcccagcttttccagcagtggcgtgcgggttgtcaggctgaagggctgggcggcaaggtcacaggtgatccaaccaattgcaaagccgcataccagtgcgaaggcaacgcggtcgcctgcggtcagctcgctgtaatgcgtaagcaaatgtgcggcgccggggagggggacggcaacggcacactcaccggcgacggtacgtgcgctcaatccttcgtttgtaccggtggtgatcccgttgcgtgcgcggagttaaagcaagtgcacatgctgcggtgtgctgtggaaaagctcactaaagaaggcaatggcgacgatgactacggcgagacattgaatccctctgatttcgtcggtatcagtgagggggaaagcatcgaaggacttgatgccggtggctggctcggtggcggatcatgtcccgcgttgaacaacaccattctttcgcagatgggcgtaaagggccttgatttgctgtgccagggcgcggcagttctagccgcctatgtgctgttcctcgggtggctgcacgccgctttcattcttggccgatcactgacagggggtggctaa

SEQ ID NO: 498447 - DNA, 285 bp, Stenotrophomonas maltophilia
atgtggggtccattgcttgccggtctttcccggcttttcggtacacgcgttggtcagtggatactgtcggcgctggcattcctcggcatcaatttcatgacgcagaaattcgcggtcacgccgcttctgggtcaaatcaaagcgtcattcgctggtgcacccggcgatatccttgcttggatcgggttcctcaacgttgataagtacgtgaccttgatcctctcggcgtatgccaccgctgctgctgcaggtgctctcaagatgcgccttgctaagaaaaagtag

SEQ ID NO: 498448 - DNA, 1128 bp, Stenotrophomonas maltophilia
atgcttcatctgatcacaggccagaacggcgcaggcaaatcgctgcgcgccatcgaattgatgtacaagcggcacggcgaaggaatggaggtctacgcctttggattccgtggcctgaaggctcccttcgttaagccgtttgctgatccacgcaagtggcgtgatctgcctgcaaacgcagtgcttttcgttgatgaggcccagcaggtttggcgtacacgttctggtggccgtccggttccgcccgaagtcctcgaccttgaaacgcaccgtcatcagggcatcgatatctacctgatcacgcagagtccgatgtacctggactcgcatctccggccgctgatctcgtcgcacgaacacctaatcagctacgacaaaggctccgcgcgcatcttccgtttcaccgagtgctatgaagacgtcaagtcgtcgtcgctgcgtagcaaggctcagtttgaggtgtggaagtatccggttgttcattacgcggattacgattcggctgaggtgcacacggccaaggccaaggtgccgtggcggcaacgcatcgccaagctgcttttcgtgatcgcgggcttgctgatcgttggcagcatcggctggttcttctgggggccggaaacgcccaaggtggtgcccaaggctgcaggcgcttctgagccccagagtcttggctcatcgcttcttggcggcttcggcgcgcttcctgcaggaggagctacgggtgaacggcattacgccaacacccaggaatacgtcgaggcgcacacgcctcgcatttcgcagatgccttggtcgatgccggcaatggatggccgtgaggtcaagtccgagccgcgcctttactgcatgtcctctggcggtgacagcgaccgcacctgcacgtgcctcactgagcaaggcaccaagtggcagatgcggattgaccagtgcgtgcagatggctcgctggggccctgcgtacaatccgtacaaggaagcagcgcaggtggcctcagaatcgccgcaggagccccgtgggggccgattcgacggtcggggtcgcgatgcggccgaggcccgctcaggcgtcgctattggcgccgagggcacctttgagcgcatcaaggcgtatccctcgaactggtga

SEQ ID NO: 498449 - DNA, 312 bp, Stenotrophomonas maltophilia
atgcgtgatcggaaactgaccggcccttgggccggtttttcgtttaagggtgaccgactggttacccccgaaggccgcgagctcctgccggaagatctggcatggctggccctcaccgctgcacaggcacaggaatggcgccgcatgatggagaaccgccgcagccccggcaagccacgcaagccgatggcgttcaccacagccaacgtcatagacctggccaccacgatagaccgcccaaggcgatcaccagttcgagggatacgccttgatgcgctcaaaggtgccctcggcgccaatagcgacgcctga

SEQ ID NO: 498450 - DNA, 1191 bp, Stenotrophomonas maltophilia
atgctacccaagcgaaaggtcgtgcccctagatcagatcccggcagctctagagaagacaggcttcattcttgagcatatcgttgcagatgccttcaagaaggcccgatggacgactataggaagtcgctactacgcagacgatgttgacgggcgtgctagagagctcgatctcattgcctacaggactgttacaaataaagacttggaggtggtctcggccgtgctcgcaagctgtaagaaggatgaggcgcgcacctgggcctttcttactgaggagaagccccggcaggacccgaattacgattggaatcccgttcacttctggacggacgttgaacctctaagcacatacctgaaaaccgaagattggcggaaggatttgttcggttctctaggtgatagttacgaaaacctcttcaccgcaaaaagatccgtcttcgccttccagcagcttggagtagctcagcagaatcaacccaagaataatggtggcgcaaaacgcagcgctgcggtgccgcagcctattgtcactgcgccagttacatcgcggaacgatgatcagattttcggctcaatcgttagcgtgatgaaggcattggatcatgagatggagtctttgccgaacagggcaaagaacaagaaacggctgtatcacttcaccttgctgtccatcgtggatgctcccttggttgatgtcttctacaaggggaattcgccgacagtgaccgaaatagacgggatcacgcatctttcccgctacatggtcaatcgaagagagttatccgccttggtgcactttgttcaggcgagcgccctgccccagtacttgaagtgtcttactgagtcggcagctccctcggcggagttcttcaccgctttggtggagcggtccttcgaggcaatcaagtcaaatgtgcatgtccgctcccatctgtcaaaagcaatgaaggacatgctgctgtggcggatcaatgactcactgcggcgcttgacaggggtgtacggtgaagtgtcttccgtcgagctgggctataaggacgaattcctggagatcgaattggatgaagatcagttcactatcgatctgttgaatggggattccgagctatctgaatcggtggctgcgctcctaaagaagaaggctaggtatcaaggtaagttccggtttgcgcttgatgtgcccttctag

SEQ ID NO: 498451 - DNA, 819 bp, Stenotrophomonas maltophilia
atgacaacccagaccattctcatcaccggctgcagcagcggcatcggccgcacaactgccaaatactttcaggagcgcgggtggaacgtcattgcgacggtccgctcgaaacccgataaggacgaagaactcaacgcgctcgaaaatgtcctggtagcggtgctcgacgtcacggtgaagggcaccatcgaggacgcgatcgcggccgggatcgagcgtttcggcaagatcgatgtcgttctcaataatgccggatacggttcttacggcctgcttgaggcgacgcctgagcacaagatgcgcaagcagtacgacgtcaatgtcatcggcccgatgctggtcatgcagtcgatcttgccgcatttccgcaagcgtggcggaggcacgatcatcaacatctcgtcgatgggcggaaagatcaccttcccgctgggcacgctgtaccacggctcgaaatttgcagtggaaggcatgagcgaggcgctgtcccatgagctcggtccgatcggcgtcaagatcaagctgatcgagcccggggtgatcaacaccaacttcgccggcagctcatttgacatgaacgtcgatccgggcctcaccgagtacaacccgcttgtcgaggccgtaacgaaggcgttcgctgcagccactggtggttccgatccgattgtcgtggcgcaggctgtctgggaagcggccaccgacggcagcgaccagctgcgctatatcgccggagaagacgccacgcagatcatcgctgcgcgcaagcagatggaagacccggaatacctcgcgctggtgcgtagccagatgggactctga

SEQ ID NO: 498452 - DNA, 1602 bp, Stenotrophomonas maltophilia
atgaacgcaaccgaagccatcgatcaactcgacccaaggaagtggggcgagacagctccagccgagcgtttgcgcctgctggaggaggtccgagccaacctgaagaaatacagcgacgaccttgcggtcgccgacagtaagatgaagaacggcatcctcggcgcgccgctctattccgaccctatatccaaggtaggaaccgtcgtaccgatggcgagtaccatctcggctgccatcgacctttatgagtcgatcgtggacggcagcatgctcgcgccgctcagcgtcgaaaaggtcggcgacagcctgtacgacatctatgtctttccgcagcagcgcaaggacaaattgatgtacgcggaccggaaggatcgcattcgcgtgaggggcgaaccgaagcaggtcaatccgatggacaagcccgccggcatcatcgccgttcttggggccggaaactacagctcttcgctcgagatgctcaaggcgatcttcttcgagaactgcgcggtcgtgcacaagccgcacagcctgaacgcagaaaccgacaaagtctgggaaaagatcatgcagccgctgatcgcccatcgcgtgctgagcttctgcgattccgaccaggggcgcgccctgaccgtcgatccgcgcctgaccaagatctacttcactggcgggaccggtacggccgaagccatcatgtccgccaccgatacgccgctggttgccgaatgcggtggtaacaatcctgcgatcatcgtgccgggcgatcgtccgtggacgaagaaggagatcgagcaccaggcggtgcagatcgccaccatgtcgaagctaaacggcggtgcggtgtgtggtcgcatccaaaccctggtgaccagcaagcactggccgcaacgcgtggaattcctcgatgcgctgcggatcgcgctacgtgacaccacccccgccaccggcatctattacccgggttctgacaaggcgctcgaaggcttccgccaggcctacccggatgcggaagtgctcaagcccgagggaggccggtatccgcataccgacatcatgctgatcacaggggttgaacccggtggatacgcctgtgcgaacgaagcgttcagcctcgtcatcaatgaggtaccgcttgacctgccgccgaacgcggtgcaattccttcccggcgcagtcgagttctgcaacacgcagctgctcggcacgctcggcgcggccatcctgatcgacgaagacaccaagaagacccatcaggcgctgctcgaacaggcagtaaccgatatggagtacggcggcatcgccatcaacaccatgccgcccttcatctttctcagtccgtatctcacctggggtggcaatgaggccggcaagacgttcgtttccggtcaagggaacttcggcaacctcctcaacttcgaaaacgtagagaagtcgatcatcgaagcgaagttcatgtcgccaggccacatgatgaacaccaacaagcaggccttcgacaacatggccgggaacatgtcgacgtttgccgtcgagccgacctggatgaacctcacctgcctgatgggcgacgccattcgggacagcttccgcaagaaggatttctga

SEQ ID NO: 498453 - DNA, 1011 bp, Stenotrophomonas maltophilia
atggccagcaaaacgacctttcccatcgagcaaggcttgcgcccgctcttgaaggacatgggtatccgcatcgaccacgtgctgcgtcgggcgggcttgcccgaggatctgctgtcgcgacccaccggcgtactgacgaccacggagcacttccgcctctggcaaggcctcgaagcggaagccgccgatccgcaattaccgctccgcatcgcagggatgatccaagcggactccttcgtgccgccgctgtttgcggcgctgtgcagcgccaacatgacgcaggccgtgcaacggctggcgacctacaagcgattgatggcgccgatgcgcatggagacgtcgaccggcgcccagggcgaactgctggtgatgccacactggatcggtgcggaaagcggagtgcccttcatcctcgtcgcaaccgaggttgcgttcctgatgcgcctgattcgcttggggacgcgtgagcacatccaggcgatgaaggtgacgctgcccacgttgcccgacccggcgcatgcgaacgcctatgcggagtatttcggcgtcgccatacgacgtgatgcaacggcgtgcatcacactgtcgccgagcgacgcagatcgccccttcctcactgcgaacgatgccatctgggaaatgttcgaaccggatcttcgcaggcgcctgggcgagctcgacgcgaccgcgacgaccgcacagcgcgtgcgatccgttcttctcgagttgctgcctggtggtcagtcgagcgtcgaggcggtggccagtcgcttggcgatgagcacgcgcacgttgcagcgccggctggatgacgaaggagatagcttccgcagcatcgtcaatcgaacgcgcgaagatctggcgaagcactatctgacgcgaacgaagctatcgatcagcgagatcagcttcctgctgggctttgacgatcccaattccttttatcgtgcgttccacggctggaccgggcggacgccggacagcatgcgcagcaaggccctcccgaactga

SEQ ID NO: 498454 - DNA, 951 bp, Stenotrophomonas maltophilia
atgagggccttcagttacgaacgcgccaaatccccggccgaggccgccaaggccgtcgccggtaccgagggcgcgaagttcctggccggagggaccaacctgctcgacctgatgaagctggaggtcgagacgccagcgcacctggtcgatgtgcaggacatcggcctggacaggatcgaacccaccgacgagggcggcctgcgcatcggcacgctggtcaccaataccgcgctggcctcgcatgagcgcgtgcgcagcgactacgcggtgctgacccgcgcgatcgtggcaggcgcctccgggcagctgcgcaacaaagccaccaccggcggcaacctgctgcagcgcacgcgctgcccgtatttctacgaccccaatctgccctgcaacaagcgcctgcccggttccggctgcggcgcactcgaggggttctcccggcagatgggcgtgatcggcacctcggacagctgcatcgcgacctatccgggcgacatggcggtggccctgcgggtgctggacgcctcgatccagaccgtcaggggtgacggcagtacgcgcagcatcccgattgccgatttccatcgttcccccggcgacaggccgcagcaggacaacgtgctgcagcgcggtgagctgatcacccacgtcacgctgccggaacctctgggcggtcggcacgtgtaccacaaggtacgggaccgcgcgtcctatgcgttcgcactggtgtcggtcgccgcggtcgtgcagcgtgacggctcggcgcggttcgccttcggtggggtcgcgccgaagccgtggcgcgtcgaggcagccgaacccctgctgcgcgacggcgtgaaggccgcgacccggcaggtgttcgccggtgcccgtccaacgcgggagaatgcgttcaagatcgcgctcgccgagcgcgccctcgcagcggtgctggtggaaggagagcgctga

SEQ ID NO: 498455 - DNA, 954 bp, Stenotrophomonas maltophilia
atgaacaccttcgcccgtacgctggcggttgccgccctcgccctctcggtccaggccggcctgtccgcgcaggccgccgaaccggccaagccggttccggtcaccgccatcgcgcgcaccgccagctacatcaccaccgccgacggcgtgcagctgtactacaaggactggggcccgaaggacggcccggtcgtgaccttcagccatggctggccgttgaattcggacagctgggaatcgcagatgatcttcctggccgaccatggctaccgcgtgatcgcgcacgaccgtcgcggccacggccgttccagccagccgtgggacggcaacgacatggatcactacgccgatgacctggccgcggtgatcaatacgctggacctgcacgatgtgaccctggtgggcttctccaccggtggcggcgaagtggcgcgctacatcgggcggcatggcaccgggcgggtgaagaaggccgtgctgatcagctcggtgccgccgttcatgctgaagaccgccgacaaccccaacggcctgccgatcgaagtgttcgatggcatccgcaaggcgcagatggataaccgcgcgcagctctacaaggacatcccgtcgggcccgttctatggattcaaccgcccgggcgcgaaggtgtcgcaggggctgatcgatgcgtggtgggcgcagggcatgcagggcggccacaagaacacctacgattcgatcgccgcgttttcggccaccgatttccgcgccgacctgaagaagttcgatgtgcccacgctggtgatccacggtgatgacgaccagatcgtgccgatcgatatctcgggccgccagtcggcaaagctgatcaagggcgccaggctgattgtctacccgggtgcgccgcacggcctgaccgatacccacaaggacaaggtcaaccaggacctgctgacgttcctgcaggaaaggtga

SEQ ID NO: 498456 - DNA, 477 bp, Stenotrophomonas maltophilia
atgatggtcgccccactgctgtcttgcctggaatgccctgcgcaggcgccgttcaccctgacaggtcgtcgctatgtccaccagtccgcagaaagcgtcacaactgccctgaacctgtgcggccagccactcgggaggcacctcgctgtcagcgtccgtgcttgccagccacctggcgccccgccccagcagttcagcagcggctgcggcccgggcgacaccgacgcagcgtgcatccagctgtacgctgccgacctggtgttggcggcagatggtgcccgttgcatccgtacacgcatccagcgcgaccatcacctccactgcttcgccgccgaggcccgggtgaagggccgccacccggatggattgcaggcaccgcgcgatactgtccgcctcgttgtgggcgggtaccaggacgcctatcaccgcagcccctcgttccgggccaatgacaaggggccccgtgtccatccctga

SEQ ID NO: 498457 - DNA, 246 bp, Stenotrophomonas maltophilia
atgcgcgacatcggacagttctatgtaaacagcgtcgaaggagtggcgcgtgaggatggcaccctgctgcaggtcacccggatcgattgttcctgcctgaagtgttcaaggcagttccgcgccattcctgatcatggcctcgtcgacctcaacggcgctgcttcgctcagttgcccaggctgtggcaaccaccagtccgtcagccgggcgcggctggaggagttcgtgctgcgtagtgatccatga

SEQ ID NO: 498458 - DNA, 1575 bp, Stenotrophomonas maltophilia
atgcgcaaggtagtgctgctgttgatcctgctgaccgggctggcgcccaccgcctgggcggccacggtcaagaccacccatcgcaccattcccagctgggatggaacgcctctcggggccttcatcatcgaaccgcaggacgcgggcagcggacggtatccgctgctggtgatgcccagcagctgggcggtgcccagcgtggagtacgtgggcgtggcgcagtcgttggcccggcgcggctatgtggtcatcagctacagctcgcgtggcttctgggaatccggcggcagcatcgacatcgccgggccggccacggtggaggacgtcagtgcactgattgactgggcgctggacaacacccgcaccgacccgtcacgaatcggcgtatcgggcatctcctatggggccggcaccagcctgctggcggccgcacgcgatccgcgcatcaaggcagtggctgcactgagtggatgggccgacctgcaggcctcgctgtacagcaacgacacccccagcgcacagggcatcgcgctgttggttgccgcaggcctggccaccggtcgcccgggaccagagctgtccaccatcaatcgcaatgtgctggtcggcaactaccagggcgcggtggactcgctgctgccggtggcgccgcagcgcagccccggggccagcatcgatgagatcaacgccaaccagccagcggtgttcctggccaacgccttcaacgacagcctgttcccgccgggccagctggtcgatttcttcaaccgcctgaagggccccaagcagctgcagttgcgccatggcgatcacgcgctcaacgaagcctttggcgcactgggtgttcccaacgaggtctacgattcggtgggcgactggttcgaccattacctgaagggggtggccaatggcatcgaccggcagcctgcggtgcagctgaagtcacagaagggcagctggagcacgtatgcgaactggcaggcgaccaatgccggcgccatcagctacgcgctgaccgcacccaaagggctgctgctgcccaccggaggcctggccgaaagtggaagcagcaccggctggaactaccgtatcggcagcggcctgctgaccgctgccaattctggcgtggcgatggcctccggcgcgctgcagatgatcaatctgccgccgggcgcctatgtgccgttcgtgggccgcaacgccgcaggtgtgtggcaggggccgatccagtggagtgcgcagcgcctggacggcacgccggaagtgcgcttgaccgtcacgcccagccgcgccaacaccacgctgtatgcctacctgtatgccgaggacgtgctgggcaatggccagctgatcagccacaagccttacacgctgcgcggtgtcacgccggggcaggcgaagaccatcgacctgcggctggaagccagcagctggaacattccggctggcagccgcctgaccctggtggttgatacggtggatctgcgctactcgggtatcagccagttgggaggtacggtgaccttcagttcgcctgccaacgcgccttcggtgctgaaggtgccgctgcattga

SEQ ID NO: 498459 - DNA, 1305 bp, Stenotrophomonas maltophilia
atgagaccccggccgctttcacttgtcgccctgttgctggttgccgttggccccgtgtccgcggaggatcctgcgctgtccgacgtgaccgctggcgcagtcttcgaagaggcgcaaacgctgtgccaggccgacaacggccgactttggggagcgtcgctgtgtgggccaatgatgctggtggacaggaccagtcgccgggtcacggcatcccgtgcagatgcacagggcaacctgcaggcacgtggagaggttttcatcggccagcttccgccggacgcgatcatcgccaacaccgccgtcgaatggtccggcacccgctggacgcagctgctctggccgctgccacaggacgaaagccggcgacgcacgctgctggcccacgagatgttccaccgcctgcaacccgcgctgtcgatcgcagcgccggcagaggacggcaatgaacacctcgacacgcttgaaggacgctattggctgcagctggaatggcgcgcacttgccgccgcactgtccgcatccgaccccggcgcacagcgcaacgcgatgaacgatgcgctcgcattccgtgctgagcgctaccgtcgcttccctgctgccgcccaggaagaagccgcgttggagttgaacgaaggcctggccgagtacaccggcgttctcgtcggcaacgcaacgccctctgcgcgcatcgaggccgcacttcatgaccttcgcgcccatgcggatgatcgcagcttcgtccgttcgttcgcctacgcgaccggcccggcctatggcctgctgctggaccaggttgcgcccggttggcatcgcaatcttggccatcccgcccgcgatctcggttcacttctggcagagcgcatgcacagcactccactcaccggcgaagctgcactgttgaccacggcagcacgctatgacgggcctgcgctgcgcgaaacggaagtgcagcgcgaacagcagcgccttgcacagcttgaacgcaaccaggcccgcttcgtgaccgggccggtactgcggctggatcttcgcagcatgcgcatccagttcgaccccagcaacatgcagccgctacctggcatcggcacggtgtatcccacgatgcagctgagcgacgtatggggaacattgacggtcaccgatggagcgttgctgcagaacgactggaaggccgtgttcgtgcaggcgcctgcctcgggcaaactgcccctgcagggtcacggatgggcgctgagcctggcccccggatggtcgctggtaccaggagcgcgccgcggcgactacgtgttgcgggcacagccctga

SEQ ID NO: 498460 - DNA, 696 bp, Stenotrophomonas maltophilia
atggatcaccacagagccaacactgatatccggccaattactgttccagatgtgaagcgcgctcgcccctccagccagtttcctgcttttgagagacaaaagaaggtggaggtgacttgcacccagggccaccgtcgatggcggcaagcggacaacccatggcctttcccgagccgtacgacggtatacaggattcactatccaggcacccttgctcttgtcccagcgagccacaccagacttgaatgcgaagtgccaatgatcctgatccaaatgagacaggaccactggctcgttggatttccacgacttgctgaagaccagaggattgaagttatccaatgctggagagctgaagccttttatgtatatgggccggccaaaatcaaagaacagacgaggatgttcgtattgatccacaagggcattgaagttggcctgcccgacgtcgtagaccgcaacgccatgcagcgacacatcgacgctacgaagcgctgcctcgacctgcgacgtctcggcagcctcactcagaaaggagcgcaggttattgctcgaggtcgctgcgcgtcctgtctcgtccttctgcacggacatgtagagtctttcaggcctacttccctcaccagagccatcaccaattggaagtgtccgcacagagatggcgccggcgaagttgcggttggaaagagtgattag

SEQ ID NO: 498461 - DNA, 1362 bp, Stenotrophomonas maltophilia
atgaggtggtcgatcgcccagcgcctgtcggcgatgttcgcgctggccgcgctgctggtattcgccctgctgggcatcggcgtgtatggcgtgctggaacggcaggtggtgcgctaccagcacgccgagctgcagaccaagctgcacgcggtcagcggcagtgtggcgatttgcgatacccgcgagcgctggagcaaggtgcgcgacaaggtcggcaacctgatttccggcgaccgcgacacgctggtctgggcttggagtgacgaccccaccttccgcatcggtggtgaacgcccacaggtgcagccacccaatggcaacgacagcggcatgggcacgttgcagcgcgagggccagcatccgctgcgtacgctctatgagcgcgtgcccggcaagggcgtgcggccggcggtggacctgtggatcggtatcgactccgaaccgtacacgcatgccttgcagcgcttcgccgtggcgctgtgggttgccggtgggctgggcgtgctgctggtggccggcctcggctactggatcgcgcgcctgggactggcaccgttgcgcgcgctttcggacgaggcgcgctcgctcagcccacagcggttgtcacagcggctcggcacacaggcgctgccggcagagctggggcacctgacgcatgccttcaatggtgcattggatcgcctcgaggccgcctacacgcggctggatgcgttcaacgcagacgtggcgcatgagctgcgcacgccgctggccaacctgatggggcagacccaggtggccctgtcacggccgcgcgacaacgcgcagctgcaggacgtgatgcagtccaacctggaagagctggagcggctgcgcgccatcgtcaacgacatgctgttcctgtcgcgggccgggcagggcgacatcgcgatggaaacccggccggtggcgctggccgacgaagtggccgccgccggggacttcctggagttcctgttcgaggaggccgggctgaccctgcgcatcgaaggtgaagcaaccgccagcatcgatccatcgctgttccggcgtgccctgaccaacctgctgcacaacgccgtacagcatgcgcggcccggcaccgaggtacgggtgcagctgcaggccgaaggcaagggcacgcgcattgcggtgttgaacgaaggcgatggcatcgccgccgggcacctgccgctgttgttcgagcgtttctaccgggttgaccaggcccgagagtaccggggcgaacgccaccacggcctgggcctgtcgatcgtcaaggccatcgccgtgctgcatggtggcgatgtgttcgtggccagccgcgacgggctgaccacggtggggttcacggtggcgtgttga

SEQ ID NO: 498462 - DNA, 690 bp, Stenotrophomonas maltophilia
atgaaactgctgatcgtcgaggatgagagcaagaccgcacactatctgcgcaccggcctgggcgagcagggctgggcggtcgacctggccgccgacggcgtgaccggcctgcaccttgcccgcgagttcgactacgacgtgatcgtgctggacgtgatgctgcccggcatggacggcttcaacgtgctgcgcgaactgcgccgcagcaagcagaccccggtgatcatgctgaccgcgcgcgaccgcgtggatgaccgcgtgcacggactggggcagggtgccgatgactacctggtcaagccgttctcgttcatcgagctgctggcgcgcctgcaggcgctggtccggcgcggtcgccagcaggagccgaccgaacttcaggtgggcgacctgcaggtcaacctgctggcgcgccgcgcctatcgtgacggtgcgcgactggacctgaccggcaaggaattcgcgctgctggccctgcttgcgcagcggcgcgggcagatcctgtccaagacagtgatcgccgcgcaggtctgggacatcaatttcgacagcaacaccaacgtggtggaagtggcgatcaagcgcctgcgcagcaagcttgacggcccgtaccccagcaagctgctgcatacggtgcgcggcatgggctacgtgctggaagtgcgcgatgacgagggtgacggtcgatga

SEQ ID NO: 498463 - DNA, 3114 bp, Stenotrophomonas maltophilia
atgagcacccgcgtttcgctgtccagctggttcgtccggcatccggtggccaccacgctgctgacgctggcggtgatactgctcggcgtggctgcgttgccacggttgccggtggcacctctgcctgaagcggaattcccgaccatccgcgtcaatgccagcctgcccggcgccagcgccgagaccatggcgtcggcggtggctacgccactggaaacgcagctgaccggcgtgcccggcatcatcgagatgacctccaccagcgcgctcggcagcacctcgatcacgctgcagttcgatctggaaaagaacatcgataccgccgcacaggaagtacaggcggcaatcaatgcggcggccgggcgcctgcccagcgacctgccgaacctgccgacctggcgcaaggtcaacccggccgacagcccgatcctggtgctcagcgtggtctcggcacagatgtcgatgaccgagctgagcgacctggccgagagccgcctggcgcgttcgatcagccagatcagtggcgtgtccgaggtcaatatcgtcggccagcagcgcccggccatccgcatccaggcccagccggagcggctggcagcgatgggcatgaccctgtccgacctgcgcggcgtggcccagaacgccagcctcaaccaggccaagggcgcgctgatgggcgaacagcgcacgtccaccttcgaggccaacgaccagctgttcgatgcccaggactaccgtcagctggtggtcgcctaccggcagggttcaccggtcacgctgggcgatgtcgcgcaagtggtcgacggtgccgagaacgcctatgtgcaggcgtggccgaacgggcaaccgggcgtgggcctgatcatcagccggcagccgggcgcgaacatcgttcgcaccaccgatgcggtgctggcggccttgccggagctgcgcgccaacctgccggccagcgtcgatgtggaagtgctcaacgaccgcacgcgcaccatccgcgcgtcgctgcacgaggtggaggtcaccctggtgctgaccatcgtgctggtcgtgctggtgatggggctgttcctgcgccagctctcggccacgctcatcgtcggtgcggtgctggtcgttgcgctggtcgccacgttcgcggcgatgtatgtggccggcttcagtctcaacaacctcaccctggtcgcgctggtggtagcggtcggcttcgtggtggacgacgccatcgtggtggtggagaacatccaccgccatcgcgaggccggtttggggcccgtggaagcggcactgaagggtgccggggaaatcggcttcaccgtggtgtcgatcagcctgtcgctgatcgcggcgttcatcccgttgctgttcatgggcggcgtggtcgggcgcctgttcgcggagttcgcgatgaccatcacggtcgcgatcctgatctccatcgtggcctcgctgacgctggcgccgatgatggctgcgcacctgatgaagcgcatgccggcccatcgcgacggccaggacacgctggccgggcgcctgctggccggctacgaccgcagcctgcagtgggcgctgggccaccagcggctggtgctggtcgggttcggtgcgacggtggcggtagcggtggcctcgtacgtggtgatcccgaagggcttcttcccgctgcaggacacggccttcgtgttcgccaccaccgaggcggcacaggacatcggtttcgaggagatggtggccaagcaccagcagctggcgaagatcgccgccgaggatcctgcgctgcaggcctacaaccatgcggtgggtgccaccggtggcagccagaccctgtccaatggccgcttctggttcatcctgaaggaccgtggcgaccgcgacgtggatgtgcacggcttcatcgaccggctgcgcgcgaagatggccagcgtgccgggcatcaccgtgtacatgcgggccgcgcaggacatcaacctgggcgcggggccggcgcgtacgcagtaccagtacgcactgcgcggccagggcagccgcgagctgtcacgctgggccgagcagctgaccgaacgcctgcgcgggctaccgcagctgcgtgacgtgtccaacgatcagcaggtcggcgccagcgttacccgcctgcagatcgatcgcaccgctgcggcccgcttcggacttactgccaacgatatcgaccaggtgctctacgatgcgttcggccagcgccagatcaacgagttccagaccgagaccaaccagtaccgggtgattctggagatcgcgcccggcctgcttggccaggtcgatgcgctgtcctacttccacctgcgttcgccgctgaccgggcagatggtgccgctgtcggcggtggcccaggtgcagccgccgggcaacgggccgctgtcgatcagccacaacggcatgctgccggcggtgaacctgtcgttcaacctggcgccgggcgtctcgctgggtgaggcggtttccctggtcgagcaggcacaggcgcagatcggcatgcccgacagcatcaacgggcgcttccagggcaccgcacaggcgttccaggaatcgctggccagccagccgttgctcattctggccgcgctgctggccgtctacatcatcctcggcgtgctgtacgagagcttcgtgcacccgctcaccatcctgtccacgctgccgtcggccggtatcggtgccgtgctgatgctgtggctgtgggggctggatttctcgatcatggcgctgatcggcatcgtgctgctgatcggtatcgtcaagaagaacggcatcctgatggtcgacttcgcgctggacgcccagcgcaaccgcgggttgaccccgctgcaggccatccacgaggcctgcctgacccgcttccgcccgatcataatgacgacgttggcggcgctgctgggtgccattccgctgatgatcggcttcggcaccggctcggagctgcgccagccactgggtgtggcggtggtgggtggcctgctgatcagccagttgctgaccctgtacagtaccccggtgatctacctggccctggaccggctgttcctgcagcgccgacgcgaacgcagggcggccgccggtgccgcgctgacggagcccggatga

SEQ ID NO: 498464 - DNA, 1170 bp, Stenotrophomonas maltophilia
atgcgaattcccttcctgtccgcacgaatgcgtcgccgccaccttgtcctgggtgtgttgctgctggtggtgttgtcgctggtgatgctgttccagggtgtgtcgcgcagcgacgcgcaaccggccaatgcgccgccgccggtaccggtggtgaccggccgtgtcgagcagcgcgacgtggcgcattggcgcagcggcgtaggcacggtgcagtcgctgcagagcaccgtgctgcggccgcaggtcgatggcgttctgaccgaggtgctgttcgaggagggccagaaggtgcgcaagggccagttgctggcccgtatcgatgatcgcgcgatccgtgccgacctgggtggcgcacaggctgcggtggttcgcgaccgggccacgctggatgccgcgcgctcggacctggcgcggctgcagcacctgtctaccgaccagctggtttcgcggcagatgctggagcagcaggcggccacggtacagcagctgcaggccaccgggcgtggcaaccagtcggcggtggacgccgcacaggtgcagctgtcgtacacccgtatcctggcgccgatggacggccgcatcggcctgcgccaggtggacccgggcaacctggtgcgggccaccgatacgcagggcctggtgacggtgcagcagaccgacccgatctcggtggtgttcgcgctgccgcaggacgcattgccgcagttgcggcaggcgttggctgccggcgacgtggcggtgcaggcgctggaccgcgatggtggccagcgcctcgccgaaggcaccctgcaggtgatcgacaatcagatcgacgagacctccggcacggtgcggttgcgtgcccgcttcgccaatgccgacgaccggctgtggcccgggcagctggtcagcgtgcgggtacgcatcggccagaccacggacgcactggtagtggacgctgccgcaatccagcgcggtgtcgagggcagcttcgtctaccgcgtagtgggagatgggagcgtcgaggtgctaccggtcaccgtgggtgaagccgaggacgggcaggtggccatacagggcgagctgcgggtgggtgatgtgatcgtgcgcgatggccagtcgcgcctgcgcccgggtgtggtcgtcactgaagccggcgcaccggttgccagggccggggccgcaccatga

SEQ ID NO: 498465 - DNA, 1173 bp, Stenotrophomonas maltophilia
atgagcacacgactgagactgcctgccctgcgccagcgcgatgggcaccacgcccgcgtgacctacgaagagctgttctttgatctggtctacgtctttgcggttacccagctcagccaccatctgctgcatcacctggacctggtcggggtgatgcagacgctggtgctgtggttcgcggtctggttgggctggcagtacgcctgctgggtcagcaactggttcgatcccgaggcgccacgcatccgcagcctgctgttcgtcactatgttgctggcgctgctgatgtcctcgtccattcccgaggccttcgctgaacgcgcctgggtcttcgcgggggcgtacgccaccatgcaggtcgggcgcacggcgttcgtgctgctggaggtcggtcgcagccatccgttggcgcccaatttccgacgcatgctggcgtgggtgagcgtgtcggcctgcttctggctggcgggcgccgccgccgagggcaatctgcgcctggcgttgtgggctgtggcggtggcctgcgaatacatctcgccgatgttcggtttcgcgtttccgggcctgggccggtcgcacacccgcgagtggaccatcgaaggcgggcacctggccgagcgttgccagctgttcgtcatcgtcgcactcggcgagacgctgctggctaccggtggcgtgctcagcgaggtcgagcagtggagtgctgcggtggtgtctgcggtgctcgccaccttcgccggcaccatcgccatgtggtggctgtatttcggcatctccagccgcgacgccactgcggtgatcacccattccgaggaccccgggcggatgggcgccaatttccactacgtgcatgcgctgctgatcgccggcatcatcgccaccgcggtgggcaacgacctggtgatggatcacccggaagcggcggtgacgccggtatatgcaacggtgctggtcgccgggccgttgatctacctgcttggcagcgccctctacaagcgcattgtgtacgggcgcgccccgtattcgcatctgttcggtgccgtggcgctggtcgtgttgggcgtggtcttgccgcacacccatctgctggccgccggttggctgaccagtgcggtgctgctggccgtggggttgatggatacgcggttgaagcgtcgcctgcagcgggcgtga

SEQ ID NO: 498466 - DNA, 2430 bp, Stenotrophomonas maltophilia
atgacccgccctgttccgcctgccgccctgcgccggctggcccctaccctgctcgctgcctgcctctgtgcggccctgcccgccacggcgcagaccgctgcatccgcgcccgtcgagctgcacctgccggccggcccgttgcaggcctcgctcactgcgttggcgcggcagagtggcatccagctgttgttcgccgccgacagcgtgagcggccgcagcgccccggctgttgatggccgctacaccccgcgtgaggccctgcagcggctgctggcaggccaaggcctggcgatgcaggaacgttcgccaggggtgttcgtggtgagtgccgcgccagcgccggcgaagccgcgcaccccggcccgggccgcatcatcggcgccgtcatccgcctcgacgacgtcgctggcccgcgtcacggtctcggcctcgaccgcgcgcatgccgcagggcgagaccgccatgcccaataccatcacggtgctgacccgcgaggacatcgcccagcagctggcattgggctcggatgtgtcgcgggtgctgtcgtcgcagatcccggcgtttgccccggcgcgcgagaagatgtccaactacggcgaaaccatgcgcggccgcggcatcctgtacatggtcgacggcgtgccgcagtccacgccgctgcgagatggctcccgtgattcgcacaccatcgacccggcgatgatcgaacgcatcgaggtcatccacggtgccaacgcgctgcagggcatcggcggtaccggcggcatcgtcaacatcatcacccgcagtgcgcccaatgagccgggcgcgttcctgctcgacaccaatgtcagctacagcgctgccgtgcccagccgccacgacgacaatggccagcgcggctcggccctggtgggcgtgcgcggcgagcagttcgacctggtcgctggcctggcctatgagaagcagggcctgtaccacgacggcgagggccgatcgatcggcaccaacgcgcagggcgagctgatggactcgacctcatcgaacgtattcgccaagctgggctggaacattgccgacggccaccgcctgcaggtcatggccaaccgctatgaactgcgcgggctggacaactacctggccatcaacggtgactaccggaccggtcgcccgaccatttcggtcccgggcgatacgccgctcgatccgccgatgaaccgctcgcgttcgctgacggtggactacagcgccgccgacctgctcggcggccgtttccaggcgcaggccttcgcggtcgatttcgaaggccgctacggtgccagccaatgggacccgtggggcaacaccggcgccaatgccgcctgggaccagacccagaacgaatcggacaagcgcggcttcaagctgacccagagctggagccgcatcgccgacacctcgctggacgtgaccctgggcctggacggcctgcgcgaccgcacccaccaggtgctgctggccagtggcatgaactgggtgccgcagaccacctaccagagcctgtcaccgctgctgcagctgcactggtggccgaccgatcacctgatgctgtccggcggcctgcgttacgaaaagggcgagctggaagtgggtgactacaccaccctgccccgctacggcgcacgcaaggtggccggcggcaagccgaccatgagcgagaccctgcccaacttcggcgcggtctggtacatcaacgatcgcctcaacgcctacgcctcgtactcggagggctacaccgtcgccgacgtcggccgcgtgctgcgcgcgatcaaccgcgacggccagcgcgtggacagcctcgtcgacctgtcaccggtggtgtcggacaaccgcgagatcggcctggagtacgacgatggccgcttcagcggtgacattgcctactacacctccgaatccaggctgggctcggtactgatctacgatccgggtatcgatgcctatgcagtgcagcgccaggccacccgcgtggaaggctttgaaagcaacctgcgcctgcgttggggcgacagccgcctcggcctgggctatgcacgcgccaacggccgctacgacgccgacgtcgacggtcgcctcgacagcgacctggctggtgtgaacatcgcgccgaaccggctgactgcgttctgggaacagagctggacgccgcagctgagcacccgcctgcaggccagtcacgccttcgaccgcgacttcgacctgcgtggcgcgcaggtggccgagttcaagggttacaccaccgtggatctggtcgcgcgctatacgctggacaagcatgccttcacgctgggcgtgcagaacctggcggacaaacagtacatcagctactactcgcagaccacgccgtcgaacccgagctatttctccggccgcggccgggtgctgacgctgggatggcagtaccggtactga

SEQ ID NO: 498467 - DNA, 1422 bp, Stenotrophomonas maltophilia
atgcgttggccagtttcccctgcagcgggcatcgcggcgcgttcgatgggcgcgcttgccgccctgttagccgctgcagccggcgcggaagagatcgtgccgtcaccacccgccatcgatccgtggcgctacagcgaagactaccgctacctgcaggatccggccttccgttccggcgcctggtgggagaagggaaaatggatgccgttcggtgcatccggcagcctgaccgtcggcgccgagttgcgtgcgcgctacgagcactacaccagtaatgagttcgggcacgcacctgtcaagcgcgacggcagtgcgctctatcgtgcgctgccgtatgccgatctgaagctcaacgagcatgccagggtcttcacccagctcaacctgaaccatgcccgtcgcgacgacagcaccatcggcccggtggacgataccggcgccgaggtcctgcagggcttcgtcgatctttcgctgccctcgcgcgacgcaggtgcgaccttgcgcgtgggccggcaggtactggcctacggcagcgagcgcctggtttcggtgcgctatggacccaatgtcctgcgcgcattcgacggtggcctgctcgcgtggcggacgtcgcactcccgtaccgaagccttcctgctgcgcccggtacgcaatgccatgggttccttcaatgaccgtggtgatccgcagcggcgcgtgtggggcgtgtacaccaccttccaggaccccggaaaccaccgcgataccggcctggatctctactacctgggcctgtccagcgatcgcgcccgctacgatcagggagaaggtgccgaaacccgcaatacgcttggcagccgttggtcgggtcgtcgcaacggatggagctgggacctggagggattcttccagtacggcagtttcgccggcgcgccggtacgtgcgtggtcggtcgccagcgatgtgcgccatcgcttcgatgcgtggccgctgtcgccacggctcggcctgaaggccaacatcatcagcggcgaccgtgaccccgacgatcgcgcgttgcagaccttcaacgtgatgttcccgaagggcaagtacttcggcgaaagcggccaggtcggcccgagcaacctgatcaacctgcacccctcgctggaactggatctgggtggtggctggtcattggccagtgcagccgtcttctactggcggcagagcgtgcgcgacggcgtgtatggcgctgccggaaacctgctgcggccggcgggcaacagccgcgcccggtacatcggcacgcaggcggatctggtactggggcgcgagatctcccgccagctcagcgtcgaagcggcctattcgatcttcaggccggggcgcttcatccgggacaccggccgcgccgacaccgtccatttcatcggccttgaggcgctctggcgctactga

SEQ ID NO: 498468 - DNA, 1662 bp, Stenotrophomonas maltophilia
atgcgcgtactgctcctcctcttcacgcttgtgctgccaaccgtggcggcagcggccgagccggccgacctggtgctgcgcaatggcctgctgttgacccaggacagcaatacgccacgtgccagcgcgcttgccatccgcggcgagcgaatcctggcggtcggcagtgaccgcgccatgcaacgtcatatcggccccagcacccgggtcatcgacctgcaacggcgcaccgtcgttccgggcctgatcgacacgcacatccacgcagtccgtggcggccagacgttcaccttcgaaacctactggttcgacgctcccacgctgtccgaggcgctgcagcggctgcagcgcgatgcccagcgcaagcctgacgggcaatgggccgccgtggtcggtgcgtggcatcccgaacagttcgcggagggccgggccccgacccgcgccgagctcgatgccgccctgccagacaggccggtctacgtgcagcatctgtacgacttcgccctgctcaaccgtgccggcatcgcagcgctggatctgcagggcgagcagccccgcctgcccccgggcatcatcgtcgagcgcgacaatgacggacaggccaccggccgcctgtccggtggcatcggtccattcaatgcactgttcgcgcagatcagtgccagcaccgatcacgaaaagagcctgcggaccttcttcgctgccctcaacgcgcagggcgtgaccggtttcatcgatccctccgccggcccaccatcgtcctacgaaacattgttcaagctacgcgaccagggcgggctgacgctgcgcgccggctaccgcattccggccggcacccacggtgatgaagccgagtggttccgcaacgtgatggcgttccgcccgaaccggcacgacgatggcgacatcgcctttctcggcctgggtgagaacctggtcaccgccatgaacgacggcgtcctgatggggcctggcttcgatccgccggccgaggcccggcaggagctgatcgaggtcgcccggctggccgcggagcggcgcatcccgctggagatccacgcatacaccgatgatgccgccgatgccatcctggacgctttcgaggtggtggcgcgcgatcatgacctgcggccgctgcgctgggcgatcgcgcacctgaacaccgggtcacagcggacgttgcagcgcatggcccggctcgggctggcctacagcgtacagatgggaccgtacttcgaaaccaccgcgatccatgccgccaacacggcacaggttgcggcgtccagcgccccggtgcgggccgcgatggcgctaggcattccggtggcgggtggcaccgactccacccgcatcggcgtggcaggcgtctggcaggccatccagtaccacgttgacggccagccactggcaggcgtgcgccgcagcgaggacaacctcatcacccgcgatgcggcactgcgcctgttcacccgcaatgcggcctggctgtcgtttgccgaagacgagcgcggctctctcaccgcgggaaagctggctgatctggctgtgctcgaccaaccctacctgaccatgccggcccgtcgcatccactcgctgcgctcgctgctcaccctggtcggcggccgcatcgtgcacgacagcggcgccctggacgccgaatag

SEQ ID NO: 498469 - DNA, 666 bp, Stenotrophomonas maltophilia
atgcgcggtcgccagttgctggtgaccgtcgcgctggtgctggccgcgttgctggtgctcggcatcgccgtgtggtggatgctgttcaaggacactgccagcacccgtcggccggtggtgcagccgccgatgctggcgctgccgccgccccctccgccgccaccgccgccgccggaaaagccgccggaaccggaaacgccgccagaagagacgatgcccgaaccggagccgctggatcaaccgacgccggccgaagagccgacgccgacgccggacaatgccgatccggtgacgatgaacgccgatgcgcaggccggcggtgacaacttcggcatccagtccggtagtggcggcggttcgtccggcgttggccgtggtggcgccggcaacgctacctacggccgctacctcggctacctgatgcagcaggcgatctcgcgcgatgacaaggtcaagcgcctggcgttccagttgcaggtgaatgtgtggctggccaacgatggccgcctggaaaaggtcgagctggtgcgcggcagtggcaacgaggaggccgacgcggccgtgctcgatgcgctgcgacgcatcggcaaggtcgaccaggcaccgccgccgtcgctcgatttccccgcccgcgtgctgatccagggccgccggcccggggcctga

SEQ ID NO: 498470 - DNA, 747 bp, Stenotrophomonas maltophilia
atgaccctcggcagcgacagcagctgcaatggacgcgcgccaccaccggaaccccggcccgcgcgcgacccgcaagcgggctcaaaccgtaccggcgccacatgtcattgcgatgaccgccgcccacggcctggcatcgagccaggctccgtaaagccagtcacgcatcaggaatcaatgaatcgaacagacctgttcatttgctcacagggtcagagcccgttgcgcagcaacgggatccgaccccgtaccgacccaaacgtgtcgaccaaggtcgacacccaccaggagcagctcatgccgttccggcagatcgtggaaatctgtcgaaggcggggtgggtccggttgcgggggcgtgagccgcatgggcccgaggcatgcctcgggcgggttgggcaggacgcccaaccccggtcttgccgtgtgcgcaggacagcgcacacgagcaagccgcgaccgagctacatggacgtacttgcagcgtcccccgcaaccggacccaccccgccatcccctcagcaggcccgctgttgctgttgctgttgctgttgctgttgctgttgcttctgaggttgccggccagcggccggcactacccgcgggtgccgggtgcaacccggccgcaaaccccatccctcaaagcggcagctgggtcgtctgcttgatccgctgcatcggaatctcggtcttggtgttctgcacccccgcaatccggttcaggtgctgcatctggaactgccggtag

SEQ ID NO: 498471 - DNA, 414 bp, Stenotrophomonas maltophilia
atgtctcctgccgttgtccattcaccgcgcccgctggcgcttgccgtcgccgccctgctggcgggcagcgccctgaccgcccaggccgaaaccgacgccaccgatatcgacacggtgcacgtcaccgcctcgcagatcgcgcgccaggcactgggtacctcgaccatcaccgccgaggatatcgcccggcgcccgccagccaacgacatcgccgagctgttgcggaccatgccgggcgtcaacctgaccggcaacagcgcctcggggcagtacggcaacaaccgccagatcgacctgcgtggcatgggcccggaaaacaccctgatcctggtcgatggcaagcgcatcggcgcacgcgatgccgtgcgcatgggacgcagcggcgagcgcaatacccgcggtgacaccaactag

SEQ ID NO: 498472 - DNA, 135 bp, Stenotrophomonas maltophilia
atggtctcacctgttgacaggaaagatgacaagcgccagctgctgctgaaatggttcaaacgagtttttggtggtccttggttgttccgtttcttgatggtcgtgtggaagttgtatgaccactttgatcgctaa

SEQ ID NO: 498473 - DNA, 261 bp, Stenotrophomonas maltophilia
atgcaacaaggtgagctggcggagcgcctgggcatatcacgctctcatctatctgagatcgagtcaggaaagaaggctgcgtcagtcgagcttctacacaagttcgcagaagtattcgatgtgccgccttcaacgttcctaagcttcgccgaagcccttgaaggctcctcggagcggcgtcagaagaacgccaagaggctgatgaaaatcctggaatggacactggattctaacgatgacgctcccccgaaaaagcgctaa

SEQ ID NO: 498474 - DNA, 1005 bp, Stenotrophomonas maltophilia
atgacgctcccccgaaaaagcgctaaccgctatgacatcacgtcgtccgcgttctttcggctaccgaccttaaaagcactcgcgcgagtgcttcaatgggatggaaccccaagcgccctgcgagcactgtgcaaacggcccgacaacttcagcgagttctaccaaactcatcgtcggaccgggaaaaaacgtctaattcaagctccaaacggcgtcgttaagccgcttcagaagcgacttaacgtactgctcaagcagatctgcgtcccggactatctgcactctggtatcccgaagcgctctcacctcaccaactccgaatgccacatgcttgcggaaggcgcaacggtgacggtggatgtctccgacttctaccctagcatcacgcgtcaacgcgtcttcaagcttttcagaaacgtattccaatgccctggggatgttgctgatgcgatggccgacttggtctgctacaacggaaaactagcgaccggctcccctgccagtgtacttctgtcattctgggcctgccgtgacatgttcgacctgatcgccaagcgtgttgtgggccagggaggcacgttctcgctctatgtggatgacgtcgcaatcacaggcaacaccatcggacacggtgacgttcggtggctggaccgtgtcctaagaaggttcggctttgcttcgaaagtggagaaagctaaggtctttaggaaggcgagcgccaaagtggttactggacgagcctttcgcgatgggatcagcagggcgcccaacaggaaacacaaggagatgcacgagtctagaactctggttaaaggcaccagtgccagtaccaaggtcaaacgcgggttggttggccaacttgagaacatcggcaatctggaccagcagcgcgggaagtccctaaaagcagaagctcagaagctacgaagcactctgcctcccgcacgacgccgtcgccgatcagcctctctcccgaccgccatttccggggtagagaacacatag

SEQ ID NO: 498475 - DNA, 1569 bp, Stenotrophomonas maltophilia
gtgtcctcgcaccacgcagtgaccgatgctattcagtctcccgatcggcacattccggttgcccagtatgtgcgcatgtcgaccgagcatcagcgctactccacggagaaccaggctgcggcaattgccgaatatgccaaggcgcacggcatggagatcgtccagacctacgaggactccggcaagagtggactaaacctcaaaggtcgaagcgctcttcaagcccttctccgggatgtgaagctcccctcccctggcttcaacgccattttggtctacgacgtcagccgttgggggcgcttccccgaccccgacgaggccgccgcctacgttcacgcctgtaagagccatggtgtgccggtcatctattgcgcggaagcgttcaagaacgatggctcgttgccatccaccatcatgattggcctcaagcgcagcatggccgccgaatacagccgtgaactatctgacaaggtgttcaaaggggcatgcaacatcgtgcgacacgggttccgacaaggaggcacgccgggatacggcttgcgccgccaactcgtggacgagcacctccagcccaaggcggtgctcgctcgaggagagcaaaagagcatccagaccgatcgtgtgatcctggtgcccgggcctgcgcaagaagtcgccaccgtcttgcggatctatcggctgtttctaaaggacgctatgcccgaacgcgtcatcgcctccgttctgaaccgagaaggcatccccaatgaagtgggtggcccctggagcagagggacgatccatcaaatactaacgaatgagaaatacgtcggccacaacgtctacaaccgaacctcgttcaagctgaagctgcaacacgttcagaacccgccggaagcgtgggtgcgaaaggaacatgcgtttgaagccattgttccgcttgacctgttcgagcgcgttcaagcagtcatagcggcacgttcggtccacttggacgaccgccagatgctggaagccctgcgctcgctgcttgaccggcatggcgcgctgtcagggatgctgatcgatgaagaagaaggcgttccctccagcagcgccttccgccatcggtttggtagcctgctccgggcctatagcttggttggctactgcccaaaacgcgactacgcctacttggagatcaaccgcgcccttcggcagcggcatcccgagatggtccagctagtggtggatggcatagcccaacacggtgggtgggtcgagccatgccgggataccgatctgctgcgggtcaatggtgagctcctcacatccgtcgtcatcgcacggtgcaagcccacacccgccggctctaaccgctggcgcatccgactagatgccagcctgacgccgcatctgaccgtagtggtccgaatggatcccggtaaccgtcatgcccatgactactacgtgcttccctccatcgacttcacccccgatggcatgccctccatggaggacaacggcttctccttggatgcctaccggatggacacgctggaggatttcttcgccttggccggtcgggccgcattgctggaggccgcatga

SEQ ID NO: 498476 - DNA, 897 bp, Stenotrophomonas maltophilia
atgacgaacaaaagcacaagcgttcagatgatccccattgccgacatccacgtcgccaatccgcgtgtcagaaaccaacgcatccaccgtggcatcactcgaagcatcgagacggtggggctcaaacgccccgttagcgttcgtaaggcatctcctgatgaaacgtcactcccctatgcactgatctgcggccaaggccgcctcgaggcctgcaagctattgggccaccgcgaaatccccgccctgatccttgacgtggacgagcacacaggccacgtcatgagcatcgtggagaatgtggctcgccgcacgcccagggcagccgaaaccatggagcaagtccaggtgctcagggagcgtggctactcagacccagagatagccaccaaacttggctgcactccgtcttgggtgaacagcgtggccaacctcatggagcgcggagagcgacgtctgctcgctgccgcggaggccggccacatttccttggcccttgccgtcaacatctcccgggcaaatgatcgcgatgcgcaacagttgctgatggacgcctacgaggccggtgagctcaagggaaagaaggtaaccgtcgtccgacagatccttgcccatcgagccagaagcggcaagaagggaaccagcacttacgcgcacggcgcaccacggaagaagcttacccccgaggaccttgccaagctctacaagcgcgacgtggagatgcaccaacgcatccagaagaaggccgagttcacgcaacaatcgcttctcctggcccggcagatcttcaaagagctgtttgcctctaaagagttttgcggacttctccaatcggaggggctgaccagcgtcccgcaaccactggctgacctgctgccgcgcagaggattggcccgatga

SEQ ID NO: 498477 - DNA, 903 bp, Stenotrophomonas maltophilia
atgagcaagaagcaatcttcgggcgtgcgcctgggctttgaaaaggactgcgtggacatccagttggcccagttgcattacagcgtggccatgcccacggggaccaaggcctccgtcaagtatcagcagatcgtgagctcggtccggacggtgggattggtcgaacccatcgtggttaccctagaccggggcaccgccgggcggttcttggtcctggatgggcgaatgcgcttggaggctctgaaggaactgggagcatccgtggccccctgcctcatctcaacagacgacgaaggctacacttacaacaagcaggtgaaccgcctttcggttgtccaagagcaccgaatgatcctcagggcagcagagcgcggggtttccgtggaccagttgtcgcaggtgctcaacatctcggccagctccatccgggacaaattccggctccttgatggcgtttgcgacgaagcgacctccatcctggccgacaaacccgccgccgcaggcgtctttcggttgctgcggaaaatgaagcccttccggcagatcgatgctgctcaaaccatggtcaatctgggggattactcgatcaagcttgcaacggcgcttctccaaaacacgccggtcgaacagttgatagagccattggcagcaaagacggccagcggtgcccctatcgaggcgctccaacgcttggaacgggagctagcagcgctgcaagccgatacgaagctgctagaggagaactacggcccggccagtctccagctcgaaatcgtcaaaacccacattgggtcaaccctcctggacaatgcagcagtagtgcgatggctggccaagaacaagccagaccatcttcaacagcttcagcgcattgctgacatcaagcttctcaaggcagggtaa

SEQ ID NO: 498478 - DNA, 1503 bp, Stenotrophomonas maltophilia
atgaagaagctagcattggtgttgatatctctgtgtggttcgcttggtgcgacgagtattgcggctcaagctgctgctccaccttcatctcccagtggcgccgttgctgaggcgcaggcgttagcgaacaaagagcccgccgtggctcggatcctccagaagtatggcgcgacgaccttggatgaggtggattggtcaaagggctacgtggtaaacagagcaacgggcaccgttcgcgaggtcaccgcagccgataccttgcaggcaccaaccgtcaatctttattcgagcggcgccagtattattggctgggcggagaccaagaccctttgtgcgtcgggtgaactcaatgctcgcgtttatggccatttggcatccaatgtatcccgggatcctatcgctctgaatcgagaaggcgtcctcattggctcagggttgggttacgcagtggcacgcgtggaattctcagtcctgaagattcccggcgcccgaaatccgttaaaccggtcttccatggagacgacccacgttagtcaatgcaatgccaccgaggtagtcacacggttggtgacgacttggccgccgcagcgcgttgaaatcgtggcggacacgactggctcgatgggtcctcagattggtggtctgaaggcgggtctttctgcctttatcagcacttcagaggagcggccgaacggcaagccgacggcatacgaactcattgggttcaaggacagttcggaagttctccaagagtccaccttcgacaggagcatcgcactggccgcagtgaatggcctcaccgcggtcgggggggatgactgcccggaagactccgtcggcgcattgcagttggcgctcaatcgcatccaggcgtatgaagacgacgacgcccagatcattttggccactgatgcatctccacacgaaagcagtgtgggtggagtggacgccctgattgccgcagcgacggcgagaggcgtgaaggtcaatgtcttgttgtcgggcgattgcgtaggggcggcatcggggccagcggcgcagcaggtcacgccgcgaaatacgccatccgctcgaaccgtgttctccaagattgccagtgaaacgggagggatgtatttctacatgccgggcgcgacggctcaagagtatgcagatgcgtttgtggatatctttgagacggtaacagatgaggcagaggagcttgcgcctggcgtgccgatcactgggatatctggccaatcgaacgattggcggacctttaaggtcaaggtgcctgagggcgcccatctgttgagggtgttcacctcgggtggtcaaggcgacgtcagtctctacgctcgtttcggcactagcccaaccagtgagctgaacgacgctgcttccgttcgtgcaggaaacaccgaactggtcaacgtctcccagccgcaatccggctattggtatatccgcgtgcagggtgtggttgagtttagtggtgtctctatcgaggcagccctcaactag

SEQ ID NO: 498479 - DNA, 516 bp, Stenotrophomonas maltophilia
atgccttctcccctcacgaacgaagagcgcgagctgattttcagcgcacggcagatcttggtttcggccgcccagggcgcggaaggctgggaaaccctagaacaaatggttgccgagatcgcagaggttatggaccgcctgcgcgcaaacaattgggcagttgcgaagcttcagcatcccgatctgcaactccccaagccgctcgagacaagggatagggctcggcccagtctggccgcgacccggcgcgatgttcaatcgctttcccgctccgctgcagagctggaacgtcttctggcagacgagtccttgttacgcaaagcccttcaacccaatccagtggaggtgacagccctggcgacaaaaagggcactggaagcggcttctagagacgcgctccaggccagcgccaatctgatgttctattcgagcagaagcaaaactgcgatcaaccttcacaagaacggcttcgaattccggtctggaagcgcggtgctcaaagcagtgaccggatag

SEQ ID NO: 498480 - DNA, 1581 bp, Stenotrophomonas maltophilia
atggccatctaccacgccaacgtcaaaaccttcagccgagccaaggggcactcgtccgtcgcggcagccgcctaccgtgccggacttcttctcgaagatacgcgcaccgggcagcgccacgactaccgtcggcgagacggcgtggttgaatcacgctgcatcattcccgacgacgcaccaggttgggccctggtgcctgcctcgctttggacggaggccgaggccgcggaacgccgcaaggattccaccatcgcacgggagttcgagtttgcgctgccccacgagttggacgatgaccagcgatcgtctcttgccctcgccgtggcgcgggcgttggtagatcgttacggttttgctgcacaagccagcatccacagtcccggcagcaaaggaggcatgaattggcatgtccacattctggcaaccacccgccggcttggccctgacggcttcctggacaaaacccgagagctcgacggaggccctgcaggccgggccgaggtcgagtggatcagggaactggtggccgcgacgacgaatgcgcatctggaagctgcaaacctggacgttcgcgtggatcatcgcagtctgaaggcccagtccgacgaggcgctcgcgcgcggggacctcgtggccgccgcagtgctatcgagggctcccacgcgtcacctgggaaaagacgcgtcagccatcgagcgtcgaggggagtactcagagctaggggagaggaacaggtccattcaggaggcgaaccaacacgccttcgatgaagtgctagcccggtttgaacaggaaagccgggccgcggcgcctgagaggcacagtgaagcgcaggcccaccgcgaggcaaagcgctcgaccatcgatcagacgcttgccttctccgatggtcagatcgttgtatcgcacgggttgggcaaagccatcggcgagaggcgctccgacggcagcaccgagggtgttcccagggaggccccctcggtggaggccatccggattgaggtggtccgccaaggcaacacgctcagggatgaattggctgcccatgcgctccattccacgctgaaagcggtcagtgcactggcgagcggagaagtcgttcccgaagagtgcaaggagcatcgttctgcgctcaacgggctgctgctgggcttgaagcggtttgcagcagcattggtccgtttccccaagcgtcttaaagctgtgcgccgtgcgatccgattgcggcacatggctgaacaggcgtgggacgactttgtggcgaaccacccggaacccggggtgtcttggacggctcgtgagtgggccaggcgtcgcggccgccggttggccgctctggagcagcggtctgctgagttggctgcagcccaagctgccgcaaccccggagcaagaggcgatcttggccgaagacctacgcttgcgcgaagagtgcttggaggccgcgagcgtggctgtcttggaacgttgctctgttcgagccgagccaacccgggaggcgcagtcggacttccaggagtggcccgtcacgtcggacgcgtcccagccatccgccattccacggcgcccccggttgcactaa

SEQ ID NO: 498481 - DNA, 741 bp, Stenotrophomonas maltophilia
atgtcggtcccgtctgtagacatgcattgtcatctcgatctctaccccgaccctggggtagagatcgaccgggcaggggcaagtggtgcctatgttctatcggtcactacgacgccttccgcttggctgcaaacgcgagcattggcaagccattatccgcgcatcaagactgcgttgggacttcatccgcagttggcgggggaccgcattggagagcttgggctgtttgaccgccttttgccggaagctcgatatgttggtgagattggcttggatggtggcgcggactgtcgggatttctgggatcggcaggtcgaggtatttcaccatgtcctcaactcgtgtgctgaccaaggtggaagaatattgacccttcacagccgtaacgctgcgacggaggtcatggatggcttggagaagcacaaaggttttggtgtcgcgatactccattggttttccgggagcaagaaggaactggctcgggcaatagaaatggactgctggttctccgtcggaagcgcaatggtcagcggagcgaagggccgtgagcttgtgaagttgatgccgccagaacgtgtgcttacggagacagacggtccctttgcaaagtcgcgcggtcgagcgttgatgccggcgcagtgcaccgagatcgttcaacacctttctcaagtttggggtatgtctgctgaagctgcttcgcagaaaattttgaagaacctgcgagagctggtttcgctgtaa

SEQ ID NO: 498482 - DNA, 1308 bp, Stenotrophomonas maltophilia
atgactgtcatctacgttcaccctgatctggctcggcttccgcacccccaggctaatgtcattccagtccatctttatggaagtgttccgaacaaggccgggatggctgcaatcggccatggtctctacaatcggctggctcgtctcaaggcagccattgatccagttgcattcgatttcctgtcgctatcgatggcagtcacggcggctgatacgttcgtcaatcgcgatgacgctgctgatggttgggcgcgtgacatccgactgactgtggcactcgctgatcctgctcggtggacgcccgtggccccaactctcactaaggcactcaacttccttagtggggacgtttgggcaatcaacattgtcgcgggtggagagagaccgccggtcttcaaagttaggagtaggttgattatcgacccagcaccctgcgattgcgcctgccttttctctggagggctggacagcgctattggagtgctggatcttgtaaagcagggtcgcaatcccattttggtgagccatgcctacacgcacgatgcccagcggcaaagggaaatcttgccaaagctgggacctaagcttgtcagatttggtgcacaagcgagcccaagcggacgcttggatgccagtcacgacgtgcagatgcggacccggagcttcaacttcctggcgatgggggtgctgatggcatcctcattggcagttcctgcaggaaatcgtaggactctgttcgtgcccgagaatggattgatcgccttgaacccacctttgactccaaggcggattggcgcacttagcaccagaacaacacatccctattacttgcatctgatgcaggggattctggaccgtgttgggctgctcgtcgatattgacaatccctacgcttcgaagagcaaaggggagatgatgaaggcgtgcttagatcaggtgcgcctaagcgccattgtcgacaggactgtatcctgtggaaaatggaaacgcaaaagaactcagtgcggccgatgtgtcccgtgcctaatccgtcgtgctgcttatcacggttccggcatgaaggacaaaacggactatcagcctgagggtcaggatctccagaactttcttgaccatggcaatgactccgatgatctgatggcaatgctgcttgccgtcaggcgtcttcctaaggccgacgtggcgaaatgggtgtcacaaacgggcccgatgccactcgctgcggccgatcgggattctcgcgtagacgctgtgcggcgtggcatgattgaggtagagaactatctcaggtcacaagtccatttttga

SEQ ID NO: 498483 - DNA, 756 bp, Stenotrophomonas maltophilia
atgggaacgtcaacatcaagcaggggcgcgaataaccgtagcccccttgtcccaccgtgggcagacgtagacggtgcagggcccggtcccgaaccagaagagaatcgcttccgttccttccgcactcatcttggaaagttcgtttcaagcggcgatggccagcagctcagccgggcacttgctagttatgcccgttcttccacaggcggctctgccgtggggcctaggcgtttcggctcaatagcacaggctggcgcgggcctgttcggagcgctgaatcagctccgaacaaactctccaaatgcaccgatgaacctggctgctatggcaggaaggccaacgcgcgaggttatcgacgcgttggtcgatgcgttggtgccggagaatggggatgctgaccggatccgcagtgcgctcaacgaggcgctatctctctgcttggatggcgtggcggtattcgattttgccagcatcacggatgagatcttggtcaatctgatggttgcctatacggctctgtcgatctttcaggcggtcgtgctggactctgatagggcgtttacgaagggcgcaaccgcagacgctgtggagcgagctgagaaggaactgatgcagttggtagaggtggtcactgacaagcatatgaagccattgcttgctggaaagatagcggcgctgaccacggacgacatgcaagcggtgcaactcgcagctatcaaggaagtttggaaagaatgggaggattaccagcaatga

SEQ ID NO: 498484 - DNA, 1770 bp, Stenotrophomonas maltophilia
atgtggtccgatatcgaaacgaagcgtgactacctcaactatctggaactggcggaggttgtctctgaggttctgctcaatccgaacatgcgtcccgtttccgtgggggtgtttggaacctgggggactggcaaatctagccttctgaacctgattgaggagaagttgaaggctgatgcggaagacgatgtcatcatcatccgcttcgatgcttggctatatcaaggctacgacgatgcacgggcagctttgatggatgtcattgctcgccgtctttacgaggccgcgaagcaagacgcgggtctcatcggcatcgcaacgagctttctgaagcgcgtgaatacgatgcgcaccttggcgttgggggttgaagttgtcgccgccttgcatggagtgccgttgatgggggcgggctccaaagcggtagctggcatcggtaagttgatagctggcaccccagatgctgaaggcactcaggatgtggcggacggagccaaggcggttggcgggctgctcgatcccaaaaaggtgaagagcccgcccgagcatattgatgcgtttcgagacgagttccagaagttgcttgcgggtctgaataaaacactggtggtctttgtcgacaacttggaccgctgtctgcccgaacagaccatccatacccttgaggcacttcgcttgttccttttcatggagcaatctgcgtttgtggtggcagcggacgaagacatggtccgtcactcggtgagccagcattttgacggcgccaacgaacgtcatgtcacggactatctggataagctgattcagatcccggttcgtgtgccccggcttggtgtcacagagatacgcgcctatcttttcatgctctttgcggaagccagtaaggtcgatgcgaggaaagttggcgaacttcgaagcgcccttgaggggaatttgcgttccacttggaaagagtcgcccatggccgtcgcggacgccgtaaagctggtgggggacgatgatgccatcaggatgagctttgacattgcggaacgtatgtcaggtctgttggcgaactccacgttcgttgagggcaaccctcgaatagtcaagagacttctcaacgttgttcgcctgcgtgcgcgcatagcgcagcggcgggggatgcctgtcgatgaagcgatggtcgcaaagttcgcccttttcgagcgttgcgtcgacccgacagcagtcaagaagctttacgcgctcatcaatgatgcggctcaaggaaagcctgacttgatcgccaagttggagaaggccgctgatgatccgaagaaattcgaggatgcttgtccggaagagtggaggaagagcgccgctttcctgtacgactggatagggctgaagccgacgttgagcggggtcgatttgcggccgctcgtgtatctgagcaaagaaactgcggttcttcgttccgtctctggtgatatgtcgcaagcatctgcagaagcagtgggtcggcttttgaacgtaaagacgattgcttcgcccgcagcgggcatggcgattgccaatattgctccaggcgagcatgtcgcggtcatgagggagcttctcgcctcgctacggggacacgcggactggggtagtcgcccagaagcgatgaatggagcggttttgttggcagactcgaatgacgacgctggtcggcagttgggtgcattcttggcgggtctccccggtaagaagtcaccttggctgaaggcccttgtaggtgataaagcttgggctaagggagtagcgtaa

SEQ ID NO: 498485 - DNA, 1401 bp, Stenotrophomonas maltophilia
atgaccgccctcccctcctcagcactcaccgactacatcgcatcgcccttcggcacccttcatttggaaggcatccacatcggtcgcttccgcattgaccgagccaccatccaaggtcgcgaggcggcgatcaatctccaggaatgcatcctggctgccttggacgagaccggccgcaagaacaccctgaaaagcggcacccgctatccccagcagctgccgatggggacaccagcgcgccccttggccaaagagatcgatgaccacctcgcggacatgcgtcgccggcagctggatcccaaaactgtgctggccaccgagcgcaccctgaagcttctcctgctgacctgcggcaacatttcggcctgccgcgtggattacaagcacatccaagcgttgtggcaactgctgcgctgggctccgaaaaacctgttgtcggatcccttgctgaaacgcctcagcttcgaagacgcgatcaccttgggcaaagagcaagacgtgccacccttggctccggccaccgaagagcgccatcggcgcttcttggtcgccttcttcaaccacctggtcaacgggcaagccatcgcgtcctcgcccatgaaggccttccgcaaaccaaaagaagatcacgccatcgatcccgacaaggccatccgcctgttcgaggacggagacctgcaggccatcttcgacccggcagccttcatcccttgggcgagaaagccgcagcactggtgggcgccgatgattggcctctacacgggcgctcgcgtcaacgaagtgtgccagctgaagctgaccgacatcctccaggagcgcggcatctggtgcatcgccttccaaaagaccatcgatgaagacctcgccgcggatccgaagcgccaacggcgtagccggcaaagcatgaagggagccgggtgcatgcgcatcgtccccatcgccaagcccctattggacgccggtttcctcgagttcgtcgaagacatgaaggccactggccacccacggctgttccccctcctctctgccggcgtgaaccggaagaccggagagaccaacgcccgctacagccagcaattcgtggtggatttcggccgctacttgaagagccttgggttcgccaaagggatcgggttccatgccttccgccacaccctggcgaccgagctcgatgtgaacgatgttccggagagggagattgcgctggtcaccggccacagcaccgatccacgggatcgggtccaagtgttgcgcaagcactacctccacaagaaaccacaggtgacccggagcaagcagatcagcgccttggagctgtatcggcccaacgtggaattgccacgttaccagcgtgggcagtttgcggaacaattgggtgatccgagcaagttctatccatga

SEQ ID NO: 498486 - DNA, 369 bp, Stenotrophomonas maltophilia
atgaccatcgatgtcagcggcctgtcggccaaagaactcaagaccctgatcgctcaggcagaaaagcagcaaaccaaggtgctaacccgacccaaggctgcggccatgcgagccaagatcaaccaatacgtcaaagaccacggttacacgattgaggagctttacggatcggtttcaacggcctcttccgagtcatccaagaagcgcaccggccgcaaaccctcgaagtccgccggcagcaaggtcgcccctaagtaccgcaatccggccaaccccagcgaaacgtggtccggacgtggccgccaaccaagatggcttgctgcgctggtccagaaagggaaggattccagcgagttcttgatcaagtag

SEQ ID NO: 498487 - DNA, 948 bp, Stenotrophomonas maltophilia
atgcgcccactcgcaggcgtgctgaaggtggagttcctcgacagggtgggtcagcggtggaccaagtgcccactgagacgacgcttggagttgcttcaggccctgtcagcgctgtttgaccagtttcaccggatgggcttggccgaccctcatttctccagacttttggctcggggttcttacgcggaacaccaccaaaggctcgcggagatgctcttggcaaagtacctttgggacaatggcttctcgttgaccagcgctcctgttggaccggacttcaaagcgaccaagaacggccattcggtgtggatcgaattggttactcccgaacccgaggggattgacccccactggctgagcgagtcccacaaagaaggcgtgtggacctacccgcacgaagcgatcgcactgcgctacaccagcgcactgaaggcaaagcaccagaagctcgtgggggatttggggaagagcgccggctatttagccaaaggtatcgtgtcgccaggcgagagctacgttgtcgcaatcaaccagcatctcctgcagggcgtccctcgttcgctcaatgggattagccaagcacctgtggctggcgaggtggtctatgcgattggaccgcagcagctgcatctaagccgttccaccggacaggtgctccattcagaccatgcccaccgaccttcgctgagcaaagccggcgggacggtgggcgtgcctgcggacagcttcctcaatccagcatacgatcccatctctgcagtttgggctcttgaccttcaggaggcagcactactctctcacagcgcgcctcgctttcccgctgttcatttgtccgcagtgatccacaacgaaagggccacctccagagtgccgccccacttgctgcctgctcaggaagactggatcggaaggacgacggcctcttccatagagttgtgtcgactctag

SEQ ID NO: 498488 - DNA, 774 bp, Stenotrophomonas maltophilia
atgttcgacatcccgcgcaacatgaaactgcttcatcaaggcgaagaggaacttcatgagcgctccattgctctgatcgcatcccatcgagatctttcagatcacttggccttggtagagcgggccatggacgttctggacgtgctccgccagcaccaccaagccaatgatgacgagcgtaccgtgagccacctcgcgatacgctgtttcaatcactttgctgggtcatggaagttgacggcctcgggctactaccaagcggctgcgctccttctccgagacgttgttgaaaccacctacttgatcaacgccttccacatcgaccctacccacattgccatgtggcgtacggctgaccgcaagacgaagaaggcactcttcgctcccgcagcggttaggaagcgcttggacgcggacatgggagtcgcacgcagtcggcgggaacagatctatgccacgttttccagcctagctggacacccctcggtcgaagggtttgcgatgcttcggccaatggggatggacgcgcacaacggcccatttctcgacccgacggcgctgcgcgcacttttggaagagctaggcaagctagcggcccaaaccggacatgcgttttgtgccttccttgacttgtctaaaccggccgccgcgcaagttgcacaccgattcatcgcacttgccatggactattcaggactctatctaggccactcttacactgacgaagaacgcgcagaggtcgatcgactgtactcagaaatcgatcagagctga

SEQ ID NO: 498489 - DNA, 615 bp, Stenotrophomonas maltophilia
atgagtatcctcaacgttttgctgagcactgaccagctggtcgtgacggtggatacctgggcggaggacgctgtaagcggccaagcttcggcaggtgcgaaggtgctgctcattcctcagcaccagatcttgctggcgacccgagggtcggcccagttcttcctgcgcatctaccagctctcgttggaagccagttttcgagcggacttcaccctggagcagctgacggcggagttggggcgggtcattgaccagctttggccgaactacgctaaagccgtggctgaagcgggcttgccggcagaatactgcaccacggagctggtgctgggcggatggtcccccaaaagcggacgcatgatggccaccgcctatgccaaacacgacgcggcggagcccgcagtggtccagccgatcacggggcagctctcgtcgcctggcgagcctttgcaggattggccgccctcaatggccacgccggccctgtttgaggcgggccggcggcaggcgcagtggcttaacgaaaggacgggcaggcgagtggccggagggcggttgttactagggttccttcagccgggccaagctgtcgtgaaagacctcggcgctctttaa

SEQ ID NO: 498490 - DNA, 279 bp, Stenotrophomonas maltophilia
atggaaccttccctagaacagttggccacgcgccttgaggcatgcgaggtcgacttagaagcccaccgcggctacatcaaggcactggagtacgggctgcgggcggtcatcgccagccatccgaacccccaggtgttttcacaggcatgggggatgacgctggccggagcgtcggacgcccacgcaggaaaagacggatatgtgttcaccagtgccatccagcaggccctctgcgccttgactgctgaggcgagggcggatgcggtcgcgccgagatga

SEQ ID NO: 498491 - DNA, 1464 bp, Stenotrophomonas maltophilia
gtgccatcggactaccaactgttgcctctgcggttccggcgcctgccgtgggatcacgatcgggctttcgtctcgtcgatggccggcgactggctcttgatgaagatggaggacgttgagcgcctggtgacacaccagcttccgaccgagtccgccctttttgcggatttggaaggccggcatttggccgttgccgggaccgatcgaagcagcttggcccccttgcttagccagatccgcagccgaaagtcctacctgctgggaggacctgctctccacatcttcgtggtgtcgctgcgctgccaccacacatgcaattactgccaggtgtcgcgacaggagacgagcgccactgcgttcgacatggaaagtgcgcacgccgaacaggcggtggaacggctgttcgaatggccgagccaagaactgacgatcgaattccaagggggtgaacccctgctcaattttgagcaagtgaaggccatcacccgacggatcgtcgagcgaaatcagagcgcccgacgcaccctgcgcttcgtgctggcatccaccctgcatgacctcaccgacgaccagctggcgtttctgaccgaacatcgcttcaagctgtctacgtcactggacggtcccgaatggcttcacaacgccaatcgcccccggccgggccgggacagctaccgccggaccgtcgagggcatcgaacgcgggcgccgttggctgggagacgatggcgtctcggcgctgacgacgctgacccgccagagcctagaggttcctgaggccatcatcgacgagtaccggaagctgggactccacagcatctccctacgtcccttgagcccctacgggttcgccaccaagacggcccggcgcaccggctaccccacggaagacttccttgccttctaccggcgcgccttcgatcacttgctgtcggtgaacctggccggttacgccatggaagagtcctacgcgtctctcctcctctcccagctcttcacgtccttcgggcacggctacgtcgatctccgatcgccttctggagccgggttgggcgccgtcatttatgaccatgatgggcgggtctatccgtcggatgaggcacgcatgctggccgccatgggggacgatgcctttgccttgggccacgtcagccaaccggtcagccaatggctgtcctcgcccgccatggcccgcttgctggacgccggcgtcgccgaggccctacccacgtgctccgactgcgcgtttgtcccgatgtgcggggctgatccgatcgagcactacgcccgccaagcggatcccatcggccatcggcccagcagcgacttctgccggcggaacatggggctctttgattatctgctggagcgatacgagaaggctgaccggaacgtccaagggttgatgcgctcctgggccaacccgaagccatcgatggaggacgccgtccatgctgccgcttga

SEQ ID NO: 498492 - DNA, 1170 bp, Stenotrophomonas maltophilia
atgctgccgcttgaaaccagagccgagctggcgccgtcggcgaaggccagcctgctcaaggtcgtgtcgctggcagagtttgcccaatcagcgcttcccttggagcgcttggcccttgacctgcgggacgtcccagcggaccacttcagcagtgacctgttaaacctgccttggggtgcagtcttgccctcaagcgggttgcactctccaagtgaggttcctctcgttcgcctggaaggtccgccgggtgtttgtaagcctggggacgtggtggagctcaatcccctgcagaagaaggtggcgatccgctatcggcgcggagacaccggcaatgtcttgttcgcgaccgagcgctgcaacagctactgcctgatgtgctctcagccgccccgagacgttcaagacgattggcgggtgaggcacctcttggacctgatcgacctcatcgatccggaggaaccttcgctggcgatcagcggcggggaaccaaccctactgggcgacgggttggtcgacgtggtggccaaatgcgcgcacgtgctgcccaacacccacctccacatcctgtccaacggtcgcctgcgtgagcctggcctgcatgccaaatttgcaggcctccatcccaacctgagctggggcattccgctctacggcgaccgttatgccctgcacgactacgtggtgcaaagcgagggtgcgttcgctcagacccttcgtgggctttacgcactggaggccgcccagcagcgggtggagatccgcgtcgtgttggtcaagcccacggtggagcggctgatacagctggcgcgctacatctggcgaaacctgcccttcgtcgaacacgttgcactgatgggtatcgagcccatcggctttgccaaagcccatcagcgtgagctttgggccgatccagcggactacggtgacgttctgtccgaagcggtggggctgctggccgagggcggaataccggtctcgctctacaacctgcccttgtgcgcgttggaccgatcgctttggccctacgccgtgcaaagcatttcgccttggaagaacgactacctgcccgcctgtgacggctgctcggttcggcagcggtgcggcggcttcttctcgtgggtcacaccggcttggaccagccggtccatctctcccgtcctggaaacctga

SEQ ID NO: 498493 - DNA, 672 bp, Stenotrophomonas maltophilia
atgtccaacgcactgatgatcgtcggcgccgccacgttgggaaccttgggcacggagccgcccaagggccagtccgatctttccaggctctccgagatggacgggaaatacgcgaccgtcctgagcacctcgttgaatgcaggccggcacaacctgtatgcagggcaccgcagccacagctcccatcgatcacacagttcccatcgctcccattcgtcggggtcgggaagctcgtatcgctcctataccccgccaccggcgacctatacgccaccgcccacccgctacaccgcgccagcggcaccggtggccccagcagctccacgaaccactggcacgggcagcagtggcggcagccatttgaatagctaccagacccagaatctggatccagccacccgagcaaactcgagatccacgaacaacctgaccttggagcccggcacctacgacaagccggccacggagggacgggacgccgatgcgctcaagctgctgatcatgcgcgtccaggcagcgctctattccaagggctacgatccaggtgccatcgacggagtgcttacccctgaaacccagtcggcgctgcgcatgttccaattggcccacggcatccgggccaccggaacgatgacgacccccaccctggacgcgcttggcgtgcggatctag

SEQ ID NO: 498494 - DNA, 204 bp, Stenotrophomonas maltophilia
atggaccacaattgcaacaacaagcagcacagaggctcggagcacgactggcaacaggccatcgatgcccttccgattttgatcgtcgaacggaaccaagcttccgccatgagcaccgatgcgttgatcgcggcggcccaatcaggcttgagggacgcctgtgagaactatcggacggctttgatcgagcatcgaggaacgtag

SEQ ID NO: 498495 - DNA, 495 bp, Stenotrophomonas maltophilia
atgaatgcccatgtccgctctcactcgaccgcatcccatatgcagtggggcctgctcgcacccgcaacggtcctcctgggcggtgctggcctgctcgccttcgcaggcggcgcagaaatttctggagagctggggcttgcctggcaggctgtggcggcgttctcggctggtgttggcgtgctggcgctcctcctgctgctttacgtgctgaactggcgggcggcgcgcgttcgggcagctaaggcgggcaatccctttctggaatcgaggcgcgggggcttttggaagggagcattgatgggcacgctggtcgtggtggccgtgcagatcggaagcatcggggtggggatcttctaccctggcctgatcgagtcggagcgcaacttcttcgtgtctgtcccgccgctggcgttggccgccctctacaccgtcttcccgattgcgccactggtgggcgggttgatcgggcgcgtgtggcgcgccaccagcctgtag

SEQ ID NO: 498496 - DNA, 363 bp, Stenotrophomonas maltophilia
atgaagcgtggaatggtggtcgctgcggtagcagctgttgccttgatcgcttgcggtaacgcggaacagggaccgtcggtagagcaggttgcaaaggggtacgagcagtatttgaacgcgaacctggtggccgagctggggcagcgcgtggaagtgcgtggctggggggatttgaacgccgactgcaatccgagcgggcccgaacgaacgacttgcgtcacgggcggcaccctcgatgtgatcggtttccaaggcggtcgccaacttaaggaggctcctgcacctgtgcctgcccgggcagacctggtgtttgaaaagcgggcagggcagtgggtgctgatcgacgcacagaagaagccctga

SEQ ID NO: 498497 - DNA, 864 bp, Stenotrophomonas maltophilia
atgaagaacggggcagttctggctggcgcgatcgcgctggccgtatcgacgggtgccagcgcccaatccacgaccgcttcaggcctgctttggcagatcggtggggccatttctgggaagtccgactcgcaggccaaggtgtcccaccccctatacgccgaacctgctgggatgtactgggacctggacggggacacccttgagggtgctcagcacctgcgcgaagggctgtcctccaccggggcgcaagggatcgacatgtgcgacatggccctgctggccatggcccattctgcctaccagttgcggcctgacaaacggcagtggtgcttgcggcaggcgtgggtggccgcaaagaggacgacgggcagcaaagaggcggagccgtcagcggcggtgatcgagcagcgcttcgggcctgctttcgacgcccggctggagcgatttaaggggatccgacgatatgccgttcgcccgaacttcaaggcgctgggtggggtcagctacaacgcagatcggggcgtcatggaagtgttcgtgccgatgccgcagatctcggttgctggcttgagtgtcacgggaaagaacttcgtcccttggatccgcaagacgcccaccggcgtgtccagccctccgaacgccgggcgctaccggctgctgatccggatggaccccgctgaagcggccaacctcgcgcggcaagggcgctcttttcaggacgaccgggtggtcttctcagtcaatcgggtctgggtcgatggcacggagcccaagatggacgtgaccgtcgagaaggtgagcttgggctatcggaacgaaacgatcgaagtggacgtcactaagaaccaaggagaaggtgcatga

SEQ ID NO: 498498 - DNA, 300 bp, Stenotrophomonas maltophilia
atgggcctggacaaagacaccgcatcggctcgcatcagtcgctacgagagcgaatcgatgacggtgagcctggaggcattgtttgaactggcgcaggcattggacgtgccgccggcttacttgctggcgacgacgccggcgatggcagacgccatcttggcgctgggtgttcaaagcgaggctcaacaggccaagctttctcaagcccttgaaggtctgaccgcgctcccgccggccaagcggaagcaagccattgaccacctcttggctaccttccaggggttgaaagccagcgtttag

SEQ ID NO: 498499 - DNA, 510 bp, Stenotrophomonas maltophilia
atgagcaacaaatatctcgatcatctgcaggtacttgtagaggacgacgccaaccggcaactaatcaacggcctgagccagcatcactcaatacagctgcggaggttgcaggtgctcccgcctgccggcggatggacggccgttctggacagcttgcacgacccggctaggcttcgggggcttgccgaattcgacaagcgacaccttctgttactcatcgatttcgatgataagtttgacgatcgttctgcaatctacgcagatcacaaagcagccatgacctctgacgtttcaaatcgcatctatctgcttggctgcttgcatgaacccgagaagctgagggctgctatcagacacggcaagtcatttgagcagataggccgcgaactgtcggacgactgtgcgcctcatccagcccagaatctctggcagcacgcgcacttgcagcacaacacgaccgaactgaatcggttggtggcccaggttaagcccttcctgttcacaccgtag

SEQ ID NO: 498500 - DNA, 1113 bp, Stenotrophomonas maltophilia
atgatcgaacgcctgtacatccacaacttccgctgcctcgataatttcgagtttaagcccggtggcgcaccttccgtgctcctgattggtaaaaacgggagcggcaagtccacactcgccaaggctttaaacgtgctgcagcgcattggtcgcggtgtgacgcgaactggtgaactcgtcaagcccaccgattgcacccggggccgcaaggacgtgccgatgcgcttctcggtcgaggtccgcctggccaacagcctacatgtctacacgctagcgcttgaattacccgaacgattcaaggattttcgtgtactcgaagagtcgctgcacgtggacggccaagagatctacacgcggcagcaggcacaggtgagcatgccttcccgcggcagcagagcaggggcgcagttcagtatcgactggcatgtaatcgcgttgaacgtgatccaagaccccgagtttagccagaagttgtctactttccgcaaatggatggccggcatggtgctgctgtctccggtgccttcgatgatgacgggcgactcgaaggaggagtcgctgcagccattggccgatggcggaaattttggcgactggatggctgggctactggcccagtatcctgcagcctacaatgacatagttaactatctgcgcgacgcactgcctgatttgcaccagttccgcaacgtacccaccggccgtgacgccaagacgctgatggttgacttccgcacaccgccagcgggtcagctggaactggaattcgacgttctttccgacggcgagaagtgcctcttcatcggagctgtcctgatagcagccaacaaggcatacggcccgctgctggcattctgggacgagccggacagccatttgtctatggccgaggtgcgccagtttgcgatggccctgaggcgtgccttcgatgcagccgggcaggtcattatcacatcgcacaacgcggaaaccattcgcagcttctcggacgataacacctgggtgctcgaccggccgagccatctggaacccacggggatccggccactggccgaactgcaggtgcagggcgacctagtccaagcattgctctctggcgagctgtcctcatga

SEQ ID NO: 498501 - DNA, 366 bp, Stenotrophomonas maltophilia
atggtggacgtagccgtgcatcgtcttttgagactgctccccggtatccaacaagtccgcgtaacgcttttcagcttgaccgccgctttggcgctgacggcctgcggcagcaagccctccgatgatcaggccaagaaggccatcactgccaagtttgagcgcgtgctcggaagccaagtttgggtaaaagagtatcaggactccagcctcagcggctgcaagcagtccgagatggcagaaggagtggtgtgcgacgtaggagaatcggtcgtcctcgacattggtgacgtagcgcaagcccggccgttcgttcagccggttcgcttttcgaaagcatccggcgagtggaccgcccacaacctttga

SEQ ID NO: 498502 - DNA, 1170 bp, Stenotrophomonas maltophilia
atgatgagtgggcagtgcaaagggcttgctactatcgcagcctatccaagtacggataccatagcgcctcgaccagaaatcgcgagcgacttggtgacgacgccgactatttatgactggattctgagtgaactggatatattcgagcgcagcccaccggtcaactaccttagcgcagcgctccagatcgcagttttccatctactccgatctgggatatcaaataatgttgatgaagaaagctttaccgcggcactgcttggttcgttctgcgagtcctgccaagtgtgcgtggccggcatgccacctgctagcaactcatgcttaacgtggcgtcggcacaacaaaagcagtaagcggacgcatggagagtctgccacaggagcagatttttccttgataattcgccatagcaacagctttgcgcgagcagcggtctttcaggcaaagaatggtcaatcagatgtgggtagcttcaccgcggaccatctctcgcctgcgacagagcattacccctgcgaacaacagttcgttaggctaagacgttattgccttggcctcctcgcgagaattaggaatctgaatgaaaaatcactaggtcagacgaatcttgactgggcacactatctcatctacgaaaaatccgccatctactgctcccccttgagctccctgactattctcaacgatcgaattaataagaatcactcgcctggcacggtaagatataagaaatatccttacttcaacttcgtcgacattctcatgaatgggtgcaaccaagaagtgggagctcaacgtcaatcgggctggctaagccttgaatcgcccagtgaaatcaccaatttcgttgattcaacaaaagatctttacgatatttacgaggcacacgtggatccctcgattgactgggcgcctctaatagaagaccgcgagaccctatcagatcaagaaaggattcgactgataaaagaaagtcttctctcgacttcagcgaagccactggcgcaagaatcggcagccctttcttcatccacagcgccaaagcaggccactccactcttaactcttctgaacgagcgaaaacatcaaaatacgctcgaaaccgagaaaaaaggggggaagttggatggaaggaacaggcgaggaacgacccctaacaagccatag

SEQ ID NO: 498503 - DNA, 444 bp, Stenotrophomonas maltophilia
atgaacgcaagcattgcagccgcaatgggcttcgacgacctctacgggggcagtgaggctttccgcgaacgcttcgatgagatgctggacgcagtgaaggcgctgccagaaagcctccaggagcgtgggtggtcactgatgtatccccagcttcacaacgcttgcgtgatgggggatgtggagcttgtgagggcgcttttggctaccgggctggaccccgatgcgtatacctacacagacgacgatgaggatcagccgccattggtttggctggcccgtgacgtggagctcgatttcgaggttaagtgtcaggtcgccgaggcactgcttgctgtgggagcgaccgttggcgagggggattcagaatgggaggctaagagcgttggcgacggcgatttcgctagtttcctgtacaccatgggccagtctgacaaagcgggctga

SEQ ID NO: 498504 - DNA, 774 bp, Stenotrophomonas maltophilia
atggaatgccagcgcaaagaagaggactacctggagcagcgctctgcggcactggatgctgaactgaacaaagccgccgcaggcttgccgcctccgacgatcagcaccaaggcagcggcgcgttacctgggggtgcacttcgacacgctcggcgagtggcgccgtcgaacgcctcctgcagggccgccgttcgtgaaaggagccggccgcgctggtggaggggcgaacgagcatgttcgttacccttacaccgaacttgtcgcttggcaggcctcgcgcgtggggcgaagtgtcaaagagcgtcgcctgatcgatgagttggacgcagcccagcaacgggtccgtgagctggaaatcgaattggccttgcggcaggcgcgcgacgatgcaagccgacttcagaagaagttggggcgtatcgcaacgctgaccacgctcgatgacattgccgtggttccccatgagtgggcattggtggatggcctggtggcggggcatgtcttggtggtgaacgaccaagtgctgagcggtgcgcttgaacggggtgacgtttgggatgccacagtcgaggtggccttgcaggcgccttggggcgacggggagacgcgtgagccctaccacgccgcttacgaaaaggtgttgctggtggcgatgcatgaactctgcgaagcccaagccgctcagcgagccaatgatctggaggcgcgctgggcgccaggggaggcgatgggtgtgccactgcggccttttgcccgagacaaagaagtgtcgtga

SEQ ID NO: 498505 - DNA, 1914 bp, Stenotrophomonas maltophilia
atgttgcgacggacagacggcggatcgaccatggatacggttgttgcggccccgcgccgccgaggcaccaagtttaagctgacctaccggcaaatctgcgagttgagcgtggccaaaggcccggtcgaaggcaagcagggaagggtggtcatcgccccgcggccgtcggcagacgccgggaagccttaccgcgtcctggacggcaaccaaggtgctccgactgggttcgggttttacgtgggcaccacccgcaccacttacgaagtggtggtccgaggcccggccggggttcgtcggttctccttgggcagcgtcaccgacatcggaccggagcaagcctacgagctggcccggcggaagttggccgtggttcgagaaacgggcgagcatccttcgaaggaagaggcccgagccgagcagttggttgagctgaaggggctcacgctggcggattgctttgcggcctacgttgaggacctgcagaagcgcgtgcgcaacaagaaggccaagcccgccagcatccgggccatccaagacagcttggcgcggtttgctcgcccggaagtcgggctggcggacaagccgatccttcagcttttggacaaggacatccaccgcgcgttcgacggcctgcggcgatcgtccatggtgcgctccaaccggatccccaccccaatgcgccaagcgctggctgatcagccggactgggccgcactttccacgcaacagctcgaagcgttgggcgtgaccgggaagtacatccagcgagtcaaagcggcgggtctagcatcgaccgagcacgcgtttacggacgccaagagagcgatcgacctggtgctgaagcgggaacgcaaagcggcggctcagcagcagcgggagccggtgctgcgttacaaccccttccaagtcatccacgacgacgacatgctgcgggactcgcaagcactgcgccggcactacgagcgcgccgaagtgcgcaatccgttgggggacgagacgctgcccacggtcctcaaggtgatcttggctcggcgggacgagcaaggtggcttgaacgccaccggcgcggactacttgctgctgaccttgctctggggcacccgccgcggcgaggccgctcccctgcgctggtttgaccggtgctccccgggcgagctgcgccagtcggaagtgtcctgggtctggttggctgggccggatgaggtcaacccctatacgaggcgggcagggtcccaggtctacctgtttgacaccaagaatggcgaggagcgctacctgccggtcgcttactttgctgaaaagattttgcagcgtcgattcgacgagcgcgcggacgaaaccaagctcaagcaagacttggcggacgccgaagaagtcttgggcgccgctcgagccaggcgtgcacgtagggatctgctggaccggctggaaaaagaggtggagagggcacgccgcgcgctggctaaaaccatgtttgtattccccgcccgatcggaccggagcacgacggggcactactcggacagcaagagcatcgtggcaaacgtgcgccgcgacgcggggttgctcgatctgcgggcagaggtcgacatcggtctgaccctccacgacctgcgtcgcacgctcggtcgctacgcggccctactgtttggcgagagccggatcgtgtcccaactgctccaccacagaacgttggggcgaggtgaggatcgcatggccgctgtctctgagcgctacaccgagcaagagtggtccaggctccgagaggccatgggccgggttgaagagcacatggtcgcgaccagtcctcgggtctggaatcgcttgaaggggacggacaagcctcggttggacgaatccagcgactcccctgtctccattttctcatcaagaaaccgacgcgacccccagtaa

SEQ ID NO: 498506 - DNA, 165 bp, Stenotrophomonas maltophilia
atgggcattgccatgaccggcatccccgaagactatggcaatgacctttccggtatcagtgtctgcttctggccgcttgatcgttcatcggcagggcacggggacggcaagtccctgcgccttggggagaaggtctgcatcgcagatccggccccgaagcgctga

SEQ ID NO: 498507 - DNA, 444 bp, Stenotrophomonas maltophilia
atgaagtcagaaaccatcagctctgaactgaagcagattctcctatccgatgagacctacaccatacagttcaatcgcaatggtgattttggatatgacgagaacaagagaatcatcagcattgatgtcacctctggacttcgcgtcaaatcctccggggagatccagtctcctgctctggggggcggtcacgaggtgagccatgctgcccagcatgatcgggttggattgtccgctttccaggcttcgcttgttgcgccacagtccaactcggagagcaacggcgtgatgcagatccgagtcggcgtatcttcggaggaggcgcgggctacgggggtggagacccgggccgcgcgtgagctgggggagcctgcccggaagagctacagcgacacgaacggcacggttaatgtctgctcccccaccagcaatcgggagtgttga

SEQ ID NO: 498508 - DNA, 957 bp, Stenotrophomonas maltophilia
atgaaagcctatctttggttctggggcgcgttcctgctgttcttcgcgttgcccttcccctgcatcctctatttcggaacctcctggccggtggcgctggctgatcgcagcgcgccatggctgtccctgctgctgcttgtgctgtcgctggctgcatggctctctctgctgttcgcgttcctgcatttcctgctgctcggcccaccgcgcgccctgcatcgcgtccgctcgatcctcgccgatggtgaaccgcgcgatgcgctgatcgaacacgctgaacagaccggcgtacaggtgcgtggcttcgcgcaatggaaactgcagctgtccttcaagaacctgtccggcacgccgatccgcgaacagctgctggtggtcgacagcaagccgcaactgcagcgcttcggcgtcggcaggcacgtcgatgcacgcctgagccgggtgccgggcgcgttcccgaacgtggtactggacggtgcccagcccgaactggatgtcgccagcctgtggcggcgaagcatcggcgcagcgctcggcatcgtcctggtagccgctgcctatgtggcggcctaccggctgcagagcgagggccttggctggaccttcctgtccttcggccatccgctgctggtgtgcccgctggtgctgtgtgggtacatgttggggctgcgcctgcttggccgcctgctgcaggctgatgcgcgcggcgacgcgttgaagtaccgcggcatcggcgtggaggccagggtgctgaaggtgcgtcagaccggcacctacctcaacgaacagccgcaggtggagttccagctggagtacaccgatcgcgacggccgcgtacagcaggtgagcgtgcgccgcttcatcccgctgatcgatctagccaacatcccgcgcgaaaacgtgaccctgctgtacgacccggatgaccgtggcaacgtgcgcctggagggcgtatga

SEQ ID NO: 498509 - DNA, 243 bp, Stenotrophomonas maltophilia
gtgtgggaggctaaggccgtggttaacaacgcggtagtaagtgatcagattcgtgtggcatctgaaggatttgttgaagtcccgttgatttccgagaactccgctaagctatggagcatgtggtcgggtggtgagtcattggtggatatcgggaaagttttctgcgataacaatcatgtcgcgtcgggaaaaacgtataccaagcagcacgaggactactacgatgccaactatccttggtga

SEQ ID NO: 498510 - DNA, 642 bp, Stenotrophomonas maltophilia
atgcctgagcggcccgcccgccacacgctggcctggctgtcggccgatgccgactggcgggctgacgtgactgcacacgaaccgcgcctggcagcatggttcgcacagggcctgccagccatggtggcacgcagtgcggcggatgatcccgacccgcggctgcgcctgggggtgccgctgccgccaggcgaaggcaagcaacggctggcgctgcgcgtggccctgcaggacatccagcacctgcagcctccccctgccctggatgagattctcgccggcggcgttccggctgattggcaggcggcactgcaggcaatgctgcggcttgcaccggcccgcgtgttcggcgccttcgcctggcagcacctcagcggccagccctatgtgcacgcacgctcggacatcgacctgctgtggcaggtgggtgacgcacgccaggccgacctgctggtcgagcgcctgcagcactgggaaagcgccttcgggcatcgggtcgatggcgaactgtgcctggtggatggtggcgcgatgaactggcgcgaatacgccgggcgcagtcgcgaggtactggtcaagcgcctcgatggtgccgcactggaactacgtgatgcgttgttcgcctccaccggggtgagcgcgtga

SEQ ID NO: 498511 - DNA, 3585 bp, Stenotrophomonas maltophilia
atgatcttcaatttcttccgcttcgagctgcgcgagcagctgcgatccccgctgctgtggctgctggccgggctgttcgccctgcttgcctttgccgccgcgtccagcgacgccgtgcagatcggtggcggcaccggcaacgtgcacagcaacgcgcccaccgtgatcgcgcagatgctgggcatcttcaccctgctcggcatgctggtcaccgcgctgttcgtcagcaacgcgctgttgcgtgacttcgaactcggcactgccgaactgatcttcgccagcccggtgaagcgccgcgattacctggccgggcgcatcgctgccgccctgacggccgggctgctggtctacatcctgatcgcgttcggcctgtggctggcgccgttcatgccctgggtcgatcccgaacgcatgggcccgatcagctggcagggctatgcctggacgttcgcggtcatcgtcattccgaacctgttgttcaccaccgcgctgctgtcgctgctggcagcgctgacccgctcgatcctctgggtctacatcggcctggtgacctacctggtcctgtacggcgccagcgcggccctgctgcgcgacatcgacaatacgtggatcgcggtgctgagcgaaccgctgggcatgcgcgcactcggccgtaccatccgctactggtccactgccgaacgcaacaacgggattcccgagctggccggttacctgctggccaaccgcgccctgtggttgggcgtggctgccgcgctgttcgccgccaccttcgcgctgttccgcaccgaacgcagcggcagtggccgtcggcgctggggccgcaggcaggcgcaaccggctgccgatgccagcgtggtccgccccacccgcgcgacactgccgcgcgtgataccggcgttcactgccagcacggcgtggcagcagttcctgcgccaagtccgcttcgatacacgcggcgtcctgcgcagcgtgccgttcatcgtgctgctggtattgggcctggccaacttcctgcccagcgcgctgttccggcagaccctgtacggcacctcgatctggccggtcacctcgcagatgatcatgggcctgcagggggccttcagctggctgctggtgatcatcgtgctgttcttcgccggtgagctggtctggaaggaacgcagtgcgcgcatcaatgaagtgaccgatgccatgccggtgccgaactggatgccgctgctggccaagttcaccgcactgctggccgtgatcatctgcttccaggccgccggcgcgctggccgcgatgggcgtgcagctagccaagggctacacgcatctggagccgttgctgtacctgcgcagcctggcgctggattcggtggtctacatcctgatggggggcctggcgctggtgctgcaggtgctcaccaacaacaagttcgtcggttacgcattgctgatcgtggtgatgatcggtcagggcgtgctcggcctgctcgactacacgcagaacctgtacaacttcggcagctggcccaacgcgccctattcggacatgaacggctacggccacttcctgaccgggcagctggcgttccagggctactgggcgctgttcctgctgaccttgatgtgcctggcgtcggccttctgggtacgaggtgtcagccagagcctgcgccagcgcctggccctggccggccgtcgcctgcgcggcccgaccggtgccttcgccgcagtggccgccctggcctttgtcgccgtgggcggctggctgtactggagcaccaacatccgcaacgagttcctttccccggatcaacagctggacctgcaggcccgctacgagcgcgagctgtcgaagtaccgcaacctgccgcagccccgcatcgtggcggtggacaaccgcgtggacctgttccccgaatcgcagtcgatggtgatcgatgcgaactggacggtgcgcaatacccacgccacgccgatccaggacgtgcacgtctcgatgggcgatgacaagcagctggtcgcggtcgacctgggtgggcagacactatcgatgcatgacgccgatctcggctaccgcatctaccgcctgcagaaaccgctgcaaccgggtgagacccgcagcgtgcatttccgggtggtgcagaagcccaacggcatcaccgcgggccaggcaccaagcaacatcgtcgacaacggcaccttcttcaacagccgcgtactgccgtcgttcggctacaacgaaggcgccgagatcaccgatcgcaacgagcggcgcaagcgcgacctgggtgagccgcggcgcatgcccaagctggaagacgaagccgcgcgtgccaacacgtacatagccaacgatgccgactggctcgacttccgcaccacggtctgcacggcaccggaccaggtggcgttggcgccgggctaccttctgaaggagaccacggtaaatggccggcgctgcttcagctacgccatggaccggccaatgctgaacttctacgcctacctgtcggcacgctgggaggtgcgcagggcgaagtacaagaacatcccggtggaggtctacttcgacccggcgcacggctacaacgtggaccgtatgatcgaagcggtgcagaagtcgctggcctactacgaagcgaacttcaccccgtaccagcaccgccaggtacgcatcatcgagttcccgggctatgcgcgcttcgcgcagtcgttcgccaacaccatcccctactccgaggccatcggtttcatcgccgacctgcgtgacccggacaaggtggactacgttttctacgtaaccgcgcacgagatcgcacaccagtggtgggcgcaccaggtgatcggtgccaacgtgcagggcgcgacggtgctgtccgaatcgttgtcgcagtactctgcgctgatggtgatggagcaggagtacggccgccagcacatgcgccagttcctcaagcgcgaactggacggctacctgtccggccgcggcggcgaggccatcgaggaacagccgctggagcgcgtggagaaccagcagtacatccactaccagaagggttcgctggtgttctaccggctgcgcgaggagatcggcgagcaggcgcttaaccgcgcattgaagcgcttcctgcaggacaaggggtaccagcaaccgccgtacaccacctcacgcgagctgctggactacatccgcgccgagaccccggacgaccgccagcagctggtcaccgacctgttcgagaagatcagcttctacgacaaccgcgtgatggccgccagcgcccgcaagcgcgatgacggccgctacgacgtgaccctggacctgcacgccgccaagcagtacgccgacggcaagggcaaggagagcgacggaaagatggatgactgggtcgaggtcggcgtgttcgccaatgggccgtcgggcaaggagcgcgaccagaaggtgctgtacctgcagcgccaccacatcaccaacgccgatccgaagatcacagtgacggtggatgaaaagccggacgaagcaggcttcgatccctacaacaagctgatcgaccgggtgagcgatgacaaccggcgcaaggtaacgatgtga

SEQ ID NO: 498512 - DNA, 2052 bp, Stenotrophomonas maltophilia
atgccgatgccacacacggttgtaagcgcgctgttcgcgcacatgttcggcctggccctgttgggcgtagccacgctggcgcaggccgcgccacaggtcgccagcgtcgaatcacccggcaaggtgctcaaggtcagcctcgtgctggacggcggcaccgcccgctaccgcgtcgagcgtttcggcgaacccgtggtggaggattcgaagctcggcttcgccctgcgcgacggccgcctggaccgcgatttcgccctgcttggccagcagcggcgcagcgtcgacgacagctgggagcagccgtggggcgagcgccggctcacccgcaaccacttcaacgagctgaccgtgcagctggccgaaaccaccggcagcaagcgtcggctggatgtggtgttccgcgcctacgacgatggcctgggcttccgctatgtattccccgaacagccgaacctgcacgaggcgatcatcgatgacgaactgaccgagttcgccatcgcgcctgaatccaccgcctggtggatccccgccggcgagccgatccactacgaatatctgtaccagcgcacgccgctgcgagaggtgccgctggtgcatacgccgatgaccgtgcgcagccgcgatggcctgcatgtggccattcacgaggccgctctggtggactacgccggcatgtggctgcggcgcaccgaggggcaacgcctgcgcgcgcagctgtcaccctcggccgaaggctggaaggtgcgtcgtgccctgcccttcgccacgccgtggcgcacgctgcagatcgcagaccgcgccggtggcctggtcgaatctgacctgatcctcaacctcaacgagcccaatgcgctgggcgatgtaagctgggtgaagccggccaagtacctgggcgtgtggtggtcgatgcacctggacaacgagagctgggccacggggccgaagcacgcggccaccaccgccaagacgaagaaggtgatcgacttcgccgccgcgcatggcttccgcggcgtgctggtggagggctggaacccggggtgggacggcatgtgggtgggcaacggctacgacttcgatttcacccgggccacgcccgatttcgacattgaagcgctgtcggcatatggcctgaaaaagggtgtgcacctgatcggccaccatgaaaccggctgcgccatcgagcactacgaggaccagctgggcgccgcgctggacctgtacgcacggctgggcgtggaccagttcaagaccggctacgtctgcgacgatggccaggtcgaccgccgcaatcccacggggggcccactgtggcgcgagtggcacgacgggcagttcatggcccgccatcacctgaaggtggtgcaggaggctgcgcgccggcacctgtcggtgaacccgcatgagccgatcaaggacaccggcctgcgccgcacctaccccaactggatctcgcgcgaaggcgcgcgcggcatggagtacaacgcctggggccagccgccgaacccgccggagcacgaggtcgacctggtgttcacccgcatgctggccgggccgatggattacacccccggcatcctcagcctgaagggccgccacggccaggccatccccagcacgctggcccgccagctggcgctgtacgtggtgctgtacagcccgatccagatggccgccgacctgcccgagcactacctgcagcaccgcgaggcattccgcttcatcgaggacgtggcggtggactgggagcagagccgcgtgctcgatggcgaagtgggcgactacgtgacgatcgtgcgccgtgaccgcaacagccgcgactggttcctcggcagcatcaccgacgaacacggccgcgtgctgccggtatcgctgggcttcctggagccgggcgtgcgctatcgcgccgagatctaccgtgatggtgaaggcgctgatttccgcagcaacccgttcgcgttcgcacgcgaaacccgcgaggtgaccagtgccgatgcactgacgctggtgctggcaccgggcggtgggcaggccattcgcttcacgccgctgtga

SEQ ID NO: 498513 - DNA, 420 bp, Stenotrophomonas maltophilia
atgaaactcatagggcaggcgcagcaacttacccgtcaagatctctgcgaattctcagacagcacgggtttgaggcttccccgtgagttcgtggatttctacttggaaaacaatggtggatatccggatgttgagccggacgaggcgaatccacttttgctgaatagctttcttccgatccgctacggtgatgcgacgattgaggctgcctaccaacggctgatgagcggcaaccccgcgttggaggggttggttcccttcgcttacgacgattgcgggaatgttttcttgttgttcggaaagccaggcatgcctgaagaggtctttctctggttgccgggagagaaggagctggaggccatttttagctcatttgctgaatttcttcatgccctctacggagggaaggaatgccgctaa

SEQ ID NO: 498514 - DNA, 594 bp, Stenotrophomonas maltophilia
atgaacctcgttgatcgctttctgtctggcctgatccctcgcttgcctgccgaagatgccgcgcagtgggcccacgtgcacggtgccagcgacgacgacctgcagcgcctgtgcgcgcagtggccgctggtgcccgagagcctgctggcgctgctgtcgcaggtggacggcacgcacttccgcgaatatcccggtggcgaggtcgtggtctacatgctgggttcggatgtcgaggacggcggctacccctactacctgcgttcggtcgcgcagatcttcggggaccagcagcagtgggacgacagcatccgttccatctacgaagagtggctggatgacgagccggagattctgggtgaaggcatcgacgcggatctgccgatgagccgccggctgtgcttctcgcactgcatgaacaacggcggcacctcgatgctgtacctggatttcgatcccgcgccgggcggcacggtcggccaggtggtgcgctacctgcacgatccggacagctatgcggtgatcgcgcccagcttcgatgcgtatctgcagcaattgatcgacggcggctacgcgttcatcgacgaggaacagtag

SEQ ID NO: 498515 - DNA, 2628 bp, Stenotrophomonas maltophilia
atgctgccggcgagttcgctgctggacacgccggccgcgtcgctcaacgacccggactgggctgctgccgcgcgccaggcgctgcagcaggccgacgcgcgcctgtaccgccgcttcgaccagggcgacaacatcgagcgcctgctggcgctgcgcgcgcgtgccgccgaccatctgatccgcctggcgtggcagcgctgcctgccagtcgagagtggcctgtcgctgttcgcggtgggcggctatgggcgcggtgagctgttcccgcgctcggacatcgacctgctggtgttcggcggcccgccggcacagctggcgcacgaagcggcactggcacgcctgtttgcgctgctgtgggattgcgggctggcggtcagccatgcggtgcgttctgcatcccagtgccgcgaggcggcgacggaccagaccgtgctgaccgcgctgatcgaggcgcgcccgatccttgctgatgatgcggcgcgccgcgcgctgcgcgaggccatcgacgaccgcgaactgtggccggcacgcgcgttcttcctggccaagctggaagagctgcgcaaccggcaccagcgtttcggcgataccgccgacaacctggagccggacctgaaggatggtcccggtggcctgcgcgatctcaacacgctgggctggatggctctgcgtgcctttggcgtgcgcgacctggaagccctggtcgggctcggccatctgggtgccgacgaagccgcggcgctcaagcgcgaacgtgcggtgctggcgcggttgcgcttcggcctgcacctggtagcacgtcgcccggaagagcgcctgcgtttcgattaccagaagaccctggccgcgcgcctgggcttcgaagacgacgccgagaacctcggtgtcgagaaaatgatgcagggcttctaccgcgccgcgctggtggtgcgccggatcagcgaccgcctgctgcagcgcttcgaggaacagttcgatggcgaagcgcagccggaaccgctgaccgtgggcttctccctgcgccgcggctacctggccgccaacgaggccgactggccgcgtggcgatatcggccaggtgtttgcgctgttctccagctgggccaacaatccgcaggtacgcggcctgcattcgctgaccgcgcgcgcgctggccgaagcgctgccgctgctgccggcctacgaccaggccgacaccgacgcgcgcgagcagttcatgaccctgctgcgtggccaacgcccggtcgatacgctttcgcgcatggcgcggctgggcgtgctcggccagtggattcccgcgttcgcccaggtcagcgggcgcatgcagttcgacctgttccatgtctataccgtcgaccagcacacgctgatggtcctgcgcaacatcggcctgttcgccagcagccgtgccgacgaacgcttctcgatcgcccatgaagtctggccgcgcctgcgcaagccggaactgctgctgctggccggcctgttccatgacatcgccaagggccgcggcggcgaccattccgaactgggcgcggtcgatgcgcgcgcgttctgccaggcgcatgcgctgagcacgtccgataccgaactggtggcgtggctggtcgaacagcacctgcgcatgtcggtgaccgcgcagaagcaggacatcgccgacccggtggtgatccatcgcttcgccaccctggtgggcagccgcgaccgcctcgactatctgtacctgctgacctgcgctgatatcgccggcaccagtccgaagctgtggaacgcgtggaaggaccgcctgctggccgatctgtatttcgccacccggcgcgcgctgcgcgaagggctcgagcatccggtaccggcggccgagcgcgtggcagaggcgcgcgacagcgtgcgcgcactggtgcgcgagcagggttacgacgacgccaccatcgaccgccagttcgccgtgatgccggatgagggcttcattcgcctgcgccctgagcagctggcctggcaggccgccgcgctggtaccggtgaaacagggccagacgctggtgaaggtgcgccgcatcagtgtcgacgacccggcactggaagtgttcgtgcattcgccggaccgcgacggcctgtttgccgccatcgtgatgaccctggaccgcaagggctacgggatccatcgcgcgcgcgtgctggatggcccggccgacaccattttcgataccttcgaagtgaatccggccgacagcttcgccgatggcagcagcgccaacctggaggccgcgctgcgcgaggcactcagtggtgacctgtcgcgcctgcgcccgtcgcgtcgggtggtgccacgccagctgcgccatttccgcttcgcgccgcgcatcgagttccgcgatgaaccgggcgcaacccgttttgccctggtcgcacccgaccgccccggcctgctggccgacgtggcgttcgtgctgcgcaaccagggcctgcgcgtgcatgatgcacgcattgccacgttcggcgaacgcgccgaagacaccttcgtgatcagtgacgaacacgacctccccctgactgaacctgcccggcagcagctgcatgacgcgatgctggcctgcctggaccctgatcgaaacgccggagaccccgcctga

SEQ ID NO: 498516 - DNA, 516 bp, Stenotrophomonas maltophilia
atgtctttgcgccggcaaaacggcttcacgctggtcgagttgatgatcacgctggtcatcctggtcattctggccagcatctcctatcccagcttccgcaccgcgatgcgctcgaaccggctgaccaccaccaacaacgaggtgatcggtctgttgtcgctcgctcgcagcgaggccatccgcaaccgccatggtggcggggtgtgcggcagcagcaacggcacgtcctgcgatggtgagtggagcaagggcatgctggcctggggcgacgccgatggcgatggctccgtcagcggcagcgaaagcgtgctgcgcttctccaagggcagcagcagcctggcggtcgaggctcccagcccaaccgtcatcaccttcgattcccagggacgccgccgcgcgtccgccgaccaggtcgtgagcctggtgccgcaaggctgcaagacgggtgaccccatgcggaccctgaccgtcctgttctccggccaggtccgctccaccgcaggaacctgcaaatga

SEQ ID NO: 498517 - DNA, 501 bp, Stenotrophomonas maltophilia
atgaaacgtcgtcgttccggcatgggcgggcctgcccgcagtcgtggcttcagcctgatcgaggtgctgatcgcgctgctggtgctggcgttcggcctgcttggctttgcgctgctgcagaccatgaacgtgcggttcgtgcagagcgccagccagcgcacccaggccaccagcctggcctacgatctgatcgagctgatgcgcgtgcagcgcagcgaaaccctcaacggtggcgaatacaccaaggcctccttcactgccggctcggtcaccgcgccggctggcccctgcacctggcccaacagtgccgacgtgacagcctccaaggcgaacgtggcgcgctggcaatgccaggtcgtcaaggtgctgggaggcaaggccagcgccaacgtgaccgtcaatgatggtctggtcacggtgggcatcggctggggagacgagcgatggaacgcagccaatcccgacagcatcaccacgttcaccctggttacccgtctatga

SEQ ID NO: 498518 - DNA, 1170 bp, Stenotrophomonas maltophilia
atgaagcgcgcgccttccgctgccagccatgcggctggcctctcgctggttgaactgctgatctcgctggtcatcggcctggtgctgatgctgggcgtgacccagatcttcatggcttcgcgggcggcctcgcagctgtccgaaggtgtcgcgcgcacccaggagaacgcccgattcgcattggagttcctcgagcgcgacatccggatggccgggcacatgggctgcgtgaatgaccaggcgcacctggtgcgcgcccaggacagtgtcaaggtcaacattgccggcgtgaagtcgggtgatggcagcccgatggacttctcggtgccgatccagggttacgaggcgcagggcaccgcgcctggcaacaagctgaccctcggcgcaagctggggggctgccggcagcacgccgtcggcgatcaccaatctgaagcccaaaccgcttggcggcagcgacatcatcgtgatgcgctacctggcgccggaaggctcgccggtgctgtccatcggctccggcacttcgccggacatcacgatcgccagtgacgcggcggcccgcctgtcggccggtgccgtcaccacgccctcggcgtttgccgtggccgattgcagcaaggtggacgtgtttgcgggaaaaatcgccggcagcacgatcacggccagcaaagccgatctctcggcgtattcggccaacaacgcggtgaccatggtctatcgggtggaatcgatggcgtactacgtggcaacgaataccgccggcgaacccgcgctgtaccgcgcgcgtggcgctggcgacaacacgttcgccaccggtgaggagctggtggagggcattgagagcctgcagttcctctacggccaggataccgagacggcgatcagcagcaccgcgccgccgaccggggtaatcgccttccagaagactgccagcggggtcagtaccggtaccgatgccgccgctgtcgctgcgtggcgacgggttggcctggtgcagtttggactgctggtgcgcagcccgcagcgcgccgcggccgagcaggccaatacggccgtggcccagctgggcgtgctcggcgttggcttcaatccgcccacgacctacgacgatcgctaccgcgcctcctacgaggtgtccgtggcactgcgcaaccgactgttcgggaactga

SEQ ID NO: 498519 - DNA, 522 bp, Stenotrophomonas maltophilia
atgaagccctccgtctcccgtcgattccaggggcgtacgcagcagcgcggtgcggtgctgtacgtggctctgatgctgttgatcctgctgtcgctgatcggcgtggtcggcatgcaggtggcgagcatgcaggagcgcatgtcctccaactaccgggccgccaacgtggcgttccaggccagcgagcgggcggtccgtgacgccgagcggtcgatcgaggagatcgacaacaataccggcgacggcggctcgttgaaggctgacgccatcaagcgcatctgcgatgacggcttcgatcccacccgctgggtgggagagcagaaactgtcggcggcgccggtggtcagcgtgcgccgcatcgacgcctgcatccagggcgaatcgacgctgggcatgggcacgccggaaagcgaagagcccacccgcgtctaccagatcaccgcgttcggctccgatcgcgatgccgccaccagcaacgagggtacttcctcggcggctgtcgacactgttttcaagctttga

SEQ ID NO: 498520 - DNA, 3822 bp, Stenotrophomonas maltophilia
atggcgacccgaaagatcaagatcctggccggctccgggctgttgctggcggtggctggcggcacctggcttgcgatgaacctgttcgccgcgcaggcgcagggcacattgtcgcagcacccgatgaacctgaaggtctccgcgccgccgtcattcatcatggcggtggatgattcgggttcgatgaccttccagacccagttcccagggcaggatggaacggcgtgctggaactatgcccggcagagcttcttcagatccaagggtgtactgaacaccgttgacgacatcatcagtggctacgatcgctatggaaatcccatctatggcgcgggtgagtgcgactacttctatgtactgccaggtgcccgaatcaacgacaacagcggcattcccgcgctggacgtattcgggttcgcgcgatcggccgcctacaatccggcgtactacgatccgaacatcaagtacgagccttggctgaacatcgtcaaggaagaggtcgtgtcctatcctcaggccaatacgacagccaccctcattgatccgcgtgacacgggtaattcgctatcgcttgctgcgagctacctgggtaaatccagttgggatgtccaacggatgcagaagggcatggttgcgccgcaggggcaggcctatgcgaatgtgacccgatacgaggatcgctcggggaacgtaacgtatacattcggtagcgaaaacagcaatggcaatagcgctggccgaagctggacttcggcggattacgcatctctcaggtacgttccggcaacattcttcatgccctacagcagtgatgcggacccccgtccccagctgccggggacgaccaatgcatatgcgggcgtgaagcgcaccagaattgcgggtgcctgtggcccagggtgtgacatgtggaagtatgtcatcgcatccggtgatgccgccgcgctccagaatttcgccaactggtactcctactacggtaaccgaaaccgcgcgatgatcgccggcatgacgcatgcgttgaacgtcaacgacatgtatgtcggctacttcaagatcaacgacttcctgaagtacaacagctcgtcggatgatgcgaagcgtctcgcgatccaggacatgagcctgatctcgcaaaaggcgaaactgtacagcgacatgattgcgctgaccgccaatggcggtacgcccaaccgaaatgcggtcaatgcggccggcctgcagttcatgcgaaccgacgatgcggcccccatcaagctttcctgccagaaaaacgcggtgatgctgttcaccgatggctacagcaacaacggcaacgggttcccatcgagttcgattcccaccccagggaacattgacggtgccatgggtgccccgttcaaggacagcaactcggatacgatggctgatatcgcggcgtattattacgtcaatccgttgcgcaccgataccgcgatgcccaagggcaatgtgccggtgccggagcagtgcgcgaccagtaccgacaagtcgctggactgcaacaagaacctgcatatcaacttctacgggatcaccctgggtgcgcgtggcaacctgttcgatccggacaaacagcagaatccgtataccgattcggccatctacaacaactggccgccacgtcagaacaacaaccccagcaccgtggatgacatctggcacgccgcgaccaatacccgcggtgagtacatcaacgcgcgtactccggcagacatcaccacggccatgcgccgggtgctctcgtcggtcacctccgggccagcgccttcgggcagccagggcctgaccggcgcgcgtatcggtaccgggtcgctggcggtcacgccccagttcgaagtggccaacgaggaaaccgattggttcagtcgcctgaaggcatccaagcttgcggtgaacgacaagacgcagcagaccgagtacacgcaggtgtgggaagcggcggagaaactgggggcgcagcgttcgcgcaccatcgttgccaccaagggcaatgctgcagttgacttcagcagcaccaatatcgccttcaccgacctctgcaacaaggatgagaagcagtatccgggcattgcgcgctgttccgcgaccgaggctgaaaagctgggcggcgacatcgccacggccatggcttatctgcgcggcgacgcatcgcgcgaagtacgcaactcggggggcatctatcgcacccgtaccaccgtgctgggcgacattgtcaattccagcccggtgatcagttcgccccgcgatgactatggctaccagcgcatcagcaccgcgatggcgacctcgtatgcgacgtacctgacccgcaagcgcaacaatggccgctacatggtctatgtcggtgccaacgacggcatgctgcatgccttcgacggtggcatgaacggcaatggcgtaagtgacggtgccggaggcagcgagaccttcgcctacatccctggaaccgcgctgggccacatggccaacctgctgtatccctacgtggcggccaacaagtccgaccagcgcttccgtcatcgctactacgtggatggaccgatcgcggtggcggatgcacagatcggtggcaactgggccacggcgctcgtcggtacggcgggcgccggtgggcgctcggtgttcgcgctggatgtaaccacgccgtccagcttcggcaccggcaatcgcctgtgggaaatcagtgacgtggcgccggggctcgacagcaccataaaggcgaacatcggccatgtccttggcaagccggtgatcgtgccggtgaaggaagggaccggggtggcgtggaaagcgatcttcggcaacggttacaacagcctcagccgcaaggccgtgctgttcgtggtcgacctgggatcgggcgcggtgcggatgatcactgctaccgaggccgcagcaaccgcacccgccggtgacaatggcctgggcaacatcgtggctgtcgaccgttggcgcgccgacagcgccggtgggacggggcgtgtacgtggccgtgacggcctggcggacacgatctatgcggccgaccagcgcggcgcgctgtggaagttcgacctggaaagcacggcgacctcggtcaccacgccggtgttcaccacggcgcgccagaccaacaacaacaaccaggtgtatcgccagccgattaccggtggcatgaccgccgtgaccggacccggtggtggcgtgatgctggtgctgggtaccggcagcttctccttcgacaatgacccccaggatctcaccgcgcagtcgctgtacggtgtcaacgacaccagcaaggaccagccggaggccacgatcgtgcccgccaatctggtggcctatacggtgaccaccaccaacaagttgcgcacggtcacggccacgcccttctccggggcggcgcgcggatggagcattgcactgcccggcgcaggtgaacgctttgttggtaatcctgccgtggcgtcgggaacggtgttcatgccgacctacatgcccaccgcgggtggccgtggctgttcgaccgagggaagcaactggctgtttggcctcaatccgatctcgggtgttgcatcgctggagcaggcgcgggtcgggtccattaccggcacgccctacggagcgggcacggctggcgtgagtctcgacaccggcggcaccgcaccggtgaaggacgtcaatgtctcggtgatgccacgcctggcaaagggtgccgatcgaggcggacgtgcctgctggatggcggtcaacgtggcgggtgctccgacgatgtacgtgccttatccctgcggtcgccaatcctggcgccagatccagtaa

SEQ ID NO: 498521 - DNA, 426 bp, Stenotrophomonas maltophilia
atgagcctgaacactctttcccgtaccctgcgtcgtcccggcaaacagcacggtttctccctcatcgaactgatgatcgtggtgatcgtgctcggcatcctggccgcgattgtcgttccgtcgtaccagcagtacatccgccagtcgcaccggggcgtggccaaggcggacctggtggaatacgcgcagcgtgctgagcgctactactcggtgaacaacacctactcgggcttcgcgctgcccagcaaggtgtcgccgcgcgagggcgggaccacacggtacgcgatcacgttcgatggcaaggcgtcctcgttcacgctgactgcgacgccccaaggcaaccagaccaaggacagctgcgggacgctgagcgtggaccaggccaaccgcaaaacggccagcggcacggtttccgattgctggtaa

SEQ ID NO: 498522 - DNA, 537 bp, Stenotrophomonas maltophilia
atgcatcgcactcccgcccactgtcgttcagcatcacgcggcatgcatctggtcgagatgctggtggtgatcgccatcctttccgttctgctggccgtgagctggccggccttgcgcccggtgctgttgcggcaacgcgccgacgccctgcagctgaccctgcatgccagtctttccagcgccagaagcgaggccctgaagcgccgcgaactgatcgggctgtgcgccagcgacgacggtgagcagtgctcccgcgactggagcgcagggtggatcatctatcgcagcggcaggcaccgggggacaccagcatccgcccaggacatcctgatccaccatcaaggccggaccgacatcgccatcgtcgcccaggccagcggtggacggccgctgctgttcttccagcctgacgggcgcagtcccggtgccaatctgacgctgcgcatctgtgcaggagaccggctgcatggcaggttggtcatcaacaacggcggccgcatccgcagcgagcgtgtcgaccgcacccttccctgctga

SEQ ID NO: 498523 - DNA, 450 bp, Stenotrophomonas maltophilia
atggatcactttgaccatcttggttactactacggcgaagaagaaatccagcaccttctgatggagcttggcatagtcgatgttcccgtgttggaatccgaatggacagatgcctacctatcaaatgagtcactaggtatcgagctgaccctctcggattctgagtctttggtctcccctgcccgcgactatccgaccaatgcgctggtgctatccaacttccgctactacggacggcagattggggacttttccatttaccaaggtgccttgccccacgacctcactttcggccaaggcagggacgaaatcctgtcaatgtttggcgaaccagaatggaagaacccggagaacagccgcatgcgctggatatgcggcaactatcgaatccatatgacattcgacaagcacggaaaactggcgatcgtctccggagggttgccgttctag

SEQ ID NO: 498524 - DNA, 1107 bp, Stenotrophomonas maltophilia
atgccccaaactccttccgcctacgaccacgatgtggtcatcgtcggcgccagtttcgctggtgccgcctgcgccttggccgccgcgcagtacggcctgcgcgtctgcgtactggaacgcaaggccgaccccggtgagcgcctgcacaccaccggcatcgtggtgaaggaagcgatggagcagacctggctggggcgcatgcccgagcacctcgtgcagcgcgttgccaacgtgcgcctgtatgcgccgaacctgcgcagcgtgttgctggccgcgccgggctattacttcctcaccaccgatacgccgaacgtgatgcgttggctggccagcgaactgcgcgcgaacggtgtcgacctgcgcctgcagcagtccttcaccgacgctcgtcgctgtggtgacggctggcaggtggaaggggcagggcgctgcgcctatctggtcggcgccgacggcgcacgctcacgcgtggcccagcgcaccggccttggccaggtgcgcgacaccctctacggcgtcgagcgtgagttcgccggcctgcaggtgtcgcagggcgacgcgctgcattgcttcgtcagcaagcactacgcaccgggctacatcggctgggtcgcgcagaatccgaccgggctgcaggtgggattggcgctgcgtcatgacccgcaacaggcacggccgccggatatcgatggcttcctcgaccacgtgcgcgatgtggtcggcattccgccttcggcgcgtccctcggccacccgcgccggcttggtcccgtgcggccggccggatgggccgttcaccggccaacgcgtgatcctgaccggcgacgcggcaggcatcgtctcgccgctgtccgccgggggcatccactcctcgtggcggcacggctgggcggtcggcgaggcgattgcccgccatctgcgtgggcaagggccggaagcggaacgggtggcgcggcgggtggcgccggcattccatggcaagcgcctgctgcgctgggcgatggaccatctgcaggcggactggccgctcaatgcactgctgcacacggcggccacgcggcgcatcgccgagcaggtctacttccaccgccgtggcctgcgaacctga

SEQ ID NO: 498525 - DNA, 546 bp, Stenotrophomonas maltophilia
atgaaggggaaggtagtgatggcgatgatgctgctggggtgtttcccgctggcatcggcccaggtctacaagtgcaagggcgcttccggtgaaacggtatacagccagaatccctgtgctgccggcgctgaacccatgaagctgcgttccagccgttcctccatggaaacggcgggggaggcatcgaaccgcgcggcggtgtaccagaacaccgaactggccgacgctggtatcgccgagcgcaactgcgtgcagggcgagcgctcgcgcatctacggtccgctggagtcgcgcagccagcagatcggtcggcagatcgccgagttgaaccggcagatggccgcgtcgagcaacaacctggccggcgcaacccgtgactcgggcatccgtacgcagattgccagcctgcagcaatcgttgagtgccgagcggatggcggcggatacacagatggcgagtgcgcgcgaacagtgcgcctcgacccggcgtgaacgcgagcgctcggtgcgcgacaagttcagcaacgtacccgcgggtacgccatga

SEQ ID NO: 498526 - DNA, 405 bp, Stenotrophomonas maltophilia
atgtaccttggccctccactcggacgttctggcatcgaatcacttcagagcgtggcgctttctacgctaggcaccgccctgccagagtcttatctggacttcctttcaagccacgacggcctggtagcagagggagtcttcctttactcgagcattccacgtacctatcccggtggcgggacagcccatgcgttggtggaaatgaatctccttgcacgcgaccagggattcatggacggctatgtagagctcggagagagtgatatggactgctatgtcttcgagttcagaaccagcctgtaccaggtccgcgacaaagtggcgttcgacaacgtatatgaggaattcgtgtccttcgacgggcttctctcccacatactcgatttgatcgaacaacactgttga

SEQ ID NO: 498527 - DNA, 2319 bp, Stenotrophomonas maltophilia
atgacgaaaactttgttggccgccgcgctgtcgatcgcgctcgctcctgcggcctgggcgcaggatgctgccccgacctccagcacaccctccgccaccaccctcgatgcggtctcggtgatcggcagcggtgaagcgcgccaggtgcagcgcatcacccgcgagaacctcgacatcctgccgccgggtaccagcctgcagaagaccctgaacctgctgccgggcgtcaacgcccagtccgccgatgcgctgggcaccaacgagcagtcgatgacgctcagcctgcgcggcttcaactccacccgcctcggttacacgctcgacggcgtgccgctgggcgacggcgcgtacaacaactacaacggcctgaccatcaaccgcgcgctgatcagcgagaacatggccggcgccgagctggcggtgggcatcggcagcctcggcacgccgtccaccagcaacctcggcggcaccatctcctatacctccgatcgcccggcccaggaactcggcggccgcttggtgcagaccttcggcagcaatgccaatcgtcgtgctttcgtgcgcgtggacagcggcgagtacaacggtttctccggctacgtctccggcatgaatgccgtctccgatctgtggaacgaccagaccgcctacaacaagtccaccaccaagcagttcaatgccaagggcgtgtggaacttcggccgcggccagattaccggtttcatcgatacctcgcggaccacgcaggctgactacttctacctgtccaaggacgagatgtcgcgcggcctgggctgggactggggcggttacgcgccggactggaacaaagccgtagccaaggcctactgcaataccgccagcctcaacgcgaaaaagtgcgacaacagcggcccggacaaggatgccgacggtgccttcaccgccggtcagatcctgcgcgatgacaacctgtactacctggccggcgacttcttcctggccgatggcttcagcctgcgggcgctggcctaccaccacgatgaccgtggcgaaggccacaactggaacagcggcgcgtggtcgaacaagggcaccgcgcaggagattccgatcatcttccgcaacaccatctacaccatcgaccgcgatggcggcacgctgtccttcgactgggagctgggcgcgcaccgcatcgaaggcggcgtctggtacgagcgcaacaccagcagcgccgagcgctaccagaccgccgtggatggcccgcgcgacctgagtggcatgaataccctgccctccgacgtcggcgtgttcgcccagcgcacgcgttggaagacccatcagttcttcctgaaagacacctggcgcctgcttgatgatcgcctgacgctggagttcggcgccaagagcccgcatgccacctccgatgcacaagcactaccgggcgacgcgaagacgccgatctcgccgacctcgaacaaccagttcgccaccggctcgctgaaggcgagcaagaatttcctgcccagcatcggcgccaacttccgcctggccgagcaccacgaagtgttcgccagctacgccgagaacatcgccatgttccagggcgggttcaagctgggcccgcaggcggtcagccaggccacctggaatgcgcagggcagcctgaagccggagcaatcccgctcgctcgaagccggctaccgcctcgtcaccgataccctgcaggcctcgatcgccgcctacagcgtgcgcttcgacaaccgcctgctgcagtacaacccctgtgactcgcgccagccggtcggcccgatctgcggcaaccgtttctacaacgtgggcggcgtcgacagccgcggcgccgagctgaccgtgctgtggacccccagcgagcacttcagctggtacacctcggcctcgctgaaccgttcgacctacgcctccaactacgtgcaggccggtgtagagcagcacatcaagggcaagatccagaccgatacacccaagcagctgctggccacggagatcacctggcgtgacaacggctggttcgccagcctgcgcggcaagtacaccggcgaacgcttctacacctacaccaacgaccagggcttcggcggcttcacagtgttcgacctggccggtggctatgacttcggccagatcggcttcgccaggggcatgcgcctgtcgttcaacgtgaccaacctgaccaacaagcgctacgccagcaacctggattcgagcgtgttcgcacccagcgacccggccggcaagctgtatgtgttccatgcctcggcaccgcgccaggtgttcggtacgatcgaccttcgcttctga

SEQ ID NO: 498528 - DNA, 1461 bp, Stenotrophomonas maltophilia
atgctcgccaccgccctgctgctggccacgctctccgccagcggatacttcgctccgcacgaggcaacgggtgcaccaccacgcaccctgcagctgggcggtcgtacctatgtcgacaaaggcctggtcgccgccgggcggctgccggcgggcacggtggatttcctcggcgacacgctgggatcgttctcgtcgctgacggtgcagcctggcacctggaagcgcactgccaacggctacgaaggcgtgctgtggaccctgcccgaccgcggccgcaatgatccggaggccggcctgttctacgactatgccggccgcgtggagcgcatgcagctgcgcatcgacattatcccaggcaagcccggtgtgctcggcacgctgacgatggtgccggacaagggtgtggtactgaaggacttcaacgggcagccgttcaccggtgctgacccgggtgagcacacgatcacccagcgcgatgtggtgctgccctcgccggccagcggcgcaggcgctggcaaggtctcgctggatgcagagtcgctgcagttcaccgccgatggccacttctacatcggcgacgagtacaccgccaacgtctactacttcgatgcacagggccagctgcagggcgtgatcgtggcgccgccggcgatccgtccgcagcgagatggcaagccagcgttcggttcactggcgccaccgcagaccggccgccgcaacaaccaaggcgtggaaggcatgggcctgtcacccgacggcagccgcctgttcgtggccctgcaaagcgcgacgctgcaggacagcgcgcagggcaatgcggccggacgcatcaacacccgcgtgctggtctacgacgtgaccacctcgccgacgccacagcaaccaatcggccattacgtgatggccctgcctgcctacgcgcatgacggcaagggcaagctggaccgcaccgccgcgcagagcgagctgcgcgcgctggacgaccatcgcttcctgttgctggcccgcgacggcaacgggctgggcaaggacggcgatgacccgatcgtcttcaagtcggtgctgctggtggatgtggccgatgccagcaacctggcgggaagcaaccatgagtccggtacggcctcggtgttggccaacccgacggacaccgtgttgaaggacggcatcgtgcccgcacgcagcgacgaactgctgaacctgctcgaccgcccgcagctggcccgtaccgggctggatctggacaccaagcgcggcccgcatgccggactgctctcggagaagtgggaagccatggacgtgctgccagcgctggagccgcagcatccgaacgacgtactgctgctgatcggcaacgacaacgacttcatcgcccgccattgccgcatgcagggccaggcctgcgacagcccgtacgacaacgacaaccgcgtgctggtgtaccgcctgaccttgccctga

SEQ ID NO: 498529 - DNA, 1833 bp, Stenotrophomonas maltophilia
gtgccattcagtgcgccacccacggcgcctacagtgttgttgagcgtgccgcctacggcaccgcccacgctgccgaccgtgccattgagggcaccaccgactgcaccaccgacggtgcctacggcgccgttcagtgcgccgcctacggcgcctacagtgttgttgagtgtgccgcctacggcgccgccgaccgcaccaccgacggtgcctacggtgccgttcagtgcgccgccaacggcgcccacggtgttgttgagcgcgccgcctacggcgccgcccacgctgccgaccgtgccattgagggcgccgccgaccgcaccaccgacggtgcctacggtgccgttcagtgtgccgcctacggcgccgcccacgctgccgacggtgcctacggtgccgttcagtgcgccgccaacggcgcccacggtgttgttgagcgcgccgcctacggcgccgcccacgctgccgaccgtgccattgagggcgccgccgaccgcaccaccgacggtgcctacggtgccgttcagtgtgccgcctacggcgccgcccacgctgccgacggtgcctacggtgccgttcagtgcgccgccaacggcgcccacggtgttgttgagcgcgccgcctacggcgccgcccacgctgccgaccgtgccattgagggcgccgccgaccgcaccaccgacggtgcctacggtgccgttcagtgtgccgcctacggcgccgcccacgctgccgacggtgcctacggtgccgttcagtgcgccgccaacggcgcccacggtgttgttgagcgcgccgcccacggcactgccgacgctgccgaccgtgccattgagggctccgccgaccgcaccaccgacgctgcctacggtgccattcagtgcgccacccacggcgcctacagtgttgttgagcgtgccgcctacggcgccgcccacgctgccaactgtgccattcagggcaccaccgaccgcaccaccgacgctgcctacggtgccattcagtgcgccacccacggcgcctacagtgttgttgagcgtgccgcctacggcgccgcccacgctgccgaccgtgccattgagggcaccaccgaccgcgctgccgacagtatcgacggtgccgttgagcgcaccaccgactgcattgcctgcggcgccgaccgcactacccaccagcccaccgacacccagtgcgctgttctgcgccgcaaccgttgcctggccggccagtttcagattgcgatcggcaaccacttcctggccattcggcgcctgcacgcgcaccttgccggcagcaccagcatcaaatgctgcggtgatcgcgcgatcgtgggtttctcccggcagttcctccttggcgggcagcgtgatcgccgccgtcgcctttacctggccctgggcgtcaatctggtggcctgccaccttcagcttcgaatccagcgccccatccacagaagccttcagaccccgcagtgcgcccgccggcgcgccgctgatgccggcggccgcctttggaccggtatcgattgatgccacctgcgcgccgccaagaccgatgttggcattcgctcggacatcagcggcaagccttggcacggcgacctgcttcggcgccgtgttcgcggccagcttgacctgcacggaggccggcagcacgtcacgcaccaccggcagcgacgcggtgctcaactgcaggccgacgcgcgcatccgcgctgatcgccgggctgctctgggcctggcttgcggcagccgcgagggctacctcggcatcgaccttgactggcatcggctgggtgtacttggctgcaagagcctgcagatcacgcagcgactga

SEQ ID NO: 498530 - DNA, 672 bp, Stenotrophomonas maltophilia
atgagcaaagtgatcgggcactctgccactgcgggaaccgttcgcgaaagactgattcatgactttctcgaatcacacatccctgaaatgaccagtgctgtgagcggcgtcatcattgactcgcaaggaagacggtcacgccagcaggatatcgttctgatgctgaagtccatgccgaggcttcgcttcaacagcggccacgacctaatttttcacgagggagtcgttgcgacgatcgaagtgaaaacaagtgtaaccacgtccgttctacttggaatctcagagaacatcgcaagcgtcaagtgcttggagccgacaagcttcgggggcacgaagttgggtgttctggactggcccatgcatcgaatcctgcactgcgtcgtaggctacggtggatcgagtcttcacgacatatcaaatgctctcaccagttttcctgaagcgaagaagccggacatctatctagacctaaccaagggtatgcttcttcggaatgaaggcatcttttcagaaagaactcttggcgatgactatctaatatttgatgatcccggtgagggtctcgctagattcctgtcagccatgacggtcgttacatcttcatactcagttcgagatgtgaagtgggagcagtacctattggactcctctgtggaggagcgagacccttaa

SEQ ID NO: 498531 - DNA, 576 bp, Stenotrophomonas maltophilia
gtgagcccgcgcccctctgatgcgccacaacgcgtgattgatgctgcggcacagatgctggcgcgcgtgggtctcaatgccaccagcatccgtgaggtgaccaagctggccgaggcgccgctgggttccacctatcaccactttcccggcggcaagcaggagctgctggcgcgcgccacccacatggctggcgacaaggtggaggcgcttctcgttgagttgttgaagggcggggccgtgcagggcctgcagcagttcctggcgatgtggcgcgagcgcctgctgcggtccggtttccgcgcgggttgtccggtgctggccgctgccgtcgaagagccggtcgaggcggttaccagccaaccgcgcgtggccgccgcagaggtgttcgtgcgctggcaggggcatctggccgcagccttcattgccgacggccacgaacctgcggcggcggatggactggccagcctggtgatcgccagcgtggaaggcgccgtggcgatgtgccgcgcactgcaggacatcgccccgttcgaccaggtggccgcgcagttgctgaaggccgccgcgcctccttga

SEQ ID NO: 498532 - DNA, 639 bp, Stenotrophomonas maltophilia
atgtctgcaccccgctcgtcgtccgccaagtcgttcactgtgcatatcccgcgcaacgccctgaagatcgccggcatcgccttcggcgtgggcgtactgctgttcgtgctggtctggctgaccggtcgcgacaaggagttcttccgcgccgatcctgccgcccagacgccgcaggaaaccgcccagatcgagcccctgccggagccgttggctgctgcggccggttccagcgacatgcccgatgccaagccggccccggtggaggaagaagcaccaaagctggtcgaaacagccccaccgccgcctgcccccatcgctgaagcagccccggccgcaccgggccctgcgccggcggccaccggcaacagccagccgatgccgattgccggccagtcgccgccacccgcctacccggctgccgcgcttcgcgctggcgagaccggcaccgtggtggtgcgggtggacgtggacgccaccggccatccaaacaacgctacggtgatccagcgcagcggttcacgcgagctcgaccgcgccgccacggacgccgtgcgccgctggcgcttcacgccggcgcagagcaacggccaggccgtccccggcagcattgaagtgccgttcgacttcaagacgcagtaa

SEQ ID NO: 498533 - DNA, 1167 bp, Stenotrophomonas maltophilia
atgcccaagacggtgctggtcgagggcctgcgtacgggcatggccatcggcgacgctctcgccaacactccttgtctcgctgtactgccggaagagccagaggacgcatgcgagggatgggcgacctacggcttcatcacggatgacggattgcaggtggccgcgaacgtgaacacgcgggacaacacggtaaagagcattcgtctggagaacccgaacgccacctactgtgagcctgcatcgcccatattcgatccgacgttgaccaaggcctttgacatagcgcttggcccccagcgcgtgctccccaaagcaggccggggcggcgaatgggccggaggctggacgctgggccttcctccaggcatcaccgctgaacaatggcctttgagttccagcaacgggcacccgctgcggcacgcctttacgctgcacctgccctccgagtaccgaaccaagggaaatgagctggttgctctctccctgttcgtcgacgatcagcaggaggagctctgcaccgtcaaggaaatcgcgaagtacttcgcctctcccctttccacaaccccgccggagggtagcgacctgcttcccttctggcagcatcgccaggccaagcatgcgcacagccacagcatggaagacatccttggaacgcaattctgcgccatctggcttacacagcaggagtttgatggcgagctgagcctgccgcccaagctgaattcagccctgctgggtgcccctccgagctggatcggacaggactacgcgagctatttctacgagcgatggctgtacaccaggaacggaaatgccgtcatcccgggcgcaggaatcgggggcgcctccagcgaggccgttgcattgccgatcagcacaggcatccgcgctgacgatcccaacgttgggagatcaccgcgggagtgggaaagcgaatgcgccatcagtggatacatcgaagcattcagcgagcgcggtgaggaactgaacctgagtcgctgggattccattgcccacctcggcggaacgatgcagccccagcagggctaccctgagttcggcccctactacctcgaattcgaggagggttttggcggcttcaatttcggtggcggcaacgcacagttggatctgcagcagatgaagatcgactgggcgtgcggatga

SEQ ID NO: 498534 - DNA, 2748 bp, Stenotrophomonas maltophilia
atggaatggcgcccctcgggctggggccgacgcgtgacccgttcgccccattggtcgctgcggcttgatggcgagtacgttgaactcagtgtctccggccagcagtacaggttgcgcgtggatgatgatcagcaggtgcaggtccatcgaggggtcttctggtcacgggtcgaactgcagaccggcgatgctgccgggctgtgcgtggacgggctccccaacggaccagcgtcccggcttgcgggggccctgcagcacctgctctttgcgcgaaccacgcgtggacgcaaggccctgttcgacacgattctggagcagatccagtcctggttgagcgacgcggatgccctcatcgatcgtggcagtgccggacgccgctggatcacccatgagcagcagcaggcgctgctggcgaagcgctcagacctacccctgcagccgcctgagctggagcagctgttccgcgatgaagatgtgcatgaagatctgcatgcggacagccatcgcgcagcgctggacgccctgcgcgactggaacctggattggcccgctgcctgggccgaagccaatgaggccatgaccctgcgcgagctggtgttggccaggggcttcctgggccgggtcgagagcaagccgctgacagaggaacaggcccgcgccgtcatctgcttcgacaatcgggtgcaggtcgtggccgcagccggctccggcaagacctccaccatggtcgccaaggccgcttatgccattgaccgcggctttgtcgagcccgaacgcatcgtgatgctcgccttcaacaaggatgccgccaaggaactggaggagcgtgcgcagcgaaccttcgatcgactcggcatgggcaacaccgtggttgaggcccggaccttccacgccctgggcctggccatcatcgccaaggcaaccggccgcaagcccgacatccccgaatgggccattgacgccacgctgggcttcaacaagctggccgaactggtggacgacctgaaggatcgctcgacccacttccgcacccaatgggacatgttccgcctggtgttcgggcgcgacctgccggcattcggcgcggaaatggaggccgatggctacgaacgcgatggcacgccctacatccgcaccctgcagggtgagcgggtgaagagcctggaagaatgcgtgatcgccgactggctgttctacaacggcgtgacgtacgactatgagcggcgctacgagttcgatactgcgacagacacccactgccagtatcgccccaacttctattacccgcatgccgggctgtatcacgagcacttctcgctggatgcggatggccaggcgccagagcagcttcccgactacgccgaaggtatgcattggaagcgtcaacagcatgcggcacgaggcaccgcccttgttgaaacaacctcgtttggtttgcgcagtggatacgccctgcgggatatggcggagaggcttggcgagtccggtgtcgaactcgaccccaaccccgaccgcgagctgcccgaccagggcgcgaagcccatgccggacgcggacctgatcggcttgatgcgcaccttcattgcccatgccaagagcaactgcctgacgctggatgatatggccgagcgcctgcgacagatgcccgaagaccagttcaaggaacggcatcggcgcttcctggaaatcgccagccctgttttccaggcctgggacaacgcactggctgacgagcacggcatcgatttcgaagacatgctcaacatggcggccggactgctggaacagggtcgctatgaatcgccctacgaactggtgatggccgacgaattccaggatgcctcgcgcgcccgcgcccggctctgccgagcattggtaagtaaaccaggacgctacctgtttgcagtaggagatgactggcagtcgatcaatcgcttcgccggcgccgacgtttccgtgatgaccggattccacgaatggatggggcatggccaggtgctgaaactggagcagacattccgctgcccgcaggcgctctgcgatgcgtccagccgcttcatcagccggaatccagcgcagattgccaaggcggttcgttctgccgcaccggcaatggggccagtgctgcaagcgttccagatgaatcgtcgcgaggagctgcaggatggcattcgccagtacctcgccaagctgcatcagcagttgctgtccggggcggtgccgcaagggcgcaagggacgcgtgacggtcttcatcctgggccgctaccgcgccgaccgcagcgcgatgccttcggattggaagacagtcttcggcagcacgatggacgtggagttcctcacggtccatcggtcgaagggacgcgaggcggactatgttgttctgccaggcatggtcaaccgcagcttcccgagcctgcgctcggatgacccggtgctttccctggcaatgccggagggtgatacctacccgctgagcgaagagcggcggttgttctatgtggcgctgacgcgtgcgcgacgctcggtggccatgttcacactgcaggggaagcgttcgccgttcctcgatgagctggtgaaggatggggcagtggaagtgacgagcctgtctggcgtcgccatcaacgaagaacgttgcccggtgtgcaaggtgggcgtgtttgtggaccggaatgggccgcacggggccttccggtcgtgctccagttatccgttgtgccacaacaagccgaagggtgggcgttag

SEQ ID NO: 498535 - DNA, 756 bp, Stenotrophomonas maltophilia
atgtccggcgcaacccagaccggccgcacgatcaacggccacacctataccgatgcgcccgtggaggtgaagcttgggccgaacactttccgcattccggccaactacctggacagccagatcgcaccgtggccgggcgagggcgtgacgctggtcatcgagtggccggacatgaagccgacggcgccgggtgcgcgggcgaatccgcgtacgaatgatttccggaaggagattgccattcggatcaactacgtcgatcgcgttcccgtcgaaacactgctttcaaggctgtcgtcaaatgaagccatcacgaaggagggctctgtggaaagggaggatcccagggaccgtctcgatcaacgcgttgcaaagccgcagaccttgggcctgacgccctatgcaatcgatgaagcgaagatggtggtgtacgcgaagaagtatgaggcgcggtacgggaagccgcctgtgcgcaatcccgcctacgagagagactggtacatcgcacgccagggcgatggtcggatcagctcgttcatcaaatgtgacggcgaggaattccgacgcgacggcgtgcggctggaggggcgcgaggtgatcagtgagcccggggaagtggcagcgggctgcgttcattacttcgtggacatcgacaacaagctgtccgtcagcctggactacaagagagcgtttctgaaggactggaagcgcatggaagaggccgtcagggacgtcatcgcgcgcacccggtccaagtga

SEQ ID NO: 498536 - DNA, 1320 bp, Stenotrophomonas maltophilia
atgagtggattgaccgagcgagatctgagcgtccttggcagctatgccagagacggcaaccgcgagctttactggaactacctgtcgcaactgccgggagccgatggatacgggacactggcactgggtgttgtacgcaatgacagcctgccgggacgcgtcgcgaacacttatgcacagaactacgcgaagagccagcaggaagagggatctcggtttccaaatgcacagttgaccgaacggcaatgggagtcctttgggcagacgctgctagaaagagatcttgagttgcggcagcagtggatgaacgagcgccgcccagacctggcactgaatcttcccggcaaggatgtgatgctggctcacgaccgtgcatttgaacggcatgaactcgatcccaattgctggacgccgcgcgtgttgctgcaggcggctgagcagaagagcggtcccgcgaagctggaacagatctggaccaacatgctcaacaatgactacgccggaggcccgcgtgtaggcaacaccagcgtcgatgccatcagccagatgggatggacgaaaggcggccagtacctcacccggttgagcgtgctggaagccacccaggccctggaagggcgctcggcggtcgatccgaacgtcatcggtggcaacagctactacgcgatgtacttcgaggcggacaggaaatgggccagcatcagtgcgggcggcggtcacatgtcgctgcgcgagatcaccgatccctcacgtatcgccgaactcaacgacgcgcgcgaggttcgtctggagcgcctggagaagcgaacccagttccacccggacgacccatatcggaccattacccgcagcccgcttaccgcagccgtggacgtgccggatccctcacaggcgccgacccgtctggccgacattggtcctggccaccgtgagtacacattgctgcagcaggtgcgcgaaggcgtggccgcgatcgatgccagcgcggggcgtacccacgatgagaacagcgagcgtcttgtggcgagcgtgatggccttggcccgccgcaaccagcttgaacgcgccgatcacgtgctgctgagcgcccagacggccgacgctcccgcagggcggaacgtgttcgtggtgcagggcgagatgaccgaccccgcccacctgcgcgcttcaatgcccacggatattgcagtacagacgccggttgcgcagtcgttgcagcagatgaaagcggtcgacctggatcgccagcagaatgccgggcaacgccagcaggaaattgatgtgcaggcgcgcgagaaccatgcgatgcggatgggatga

SEQ ID NO: 498537 - DNA, 249 bp, Stenotrophomonas maltophilia
atgccggccactggtcaccctgtcatccatgcctttgaagctgtgttcgacctgtctggcggggtggagcgcattacggcgctcactgtcatctgccggcattgctctgaaacccgctcggccagcgaagacaatctggtccagctgccgggcggcgccttgttccgctgcgacggatgcggcagtcatcaggcggtgagccatgcgcgggttgccgattggcaggtgaattcgcttctgggtgtctga

SEQ ID NO: 498538 - DNA, 174 bp, Stenotrophomonas maltophilia
atgccccggttcctggagcagtgggaactgcccgcgaacccggacctgctggccagcgccgaggacgccgccgaagcgcggaagtttgcccagcagtcgtgcgtcgacaccggtggatgggcgtgtcaggttgcatacgaggactgtacgaagccggtctatgagtcattctga

SEQ ID NO: 498539 - DNA, 1116 bp, Stenotrophomonas maltophilia
atgatgttcaccccccaccgcctgggcgcgttgacgctgcccaaccgcatcgtgatgccgccgatgacccgctcgcgcgccgccgatggcaacgtcgccaccgcggaaatggccgcctactatgcgcaacgcgccagcgccggcctgatcgtcagcgaaggtacccagatcagccagcagggccagggctatgcctggaccccgggtatccacagtgccgagcaggtgcagggctggcggcaggtgaccgatgcggtgcacgccgccggtggccgcatctacgcccagctgtggcacgtcggccgtgtctcgcatgtggccctgcagcccgatggcgcggcgccggtgtcttcctcggcattgctcgccgaaggcgtgaaagtgttcgtcgacccgactggggcgggtcccgaagccggtgtgggcgagatgatccagcattcgatgccgcgcgcgctgcgcgaggacgagattccgggcatcgtcgccgattacgcgcaggctgcgcgcaatgcgctggccgcaggatttgatggtgtggaactgcacggcgccaacggctacctgatcaaccagttcatcgactcacaggccaaccagcgcaccgatcgttacggtggttcgctgcagaaccgtctgcgcttcctgcgcgaggtcgtgcaggcggtggtcgcggtagccggtggtgatcgcgtgggcgtgcgcctggcgccgctgaccacgctgcagggtgcggtggacgatacgccgcaggcgacctatctggccgcagcgcacctgctcggcgagatgggggtgggctacctgcacatcgccgaggccgactgggacgatgcaccaccgatgccggtggcattcaagcaggcgctgcgcatggtctacccgggcacgctgatctacgccggcaagtacaccgccgagcgcgccgagcaggcactggccgaaggctgggctgacctgatcggcttcggccggccgttcatcgccaacccggatctgcccgagcgcctgcgtacgggtgcgacgctgaatccgccggatcgcgccacgttctttggcggtggtgcggagggtttcactgattacccggcgctggaagagagcgtcgcggcctga

SEQ ID NO: 498540 - DNA, 774 bp, Stenotrophomonas maltophilia
atgaccatcccgttcgcacttggactgtccaactactccggcccactggcaggagcgcaggatttccagaagtttcacgagttggctatatccatgctcgaaaagcgtggagtagaggccacccactttgcggctgacggaaagggccagagcggcaagttgacgaagctgggcaatgcagcacatcgaagacttctggccagtggcttcaacgagctgactctcctcggtgttgacgctgtacccaaaggaagtgacgcgcccgcctacgatctgacggcatccgtcgatttcttctccagtcgtgagcttggaacggaattcgttctgttctccaaggacgctcgctttcctctggaaccgcagtccttccgggggctcctggtggggctgatcgctctgtatgactgggactttggctacgtcactcacccacccttcgagcgcagcccgcaggcctacatcagtggctactgcgatggaacccaatccaaggacgaagaagaccgcaatcagatctggcatgacgcccagccggaggtgcgcctgcgcaaggcgcgcaacattttcccgcttagtctgctcaatccggcacagctgggtgcacccgtcgcgcccgacaagacattggctgggctactgcaaggtacccccggctgcacattggacgagctggtgcccggccgcctctggctcagcacggtagagccgcatctggtgcagggactacgctcgctgctcaagggtacgggcgcattgatcgaaggcggctga

SEQ ID NO: 498541 - DNA, 738 bp, Stenotrophomonas maltophilia
atgcaggagttctgttttgctcgttggcggccgggtgcaggccggcaatccgcaacggccggagcagccggccagcggccggctctaccactcggtcggatcgcatccggcgcggatgcaggtgttctgttttgctcgctggcggccgggtgcaggctgggtagtgccggcacccggccggcaatccgcaatggccggagcagccgaccagcggccggctctaccactcggacggatcgcatccgccgcggatgcaggtgttctgttttgttcgctggcggcgggtgcaggctgggtagtgccggccgctggccggcaatccgcaatggacggagcagccggccagcggccggctctaccactcggacggatcgcatccgccgcggatgcaggtgttctgttttgctcgttggcggccgggtgcaggccggcaatccgcaatggacggagcagccggccagcggccggctctaccactcggtcggatcgcatccggcgcggatgcaggtgttctgttttgctcgttggcggccgggtgcaggccggctctatcacttcagtgccgctgtgccagcagcaggtggaagtgcttttctcgggtctggccgtcattgccggctgcggattcgcggtggctgcgccaggccgagacgcggaagcccgatacccgcagcgccagctccaccgcgtccagctcatgcagctggaagtcggcggcgaatggcaggctgcgcatga

SEQ ID NO: 498542 - DNA, 702 bp, Stenotrophomonas maltophilia
atggtcaccggcggacccgccgccgccacgtccgaaactctgcaacggacgatgatgatgctggatgctcccaccctggccgcacagctgcggcagccccacggcgaggccgcgctggcagtggccgactcgatgaatcgcagcaacggcgcactcaacctggccgcaatcggactgctggccgtcggcgccggcgaacgggtcctggaggtcggcccgggcaatgcggccttcgcgccactgatgctgcaggccaccggcagccactatctgggcagcgagctgtccacggccatggtcgaggccggcaaccagcggctggccgacgccggggtggccgaacgtgcggcgatgcgacacggcgacgcccatgcactgccggtcgccgatgccgcgatggatgccgcgctggcggtcaacaccctgtacttctggccgaacctggccccggtgctggacgaactggcgcgggtgctgcgccggggcggccgcctgtgcctggccttcggcgatgccagcttcatgcgcagcctgccattcgccgccgacttccagctgcatgagctggacgcggtggagctggcgctgcgggtatcgggcttccgcgtctcggcctggcgcagccaccgcgaatccgcagccggcaatgacggccagacccgagaaaagcacttccacctgctgctggcacagcggcactga

SEQ ID NO: 498543 - DNA, 552 bp, Stenotrophomonas maltophilia
atggcctccggaaacaatcgcgcggttgccgatacaatccgccgcatgtcgaccgaactgaaaacccaccagctgtccatgaccgtgctgatgtcgccggaaatggccaatttctccggcaaggtccacggtggtgcgatcctgcgcctgctcgaccaggtcgcctacgcctgcgccagccgttacgccggcagctacgtagtcaccctgtcggtggaccaggtgatgttccgccagcccatcgcggtgggcgagctggtcaccttcctggcatcggtgaactacacgggcacctcgtcgatggagatcggcatcaaggtggtggccgaggacatcctcaagcgcagcgtgcgccacgccaacagctgcttcttcaccatggtggcggtggatgaggaaggccggccgacgccggtgccacccttgcagccggtcacctcggacgaaaagcgccgccaggctgccgcgctgatccgccgccagctgcgccaggaaatggaacagcgccatctggaactgctggcgtcgaacccgccgtcgccggaggaatga

SEQ ID NO: 498544 - DNA, 2916 bp, Stenotrophomonas maltophilia
atgcgatcccatcagatccaatactcggcgctggccctcgccttgacggcggcactcgccgttggcatacctgttcgtgcacacgcacagcaggtcatcgcagacggtgacgcacagaccccggcagcgggggattacagcgccaccggcgtgggcaaccacgccttccatgcgctcaacggcggcagcatcgttccgctgggtgcggtcaacgtgagtgccgatggcgatggcgcatccgccgcccgcgccgaaggtgctggcagtcgtatcgaactgaatggttcgactttggtcaccagcggttttggtgccaccaccgcgctggcaacgacgggcggtgaactgcatctgacggcgaccgacgtcatcaacaagggcaccggcatgggcgttgcggcgcataccggcagccaggccacgctgcaggatgtgaacatccgcatggaaggcgtgtcgtcggtcggcctcgccggcggcggtgacatcagcatgaccggtggctcgatctcggcgatggggctgggtagccgcgcggtgtcggccaccggggcgaacatgaccctgaccggcgtttcgattgaaggcgagtcgggcatctggctgggtgataacaaccagcttgatctttcaggaagcgcggtgaacgccagcggcatcgcgttggacatcaatggtcgcagcaatgcagtcactgtggcggactccagcttccacagcaccggcaacgggaccgcaaccgtcaagatgttctccgattcgacgctggcaatggcccgcagttccgtcatcagcgagggggaccgtgcggtgggcattgatgcccgaaccggtacggtggatctggaccgcgtgactgtgaccacgtccggtgagagcagccatggcctgtatgccgatttcactggcatcggcgccggcccgatcatcactgcgcgtgcggcccagattcacaccacgggcgcgggtgccattggtgcggttgcgcgccagggcggcagcatccatctggacgacaacatcatccgtaccgaaggccagcaggcccatggtgtgctgaccgggggcagcggcgggatgacgttgaccggttcgcacattcgcaccgagggcgagggcgcctgggctgcggtgatcaatgacaacggcagcctgggcatcgacggcagtgcgctggaaagcgtgcagcacggtggtgtgtgggttcgcagcagccgtgactccggtttgacgctgtccaacaacgcctacgtatcgggtggcaatggcattgccatcgcactggatgcggcggtggcggggcgtttcgacgtggtgttgcaggggcattcgcagatggtcggcgacatcgtcatcacgcccgaggacgaggatgccggtctggtgccgcagtccgatgtgcacgtgcgcctggcagacgggtcgctgtggcagggcacgtccaacctggtgcagacgatggcaattgaaagcggaagccagtggacactgaccggtgatgccacggtgggcgaactgagcgtactgaacagtggtgtggcgctgtccgacggcagtggccgattcaacacgctcaccgtagacggtgatctgcacagcgagggcgcgacgttcctgttccagggcgccttgggcggtgacgacagcgcctttgatcgcctgcatgtgcgtggcgatacttcgggcgatgcaagcattgcggtgaagaacattggcggcgttggcgctcagaccaccgatggcatccagctgatcgaagtggatggtgcatcgctggcaacctatgcgctggccggccgcgccgtgggcggctcctatgagtacttcctgttcaaggggggcgtgatagatcccaccgatggcaactggtatctgcgttcgcaatggttcgatatctgcaaggacaatccggccgcgccgggctgtgtggtggacccggttgatccggttgaccccatcgatccggtggaccccgtggatccggtggacccggtgccggtgctgcgtcccgaagccggggcgtacctggccaaccagtcggcagccatcaacatgttttcccatcgtctgaatgaccgcatcggtgccgtttcgctggatgaaggccgtgccgcatgggcgcgcgtgggccggcagcaggcggacttcagcgcggtcggtggccagctgtcgattgatggcaacacctcggtgctgcagattggcactgacctggttcgccggggcaatgcagcgttcggcgtgatgatgggcacggggcgtgccgacagcagcgcagtgtccgatctgaccggctacagcgccaagggtcgggtgcgtggcagcgcggtaggtgtgtacggcacctggatgcaggcggctgacggtacgcagggtgcgtacatggatgcgaacctgcagtacggccgtttcgataaccgggtgcagggcattggcctggagccggagcactacgattcgcgcatgaccagtgcgtcgctggagaccggctacaccttcaacgtgtggcagggcaccgccagcgcactgtatgtgcagccgcaactgcagctgagctatgtcgatttccgcgccgatcgccacgtggagagcaatggcacggtgatcgaccatgccgatgctggcggcctgagcgggcgtctgggcgtgcgcgtgtttggccatgacactgcagccggcaacacggtgcagccgtacctgggcgtgaactggctgcgtggcagcggcaccagcacgttgcagttcaacggtgacacgctgggcgcagacgtgccgcgcaaccgttatgaggtgcaggccggtgccgagttgaagctgggccagcgctggggcgcgtgggggggcgtgagcgtgcagcgcggtgattacggctaccgcaatgtgggcggccagctgggcctgcgcatggcctggtaa

SEQ ID NO: 498545 - DNA, 591 bp, Stenotrophomonas maltophilia
atgcgtctggccatcgtccattacacgcgtcttcgctcactgcttggatccgttcttgccggcttgtcactggtatccgggccggcaatggcatgcgaacactacacagcctatccggacgttgtgcttgatacggtctatgcagctgctccagtacaaccacgcgtcttcatggatcaggaaagagggcgctcatccttgaggaagtgcgcgtttccgggcgggcccatcagtgtcttcgtgcgcttggatgtgccaggtctgacgtacgcaggtgacctgcaataccagggaagaacgtacgcatcctatgccagctctcccgattcggtgctgttggctttcgatgtctactggaatctgctggatcgaaggccgctccgcctgggtgaggaactggagatggagttcgacactaccgccggtgacggattgcagtacgtcatcagctataccgcgctggtgttttcgcgtggcggtctgatgcgcagctcccccgtccgtaccggactcatctcgctgcggtcaccggagtatcccgagctggacagcagcggcgattactacctggcgcccgtattgaagccgtga

SEQ ID NO: 498546 - DNA, 918 bp, Stenotrophomonas maltophilia
atggtagtttccttgctgctcgccctggcgggccatgcaagcagctgcacgttcaccgtacaagcgcccatcgtcatcaacaagagcaggcccgggcatcctgacacggtccgcatgatctgggacgacggaaccaatatcagttccagcggttgccccgtttccagtaagcactctctggatatgaccctggtgggcccggcgctgcgctgggtctcggatgtggatttcaccgcgtaccccatccaaggtcgattgccgctgtacgaggttggtcctgactcggcgctgctggggtttgttgcaagcgatggagacagttcgtactggccgttgcgacttggtcccaaccgttttccaggtgttcctggcaacacgaacttcattgtgatcgcatacgtgtacagccgcggcgagagaatgcgcgacttccagaccacgctggatctggagttttcctccgttgaccattcgacgatcaatgcaagcctgcccatcagtattgacatgcagtttcctccgacaacctgccctgtgcgggacgttgcggaagtgctacaggatgtcagcgtcgcggagttgatcgcgccgggggatacggcgaaagacaagatcgtgatggttcgcatggagtgcggggccaacgtgccgcgcgcggaactgatgttgaaggacgcgggggatgcgggcaacaccggaagcctgttgacccctacagcggattccggcgccaagggggtccgtgtacagcttctacgtggcggcagcgaggtgcagtttgggcgggcctggcacttcaatcccggcacggggggagtgcatgaccatgctttcaccgcccgctattaccgcaccgcggatgctcttgttccaggcatgatcaagggggaggcagtgctcaacgtggactactggtag

SEQ ID NO: 498547 - DNA, 582 bp, Stenotrophomonas maltophilia
atggattaccagacttccgccggtgacgggctccagcacaccatcaactacacagcgctggtcttctcgcgcggtgggcgcatgcgcacgtccagtgtccgcaccggtcagatctcgttgcgatcgccggaatatccgggcctggactccagcgcagcctactacctggcgccccgattcccggccgtaacctgtcccctgcaggatgtttcggaagtgctcccgaatgtgcagctggcggaactgcctggtccgggcagtacagccaaggagaagccgctggcggtgcgcatgaactgcggctcggacgcaccgcgtgcgcagatcaccttgaccgatgctggcgacgcgacaaattctggaagccagctgacgccgacgccggattcagatgcgaaaggcgtgcggttgcagctcctgcaagcaggccgtgaagtgaatttcgggcgcatctggcgttttgagcccggtgccggcggcacgcatgagattgcctttaccgcgcgctacatccgcaccaatgaatcgttggtgcccggcctgatcaagggcgaagccttgctcaacgtggactactggtga

SEQ ID NO: 498548 - DNA, 1002 bp, Stenotrophomonas maltophilia
atgtctgctcatgttcgcactgcatctaccggcatggtgctgcgcaaatcgattccggcgaaactgttcactgccttggcgctcgttgtgacggcgggagccgcaatggcctgcgagcagtattcagcgaagccggatgtactgctcgacaccgtctacacatccccgccgtccggagccaatgtattcatggccgaggaacgcggtcgggccgcatatgagaagtgctcactgcccggtggcacggtgtcggtcttcgtgcggctggagattcctggcttggtctacgtcggggacattcagtaccaggggcgggcctacgcttcctatgctaccgggactgattctgcattgcttgcgttcgacgcgtactcgaacatttttgaccgaagaccactgcgcttgggtgaggagctggaactgccgtatgagaccgctgcgggggatggcttgcagaacaccatcaactacacggcgctggtgttttcgcggggcgggcgcatgcgcacgtccagcgtgcggaccgggcaggtctcgctgcgatcaccggcacaccctgagcttgatctgacgtcctcctactatctggctccccagtttcctgcagtgacctgtccgctgcaggatgtctcggagacgctccaggatgtgcagttggcggaattgcccgtgccgggtagtaccgccaaggagaagcccgtcgcagtgcgcatgagctgcggtacggatgcaccgcgtgcgcagatcaccttgaccgacgctggcgaccggacaaactcaggtagccaactgacgccaacggctgactcggatgcgaaaggcgtgcgggtgcagctcctgcagggcggaagtgaagtgaactttggacgtatctgggatttcgaacccggcgtgggtggcacgcatgacatcgcgttcactgcgcgctacatccgcaccaacgaggcgttggagcccgggcagatcaagggcgaagcggtactgaatgtcgactattggtaa

SEQ ID NO: 498549 - DNA, 510 bp, Stenotrophomonas maltophilia
atgaacctgttcaaccgcatcactctgtgcaccgcactgctggccgccgcgccgctggctctggccgatagcgccaccctcaccatcagcggcaaggtgcttcccggcacctgcacgctcaccgcagcgccgatcaccttggacccggtgaaggccagcgacctgacgcccggcgccgatgcgcagatcaaggccggggcgctgcaattcgcgggctgcgttggcgtaagcaaggccgtgctgtccttcgccggtaccgccgccgacggcgatgcaacgcgctggaagaacaccgctgtaagcgatgccgccgaaggcgtgtcgatctcgctgctgtccggtaccaccggcagcaactatctgaaggatggtgacaccggcatcgatgtgccggtggctggcgccaccgcgcgttacgacctgcgtgccgcctatttcctgcccaccggcgaagcgccgagcgcgggtgaggtttctaccgagatcgtggtcactgctgactacgagtga

SEQ ID NO: 498550 - DNA, 2541 bp, Stenotrophomonas maltophilia
atgcacatgcgcctccttcatctccgcacgccgcatcgttttgccagccgtccactggggctggcgattgccgccgccgtggcaatggcgattgccggtcatgccagtgcccatggcgatgagtccctgcagttcagcgagggcttcctgattggtggccgggccatcgacatgcagcgctatgcgcagggcaatcccatggagccgggcgtgtatcccctggacgtggtggtcaatggccagttccacgacaagcgcgacatcaccttcgtggcggcgccggcacctctgggggcaaccccgtgcctgccggccgggctggtacgccagttgccgctgaaggagatgttcctggccgagctggaccaggatgatgaaggctgcgtcgcacttcccagcctgatcgacggtggcacggtcgagttcgatgaaagcaatctgcagcttctagtgaacgtgccgcaggctgcgcaggcgcgcgatgcgcgcggctacgtggcacctgcacagcgcgaccacggcgtcacggcagccttcttcgattacaacatcaaccacagccgcaaccagggccagcaggcgacctatctggggctgaacacgggcgtgaacctgggcgcgtggcggctgcgtcaccgttcgtccttcagccagggcagccatggctcgcgtcatgatgtgatcagcagcacgctgcagcgcgatcttccggcatggaatgcccagctgctgttggggcagggcacgaccggtggcgaactgttcgagtcgctgtcattcaccggtgtgcgggtggccagcgatgagcgcatgctgccggactcgctgcgcggcttcgcgccggtggtgcagggcgttgccgaaaccaacgcagtggtgagcatccgccagaatggccacgtcatccacgaagtaagcgtggcgccggggccgttctccatcgaagatctgtacccgaccaacttcggtggcgacctggacgtcaccgtcactgaagccgatggccgccagcagcagttcactgtcaacttctccgcagtgccgcaggcgctgcggccgggcgccagccgcttcagcgtcaccgccggtgaacttcgcgatgcacgcggtgtgcgtgaagcactgcgctttgccgaaggcacctacgcacgtggcatcagcaaccatttcaccgcgctgggcggggtgcagattgccgaagacttccagtccgcactgttcggcggtgcaatcaatacaccgctcggtgcgttcggtgccgacgttacccattcgcgcgcacgcctggccaatggcgaacaggtgaccggcaacagcttccggctgaactaccagcgctacatcaccgcaacgggtaccaacttcggcttggcagcgctgcgttacagcacgcgcggctatctctccctgaatgatttcgcccaggcgtacaacgacgagtggggcgtcagtggccgtgcgcgccagcgcttccaggtgaacttctcgcagcgtattggcgagcgcagcacgctctcgctcaatggcggacaggtgcgctattgggacagcgcgcagcagcacaacgatctgcagctgcgcttccagaccagcatgggccgcgccaatctgagcctgtctgccatgcgcctgcagatgggcgatggccgccaggacacccgctatgcggcgaccttcagcattccgttgggctcggccccacgcgcaccgcgcttgagcacccaggtagcccattcggcacgcggcgatcagggccagctgggcctgaacggaacgctgggtgccgatcagcagctgagttacagcctgtctgccagcgattccagtgacggggcgggaagcgccaatgcctacgcgtcctatcgcggtgggcatggcacggtcaccgccggctacagccggtcgggtgattacaacgccttcaacgccagcgcggccggcagtgtggtggtgcaccgcgatggcatcaacttcggtgcgccggtgggcgatggcttcgcgctggtacaggcagatggcgcgcagggtgcccgcatcggctacggcagcgacgtgcgcatcggtcgcaacggctatgcgctgctgccgcacgtgagcccctaccgctggaaccagatcgagctggacccgtcgggcctgccgatggatgtggagctgctgcagacctcgcagcggattgcgccgacggcgggcagcatcgtgcgggttgcgttcaatgccaagcgcgagcgcacattgttcatcgacgccaccgatgcgctgggccagccgctgccatttgccgcgcgtatcgaagatgagaccggccgcagctatggcgcagtgggccagggcggtgtgatccagctgcgtggcgcacccgaacagggccagctgatcgtcgacccggacggcccacatcgctgccgcctggaatacaccaccccggatgcccccgatgcctatgggctgtcgtggagccaggcggtgtgcacgccgctgccggccccgagtaatgggctgcaggccgccctggatgcggtcgaagccacctcgttctga

SEQ ID NO: 498551 - DNA, 516 bp, Stenotrophomonas maltophilia
atgtcgaaccgattgaacctgattgccgccggcgcgctcgcgctggccctgtctcccgccgcattcgccgagaagctggaaatcaccggcgagctgatgaccagcacgtgctcggtggatgccaccggcggcaccatcaccgtgccgatgggcaaggtggacgtcgcgtgggtgaatgaagccgagcgtgccggcatgaagaacttcagcatcctgctggactgcaccggctccggcgctgcgcaggatgtaggtgtgcgctttggcggcacgcccgacggcagcaccggcaacctggcgctgacggctgcctctacggccacaaacgtgggtgttgcgctgtacgacgcttcaggcaaccaccagaagctgggcgaggacccgctgcagtgggtgaacatcccggctgccggcaagggccaactggactacagcgcctggtattcctcgcctggcaagaacgccacggccggcacggccaacgcctcgggcgatttcgtcgtgctttacaagtaa

SEQ ID NO: 498552 - DNA, 723 bp, Stenotrophomonas maltophilia
atgaagatccgtgcaatgacgtggatgaccgcgctgctcgctggcgccctggcgctgccggcatcggcagcggtgacgctgcagggcacgcgcatcgtgcatgacgcggcccagggccgcgatgtaaccgtgaaggccaccaacggtggcgacaaggccgccatggtgcaggtctggattgacgatggcgacagccatgcacgccccgagaacgtgcgcacgcccttccgcctgacgccggccgacccgcgcctgctgcaggcccaccaggggcaggcgtaccgcattacttacgcgccgcgcccgtcggagacaccgctgccgacggatcgtgaatcgctgttctacttcaacctgctggacattccgcccaaacccaccgatgccgccggcaagaacctgctgcagttcgccgtgcgcacgcgggtgaagctgttccaccgcccggccggcctgcccggcaagccgcgtgatgcggccgggcaactgcaatggcgtgcgcaggccggtgccctgctggtgagcaaccccagcgcctaccacgtgactgtaagcacgctgaccctgcccgacggccgcaaggtggaagcagagatgatcgcaccgggcgcgcaggtacgtctgccgcttccgagtggtgcggcgatgcccgcgtcggtgacgttccagtggctggacgattacggcacgccacgtgatgccgaggcgaagatctccccttga

SEQ ID NO: 498553 - DNA, 411 bp, Stenotrophomonas maltophilia
atgaccgcttccccctacccgcacttgttcgccaccctgggcaaggccgccacgcgcctgcccgatgacctggcccgcacgctggaagacaccttagttgcgctgcagaccggtaacagccctggcgccatcaccctgcaggcctgcctgcagtacatccgccaaggcgatgccgccgatggccagccgtggcccggcagcaaccgcacacccgggcagcgcctggccttggcgcgcatcgaccgcgccaatgcggggctgagtttcctgctggaactgctgcacgccaccgaacgcgtgcgcgtggacggggatatcgaccagcacatggatgacggcgcgcgcgaagggctgttgctggcctgccgtgggctggccgagtatgtggatgtgcagttgcacgcggcgtag

SEQ ID NO: 498554 - DNA, 1053 bp, Stenotrophomonas maltophilia
atggttgtttcgcctggcgccttcgcagatggcgatgatcccgctgccgtgcgtgccatcacaagcgcgcaggcgttgcaggacctggccgccgtcatcgagtgccgggctcccacctcggtacgcgagccgctgtcgcgaaatgtgtgggatgtcgtgctgggtgatggcaagcgtgcaaagccgccattcgatgcgtggatcgttgtcaaacagcccaattcgtatctgcatgaggtcgagctgcctagtccgatcactgtattcggctacccgacccagcgcatcgcagtgctgtcggaagggacgatggccatccttgatgatgtctcctttgagacgatatccaagcagctggaaatgaatccgctacatgcaaccgccgcccctcacatccatgtgcggaacctgtccttgcgcaatgtcagcgaaatcggcttttcggttcgttcacttacggcgtcgcgcgtctctacccaccccgactctgtgctggtggggtgcgaggagcgctacgacacgcggatggagcagttgctcaggcgcggcaaggaacctgacgtggtgttcgcgccgggtgtggatatcgccactgagctcgatgacgtgctgagctgcaacgccgacgcactgcgcaattacacggccgattgggcggtgaccatgtcggcgcacaccactgatacgcgtttcaaaggctggaaggatggagaagatgaagagggcaatcgctggtgggtgccgccggcaccgatcatgatcgccggcaggcccgtctcgcgcttggtcaaggtgggtcagaccttgtacgcagagctggacggggatatcgccgaaacgctggccgaagaatggcttctgccaccctacgatggctggagcgacgctgctttcgtaggcttctacgataccggcacggcggccgatggctggctggaagatcgcgcgcgcatcgtgcgtgcgtgggcgcccggcaagaccctgcacggctgcgagtaccagcagaatcgtccggagttcggtgaacatccggacgatgatgacgaaggatga

SEQ ID NO: 498555 - DNA, 474 bp, Stenotrophomonas maltophilia
atggaagacaccttcgctgcctatgcgcgcgtcatcacccagaatgacgaggacgccagaactgcgctgcgaaacagcctgcgcactgcagacccggacaactatcccgacatcggagacgtcgttgacgcactctacgcattcgagaatcttgccactggtttcgaagagcccgcggccagtgcgatcaacgcgcgccggaagaccattcactgccgttcggtcagaaccgaggaggacagctcctcccatcgcggtgttgtggactaccagtgcacgcttcccgatgtttctggcgcctttgacgcctatcgggagaatctggcgcgctcacgtgccggggaccctgatggcgatgctttcagaacgttccttcgcatctatgcggcaaccctgcgcgacgcgcctgacaccacgtacgtcgccgcctcccgggttcgcccccgcccccaacttctccgggtttgtcagtga

SEQ ID NO: 498556 - DNA, 495 bp, Stenotrophomonas maltophilia
atgcaggccttggcgaccgtaacactgcgtccgcaggccacgcttgagcagaggatcgccgcgatgcctttcagcgttgagccggcgtcccctttccgcctgctggacaccctgtccggatcagccgtggcacttacggccggtgaactggatactgatcccgatggtctgcagcccctggtaattgtcgcgtcgcagctttctctcccctttgcctctgacgatccagagaaggtgtccgatcagttgattgcagggaccgtcagcattcagggcggaacgatcacctcaagggagaacgtgccgttcggcggtatcgccgggcaccgggttgatggggtgacacccgacggacgccactaccgcaactatctcgccctgtggccggatgagcgtttcgtccgtttggttgccatcctgccggcagacagttccaaagaagtggaagacgcggttgacgccatggcctcctcggtccggttccgcgggccatga

SEQ ID NO: 498557 - DNA, 864 bp, Stenotrophomonas maltophilia
atgctgaaatccatcgccatcctgctgctgggagcgccgctcaccgctaccgccgcgcaccctgcagcgctctcgctggaagagaccttcgagacctatgtgcaggtcatcgttcacggcgatacgccgtcgaaggaaaagctgcgccaccatctgcgtgcatttgcgaacagcgacagcgttgaggtgaccgtcaacgccatcgatgcgcttcagctgcccaaggtcgccttcaacggtacagcaatggaaccggttgccagtgctctggagatgcggcagaaggccatgtcctgcaccatcaccgacatcacccgggagacggtgcattcaacgccacgggcgaccgtggcgtatcggtgcgctttccccgacctctcgggcttctttccgacctaccgggacgcgcagaagcgacgcgccgacgtcggcgatgatcccgaacacgccagggcgctcttcgcggcattcgccaatgccctgcgcgacgcgccggatcattcacatgagggcagcactgtgttcctgcagtccgcaggcagcggccactggatggctctcgacctgccgttgctcggtacggcactgctgcaacggatactgcccttcgacgcatggaatacgcggatcgaagcggaagccgtacctgtggttaccggcatacccacctgcgacctgatgatggccgcccagctggggttctttgcccggcatcatccccagagccccttcctgagcaacggcgtactgcaacgcaatctgctcaagcgtgtggagggaatgagcgacgcggaggcaacgcgcgactgccagatcgtccatgagcgcaaccgggagctgtggaacagggagaagaccgaatga

SEQ ID NO: 498558 - DNA, 1260 bp, Stenotrophomonas maltophilia
atgatgtcgggatccttcatgatccggcatctggtggccctgctgctgggctcgccgctctgggcggcagccgctgaacctgccgcgctttcgctggaagcaaccttcgatgcatatgctcaggccaggttccaggacgatacgcccgccaaggaccggctccgccgcagcctgcagaccgccgccacgccggtgccggccgacatcgaactgaaggtagagggccgcgccttccagaacctggcggaggtacacggcgaggcgattgccgacgccctgcaggtacgccggaagcgcattcactgccgggcaaccggcagcgatgttgaagagattggaacactcagcgttggcaccgtgacctatcggtgcgtgctgccagacatgtccaggcacttcgaggcctatcgtgggagccgagaacggatgaaggatggaaagggcgacccgatggatgatgcgtccttccgtacggcgtacgcaacggcgctgcgtagtgcacccgatgcgctgcatgaaggaagcatgcgcttcatcaggaacggcgacggaccgtgggacagcattgagatgctgtatttcgacgccgacatccgcaggctgttgatgccgatgcaggcatgggacgagcgcatcgaaggcgaaggcgtgcctgccgatctcccgccgcaggccgagtacacgctgcaggcgcgggtgctgctgcagaacgatgccgaagcgcggcagttgctgcgggcactgggcgagaacctcgaccctggcgaagccatggactggcgccccatcatcgaagacgttccggcgtggttgtcgcgccaggacttcgcagcgccctcgcccgacgtcactgcagcctttgccgaggcactggcgttgcggctgccgagggtcaactgtgctgctcgggaattcgtgccattgggctcgccggagatcggcatgtacacgctggtgtgccagcatccggacgtagagccgctgcgtcaggcctatctggcgatgcgcgccgcgccggaaatcgagcgccaagcgcgtatcgatgccttgttccagcgttgggccacactactgcgcgaggcgccggccgtaccgcattgcacgccggtagtcggcggataccaggcacgccatgcgttcgcgcatgccgagcgcatgcagcagttgtaccaggccattctgtggcggctgctacccttcgacgtctggctggaagaaccggtagtgccaggtccggatgagctgtgcgatctcacatag

SEQ ID NO: 498559 - DNA, 690 bp, Stenotrophomonas maltophilia
atgaaagcactgatcatcaccacggcagccctgctgctgtcgggcaccgccacggccgcgaccaccgactgggacggcttctacctgggtgcccaggcctcgcatggcgaggggcacagcaaggaccgcagcaatgccaacgcctcggaaaagagcgtgcgcggcttcaccggcggcgtgcagggtggccgtcgctggcagttcgacaacaacatcgtggtcggcgttgaaggcgcgctgtcgttcggcaacgtcagccgtgactggaaggatcgcgagcagcaccggtacagcccgtactacggcaaggacgcggtgacccgttcgggcaccttcgatgtgacgctgggccgtgcgatgggccgctggctgccctacgtcggcgcgggcgtgaccgtggcccagcaggaattcaccctgggctgcgacaagtcgctggtggaagccaccaacggctgccgcgtggccgaattcgagacccgcgcctcgcacctgtccaccggcgcccatgccaccgcaggcgtgctgtaccgcttcaacgaccgcctctcggccggtgccgaataccgctacacccacctgggttccagcccggtgaccctggaagaccccaactaccctgctgcggcccgtcgcagcttccataccgactacagcagcgttacgctgaagttgaactaccacttctaa

SEQ ID NO: 498560 - DNA, 2820 bp, Stenotrophomonas maltophilia
atgaagaccacgctgctgtccactgtcatcaccgtggcattggccacggccgccgcgccggtgctggcacagaccgatgcaccactgccattgtccggtgccgcctaccgcatcgccgagcaggcgtttgccgcctatgaacgtggcgattaccccgcggcctaccggcagtccagcgaagcgatccggttgcgcccggacgtggtgcggctgcgcctgctgcagatctatgcgctgcagaaactggggcggggtgccgaggcgcagcagcaggcacgtcgtgcactggatgcggggttgaaggatccggccttgccggcgctggccgctgcgcccaggacgagcacaggtgcggcgcgtaccggagcggtaccgcgtgcacccgcaacggtgaccgaccgcaatagccggcaggcctatatgctggcaaccgaagcctatgcggcctacgacgccggccagatgggcgtcgccgccagcaaggccgagcaggcgttccggcagcagccgcaacagggcgcatgggcgctgctgtgggtggcggcgctggaggcacagcaacagcccggacaggccgacgccgccatcggtaccgcgctgcagctgggcgcaccgaatgtcgaggagttgcgcgcacggcgcgtggcactgggccgccaacgcgcgctgctgctggcccagcaggcctatcaatcgctgtctgcaggtgagaatgccgccgccattgagcaggcgcacgctgccgtggagctggcccccgacgttgcttcataccggttgctgctgatcaccgcgcagctgcagggcgatcagctggccgacgctgagcgcagtgccgaccaggcgttgcaggccgacggccaggatctcaatgcacgggtgatgcgcggctacctgcgccagcgccagggcaataccgtgctcgccaataaggacttcgacaccgcactcgctgcgccgggatcaacaacgcagcagcgcaacgtgcgcctgctggcggtggatgcggcactggccgcaggcgatcgggtgcgcgcagctgcactgctggcaccgttgcaggcggcggtaccggcaggtgaaggcgatgcacgctcacagcagcttttgcagcagggcatcgagcagcgcagccgggcgatccgctccagtcgcgagcttccccgcatcggtgccgaagcgtacctggcaccagtccagcactgccagtccgttgacagcggcagcgtctgcgagctgatgccggccgacctgcagggcgatggtggtgccgcacagcgtgcctacgctgcctatgcgcgccaggattacgccggtgccatcggtgaggcacggcaggccgtgcaactcgcgccggacgacgcgaacctgcaaggcctgctgaccaccacgctggcggcgggcaaccgtgcccagcaggatgaagcgcggcagcgcctggatgcggcactggcacagcaccctgatgacgcaggggcgctgatgcagcgcggctacctcaaccagaaggcccatgagccggcgcgcgcgctggccgacttccgggccgccgaggccaccggcagggcaccgaaaagcgtagtgctcgaccaggcctacgccagcgcagccaacggcgaccatccacaggcggtgacgctgctgcgtagcgccattgatcgcgccgatgccggtgagctgccactggatgagcgccaacgctacagcgtgcgcaatgccatcgccaattactcgcgcgagtggggcgtgatcgcctcggcgggtttccgtggtgcgcgccaggcggcgaccaatgtcggcggtgcagcgatcagcacgccgggcgattcggtgttcagcacgctggaggcgttctggcggcccccggccttcaacgaccagcatggcacgctggaactctacgcacgcctgctcaacacgctgtacgacgagggtggcacttacgaatcgatccgcgcggtggacccgtgcaccggcgaatcaacgccggatgcgcgtgcacgcgccgaacgcctcagccattcgcgttccaccaccggctggccgtcaaccatcgcttcgttcggcatgcgctacgccttcggccagaccggcctgagcgccggcatcgagcgccgccagttcctcggcagcgcaacccgccagggcgaggtctaccccgcctcggcggccgtgcagtgccgcctgcagttggcccggaacccgccactggaagccagcacgctggcccgctaccgcttggccagcggttccggtggctggatgtcctacctgacctatggctattaccacggcaccgatctgcgcaccgacgtcaaccagtggtggatggtcagcggctacgcgcagggcggctatacctgggatgacaacagcgcgcacttcaccctcgatgcactcgatgccaatggcgcgccggtgcgtcggatcggtgaggccaatggccgcctgcatcgcgaacagtggttcgctgccggtgaactacgcgccggccgcagcttccgctttggtgccgggcagacccattgggtggtcacgccgtatgtggtggtgggagcggactggctggaccagcgctcgcgggtgcgcgacatccgttacccgctgttcccggcgcagtcgttcgcgctcaacgatacgcagcgcagctggtcactgggcgcagggccaggcgtgggcgtgcgctactggttccgcgaggaccactacaacacgccgcgttcctacctggacctgaccgtgcagtaccgcttcgccatcggtggcggcgatacgcagcgcgccaagggcctgttcgccaccgcgatcctttactactga

SEQ ID NO: 498561 - DNA, 2469 bp, Stenotrophomonas maltophilia
atggcgcagagtggtgcggccaatgcgcgtgcaccggaatcggcgcagttcaactccagcttcctgtctggccaggccaagcaggtggacctggcggccttcagcaacggcaacccgatggtggccggcaactatcgtgtcgacgtgtacgtcaacggtgcctggcagggccgtcgcgatctgcagttcaaggccgatgcgcagggccgtgtcgacgcctgcctgccgctgccgatgctggaagaaatgggtgtggacagcgaggccgtgctgctgcagcaggatccgtccgtgcccgccgacaagaccagctgcgtgccggtccagcagcgcatggccaatgcctatggtgtctatgacagcggcaacctgcgctacgacctgagcatcccgcaggtgttcctgcgccgcgaggcgcgtggctacgtcaacccggcgctgtgggaccgtggcatcaatgccggtttcgtcggctacagcttcaatgccatcgacagcgacagtcgcgtcgaaggcggccagcgcaaccgcagtgcctacctcggcctcaacgccggcatgaacctgggtggctggcagttccgccacgattcgaacctgacctggtccgagggcgacggccgccattggcagagcatcgccacctatgcgcagcgcggcattccgcaggtacgcggcatgctcaccatcggtgaggcctacaccaccggtgaactgttcgattcgatcggttaccgcggtgccagcctggccagcgacgaccgcatgctgcccgactcgctgcgcggttacgcgccggtcgtgcgcggcatcgccgagaccaacgcgcgcatcgaagtgcgccagaacgagcagctgatctactcctccaccgtgtcgccgggcagcttcgtcatcgacgacctgtacccgaccggctacggcggcgatctggaagtgagcgtgatcgaggccgatggccgccgccgcgaattcaaggtgccgttcggttcggtgccgcagatgctgcgcgaaggcgtgtcgcgttactcgctgacggccggccaggtgcgcaacaagctgctggccgatgagccgtggctggtgcagggcacctaccagcgcggtatcggcaaccagctgaccctgtacggtggcagtgcactgagcgatggctacctgtcgctgctgtacggcgtcggcctgtccacgccggtcggcgcattcgctgccgacgtcacccatgcgcgtacctcgttcgatcactacggcaaccacaccggtgccagcgtgcgcttgagctacagcaacatgatcggcgagaccgggaccaacctgaccctggccgcctaccgctattcgaccgaaggcttctacagcctgcaggacgcgctgtacggccgtgattcggacaagcgcggcatcgatccgaccacccgtggccgccagcgcagccagttccaggtaacgctgaaccagccgctgggccgtcgcggcggcgcgctgtacgtgaccggttcggtgcgtgacttctacgaccgttccggcacctccaagcagtaccaggtgggctacaacaacgcctggcgttcggtgaactacggcttctcggcgctgcgcaccgaagagggcgtgctgggccgttccgacacccagtacctgttgtcgatgagcgtgccgctgggtcgtggttcccacccggtgtcgttcagcgccgatctcggcgtgcgcgaccgcggtggctacgacaacagccgcgtcggcatcaccggttcggccggtgtcgacaacaacttcagctacggcgtggccctgtccgattcccgcgaaggtggcaccaccgcggtcggcaacgccgagtaccgcagccgctactccgcgttgaacgcgacctacagccactcgcgcgatttccgccaggcttcggtcggtgccaacggcagcgtggtcgtgcatccgggcggcttcaccttcaccccgcagcgtggcgacaccatggtgctggtggaagcgccgggcgcacgcgatgcgatcgtcagcaacgccccgggcctgcgcgtcgatggccgcggctacgcggtggtcccgtacgtgtcgccgtaccgcctcaacaccgtcacactcgacccgcagggcatggcccacgacgtcgaactggaaagcaccagccagtcggtcgcgccgtttgccggtgcgatcagctatctgcgcttcgatacccgcaagggcgacgcgctgctgatccaggtacgcaacccggatggccgcaccatgccgttcggtgcgcaggtcaaggatgagcagggccagccggtgggcatggtcagccagggtggccgcctgtacgtgcgcagtgaaaagaaccagggccgcctgctggtggagtggggcgccggcgccgaccagcgctgcaccgtcgattaccaggttccggcgggcgcagatgcgtccaagaccggcttcattccgctggaggcagcatgccgatga

SEQ ID NO: 498562 - DNA, 10884 bp, Stenotrophomonas maltophilia
atgaaccgcatttaccgtctggttttcaatcgtgcccttggggtaatgcaggttgcttcggaggtcgcccggaatcccggcggaagcgcggtcagcgcagggcgggtgccgcgattgcgggcgcaccagctggcggtggcactggcggccacgctggccagtggatcggcgtttgcagcgtgcaccggcaccacaaccgtaaactgcgacagcaccaccaacatcaacaactactccaacgcgaccaacggcctcacgctgaacatcgccgcgggtgcattgctgcgtacgccgccggtcgtaggtggcggcaacgcagcaacgctgaccggcgacaacgtgacggtcaacaacaatggcacgatcgatccgagctcgatcatcctcgcctcgcccggcctggtcatcggcaatggttctgccaacaacagcgcgatcgtcgtcaacaacaacgccagcggacagatcaagggtgtcgtcaacatcgcaacgctgctgggcttcggtggacaggcgctggtggcacagaatgtcaacggcaccaccaccatcaacaacgccggcctgatcagcacgtcgctgatcggtgcaggcagcgtttccgacgcgaccacggtggtgacctatggtggtgcagccgccaatgtgaccaacacaggcaccatcgacggacgcgtcggcctgggtgcttctggcggtaacacgttcctcaatgcgggggcggtcagtggcagcgttcacctgggtgattcaaccggcggcaacaccttcaccgcagtgtcgggttccagcgttgtgagcggcggcggcagcgctcttgccggcgtgattaccggtgtcaccggggtaaaggttgcggctgcgggatcggtcgacgccggtaccggcagtggtgcggccaacaacacgctggtgttgcagaacgtcgtcagcggtccggggtccggcatcggcggagcggtgaccacgctgggctggaaccagtacctcaacttccagaagctcaccgtcaacagcggcacctggaacctgcagggtgcgtgggcgggtgcgaccacgctcaatgatggcctggtcaatttcaacaatgccggttccttcggcacagggctgttcaccgccaacggcggtgccatcgcctccgccacggccggtctgaacctggccaaccctttcagccttggtggcaatctgtccctggcagggaccaatgcgttcagcctggggggcttgctgtccggtactggcgggctgacggtcaacaacaccggcatcgttactctcggcggcgcaaacctgttctccggcggcgtcaacctcaatgccggcggcctggtgctgggcaatgccggtgcactgggcatcggcaacctgaccgtcggtggcagcgcttcgctggatacgacggcgggcttcaacctgggcaacaatctggtggtcaatggcgggggctcgctgaacctgctgggcagcaatgcgctgacattgagtggctcgatttctggtgccggcaacgtgaccaagaacggcgcgggcacgctgaccttgaatggcgccaattcgctgaccggcgccttcaatctggccggcggcgcattggcgctgggcgcgggtggcagcctgtcgcccaccggtgcgatcacgctgggcgttggtaccagcctcgatctttcagcggcgaccaaccagaccatcggctcgctggccggtctcggcggttcggtcaatctcggcagccacacgctgaccctgggtgggctgggcaataccagctacagcggcacgttcgccgcaggcaccggtggcctgatcaagctcggtaccggcgtgcagaccctgtccggcgtcaacaacctcagcggcggtgttgcgctcaacgccggcggcttgttgctgggcaatgcggccgcgttgggcagcggcacgctgtccgtcggcggcaatgccacgctggatggcacgaccgggttggcgttgaccaatgccgtcaacctcggtgccggggccagcctgaatctgctgggcaaccaggcgctcacattcaacggcgtgatcggtggcgctggtggcctgatcaagaatggcgcggcaaccctgacgctcaacggcgccaatacgttcggcggcggtctggcgctcaatgccggcagcctggtgctgggcaacggcggtgcactgggaaccggggcgctgaacgtcggcggtgcggtatcgctcgacgccagcgccggcctcaccgtgggcaatggcatcacgcttggcgccggtggttcgctcgatgtgctgggctcgaatgcgctgacgctgggcggtgtcatcggcgggagcggcagcctggtcaagaacggcgcctccacgctgacgctgggcggcgcgaacacgttcaccggtgggctggcggtgaatgccggaacggtgtcattggccagtggtggcagcctggcggcgaccggcgcggtcagcctggccggcgctggcagcgcactggatatctcgctgggtggcaaccagaccatcggtgcgttgtccggcgtggctggcagcaccctgtcgctgggcagcagcacgctgaccttcggtgatgccaccaaccagaccttcgccggcgtgatcggcggcaccggtggcctgatcaagcagggcaccggcgtgcagacgctgaccagcgccagcaccttcagcggtggggtgaatcttgccgccggtggcctggtgctgggcaacgccggtgcgctgggaagcggtgcgctgaccgtcagtggcaacggttcgctggacgccactgctgcactgaacctgggcaatgcgatcaacctcggcgcggcgttgaccctgccgggcagccagaacctggccctggccggcaacgtcaccggcaccggcagcctggtcaagaatggcgcgtcgacactgaccttgaacggtaccaacaccttcagcggtggactgagcgcaaacgccggcagtctgctgctgggcaacagtggcgcactcggtacgggagtattgggcattggcggcagcgtctcgctcgatggcggcgccccgctgaacctggccaacaatgtgtccctgggcgcgggtgccgcgctgtcgctgccgggctcgcaggcgatcacgctgggtggcgtggtgtccggtgccggcaggctggtcaagaatggtgccaccacgttgaccctcaacggcgccaacagcttcggtggtgggctgaccgtcaacggcggcggcgtgttcctggggaacgccggcgcactgggcaccggtgcactgtcggtgggcgccaatgccacgctggacagttcagtagcgctgaacctcgccaacgacctcaaccttggggcgggcgcggcgctggatctgctgggcagccagaacgtgtcgctgggcggtctcatcagtggtactggcagcctggtcaagaacggtacggcgacgctggcgttgaacggcgtcaatacgttcagcgggggcgtcggcctcaacgcgggcctgctgcagctgggcaatgcgcaggcgctgggtaccggccagctggacgtgggcggcaacgcttcgctggaggccacaacggcgctggcgctgggcaacaccatcggtctcgctgccggtgccaacctttccgtgctgggcaacaatgacctgacgctggccggtccggtattcggtgccggtgggctgatcaaggacggcacggcgcggttgacgttgtcgggcgccaatacctacaacggaggcaccaccatcaacgccggcacgctggcgctgggcgcaggcggcagtctcgccgcagccggtgcggtgaatcttgccgttgcgggcgcgacactggacatctccgcagccggtgcggcacagaccatcggcgcgttgaatggcgtggcgggcagccagctggcgctgggcgcgcagtcgctgacctttggcggtgccagcaatggcagctttgccggtgtgatcggtggaaccggtggcctggtcaagaccggcacgggcgtgcagacgctgtccggtgcaaacacgttcagtggtggccttgcgctcaacgcgggcgggttggtactgggcgatgcaggtgcgcttggtaccggtgcgctgggtattggcggcaccaccacgctggacagcacggtggcattgaatctggccaacgcggtgaacttcggtgccggcacccagctcaccctgggcggaaccagtgacgttgcattcggaggcgtgctgagcggcaacggcagcctggtcaagaatggtgcgggcctgctgaccctcaacaacaccaacaccttcggtggcggcctgaccttgaacggtggtggcctggtggtcggcgcgaatggtgcgctcggtaccggtgcgctggcggtcaatgccagcaccacgctggatgcaggcactgcagtgacgctcggcaatgcggtcacgctgggctcgggcgtcgcactcacgctgcccggcagcaatgcgctgacgctgtcgggcgtggtaggcggcaatggcagcctgatcaagaatggcggcaccacgttgacgctgtccggtgccaacacctacaccggcggtaccaccatcaacgccggcacgctggcgttgggcacgggtggcagtctcgccgcagtcggtgatgtcacgttgggcgcaggcgcaggcttcgatatctccggtgccggcggcaaccagaccatcggcgcgctcaacggcgcgggcggcagcacgctgacgctgggcggcaattcgttgaccttcggtaccgccggcaacgccgcgttcgatggcgtgatcagcggcggtggtggcctggtcaaggtgggcgcgggcgtacagaccttgtccggcgccaataccttcggtggcggcgtgacgctcaatgcaggcggactggtgctcggcaatgacgcagcgctgggcacgggcgcattgaccgtcggtggtgctgccacgctggataccaccggcctggcaacgctggccaacaacattgcgctcaatgccgggctgaccgtaatcgggaccaatgcactgacgctcaacggcgtcctttccggtaccggcagcctcaccaagaatggcagcgcgacgctgacgttgaatggcgccaacacctacaccggtggcaccaacatcaacgccggcacgctggcgctgggggccggtgccagcctggccgcgagcggtaccgtcaatcttgccaccggcgccacgctggacctgtcggccggcagtggcacgcagcagttcggcacgctggtcggcaacggtacggtgaacctcggtgccaactcgatcgaagtgggcggcgccaccgatggcaccttcagtggctcgatcgcaggcaccggtggcctgaccaaggtcggtgccggcatcgagacgctgaccggtgccaacacctacaccggcggcacgttcatcaacgccggtaccctggcgatcggccccggcggcagtctggccgcgaccggtgcggtgaggctcactgcggcaggcacgggcttcgatatctcgactgccggcgccaaccagaccatcggggcgttgaacggcgtggcgggttcgacggtgagcctgggggcgcagacgctgaccctgggcggcgttggcaacagcatcttcgatggcgcgatttccggcaccggtggcctggtcaagaatggcgccggcatcctcacgctgggcggtgccaatctgttcagtggtggcgttgcactcaacggcggtggcttggtggtcggcaacaatgctgcgctcggcagcggtgcgttgacggtcggaagcaacgcaacactggatgcatcgaccgctgccagcctggccaacaacatcagcctggcagcgggtgccaacctcgacctgctcggcagccaggcgctggcgctgggcggtgtgatctcgggtacaggtgggttgatcaaggacggtgcggccacggtaaccctgagcggtgccaacacctacaccggtggtaccaccatcaacagcggcacgctggcgatcggtgccggtggcagcctcgccgcgaccggcgcggtgaatctggccggtgctggcacgctcgatatctccgcgggcaaccagaccatcggttcgctggccggcgtggccggcagcacggtggcgctgggcggcagcacgctgaccctgggcggcaccgtggacagcaccttcaacggtgcgatcagcggcaatggcgggctgatcaagaacggcgcgggcgtgcagacgctcaatggcggcagtaccttcagcggcggcgtggcgctcaacgccggtggcctggtggtcggcaacaatgctgcgttgggcaccggtgcggtgacggtcggaggcgctgcgacgctcgattcgaacacggcggtcaccctcgccaacaacttcaccctcaacaacgcgttgaccgtcctcggcagcaacaacctcaccctcaacggcatcctcagtggtaccggctcactgaccaaggagggtgccgcgacgctgaccttgaatggtgccaacacctataccggcggtactttcatcaacgccggcactctggcactgggtgctggcgccagcctggcctcctcaggcatcgtcaacctggcctcgggtgcgaccttcgatctgtcggcgggcagcggcacgcagcagttcggtaccctgatcggcaacggtacggtgaatctgggcgccaacacgctgacgatcggagacgccaccaatggcacgttcagtggttcggtggccggctccggtggcctgatcaaggaaggttcgggtacccagacgttgaccggcaccaacaccttcaccggtggaaccaccatcaacgccggtacgctggcgatcggcgccggtggcagcctcgcggcgactggtgcggtgaacctggccaatgccggtaccgcctttgacatcagcgcgggtggtgcgcaggcgatcggttcgctggcaggcgtggcaggttcgtccgtggcgctgggcggcagcacgctgaccctcaatggcgtgggcaataccaccttcgccggcaccatcggaggggccggtggcttggtaaagaacggcgcaggcatccagggcttgactggcgtcaacgtcttcacgggcggcgtgaccctcaatgccggtggcctgctgctgggcaacggcggttcgctgggcatcggcgcgctgaccgtaggcggcaacgccagcctggatggcaccagtgcgctgactctggccaacaccgtgcagctggccagcggcacgctgactctggtcggcagcaacgcgctgaccttgaacggaccgatcagcggtgccggtggcctgctgaaggatggcgcggcgacggtcaccctgggcggtgccagcagctatgccggcaccaccaccatcaacagcggcacgctggcggtagcagccggcggcagcctgtccggtgccagcacggtcaacctggccggtgctggcacactggatatcagcgccggtggcaaccagagcatcggcggcctggccggtgtggccggcagcacggtggcgctgggaggcgcaacgctgactaccggcggcaacaacgccagcaccgtgttcgctggcgtcctcagtggcaccggcggcctggtgcagggaggtaccggtacgctgaccctgagcggcgacaacacctataccggcggtaccaccatcaacggtggcagcaccctgcagatcggcaacggtggcagcaccggttcggtgctgggcgacatcaccaacaatggcagcctggtctacaacctcggcaccacggcaaccgtgggtgcggtggtcagtggcaatggcggtctgacccaggccggcagcggcacgctggtgctgaccggcaacaacacctacaccggagggaccaccatcaatgccggcggcgcgctgcagatcggcaacggtggtgcgaccggtgcgatcgtcggcgacatcaccaacaacggcgcgctggtgtccaacgtggccggcaacaccacgctcggtggcaccatcagcggcagtggcggcctgacccaggccggcagcggtacgctggtgctgaccggcaacaacacctataccggcggcaccaccgtcaatgccggtggcaccctgcaggtgggcaatggcggtgcgaccggtgcgatcaccggcaacgttgccaacaacggcagcctggtattcaacgtgggcggcaacaccacggtcggtggcgcgatcagcggcagcggtggcctgacccaggccggcagcggcgtgctgaccctggtcggcaacaacacctataccggtggcaccacgatcaataccggcggtacgctgcaggtcggcaacggcggggcaaccggcgccatcgctggagacatcaccaacaatggcgcgttgatctccaacgtggccggcaacacgcagctgggcggcaccatcagtggtacgggtggcctgacccaggcgggcagtgggtcgctggtgctgaccggcaccaacacctacaccgggggtaccaccatcaacgccggcggcacgctgcagctgggcaatggcggcgcgaccggctcgatcattggcgatgtcaccaacaacggcacgctgctgtccaacgtggccggcaacaccacgctgggtggcaccatcagtggcagcggcggcctgacccaggccggcagcggcactctgaccgtgaccggcaacaacacctacaccgggccgaccacgatcaatgcaggcggcacgctgcaggtcggcaacggcggtgcgaccggcgcgatcggtggcaacgtcaccaacaacggcaacctggtgttcaacgtggccggcaataccacggtcggtggcgccatcagcggcagcggtggcctgacccaggccggcagcggcacgttgatcctgggcggcaacaacacctataccggtggcaccaccatcaataccggcggcacgttgcaggtcggcaatggcggcgccagcggtgcgatcgccggcaacgtcagcaacaacggcagcctggtgttcaacgtgggcggcaacaccaccgtcggaggcaccatcagcggcaatggtggcctgacccaggccggcaccggaacggtcaccctgaccggcaacaacacctacaccggcggcaccaccatcaatgccggcggcaccgtgcaggtcggcaatggcggcgccagcggctcgatcaccggcaatatcaccaacaacggtggcctggtcatcaacaccggcggcaccaccacgctgggcggcaccatcagcggtggtggcagcatcgtgcaggcaggcccgggcggcctgaacctgggcggcaacagcggcggcttcagcggcaccggccaggtcactggcggtggcctgaatgtcaccggcaacatcggtggccagtggaccatcggcagcggtaccacgctgtccggtaccgggaccatcggtggcacgggtggcggcgtgacggtgtccagcggcggcgtgctgtcgccgggcaatggcccgggcaacggcagtggtgcgggcaatggcaccggcacggtcacggtgggcggcaacctgacgttgtcgccgggcagcacgctgggcgtcgacctgggcgccaccggcagcgatacggtacaggtgggcggcagcgccaacgtgggtggcagcatcgtcaaggtgaataccatctcgccgaacaccagctaccagcagggccagcagtacaccgtgatcaacgcgggtggtggcgtcagcgggcagttcgcttcggcgacctcgccgtcggccttcctgaccatcaccccggtctataccgccaacacggccaacctgcagatcgacgtagcgcagaccgcggcattcaccacggcggcgaagacgcgcaaccagtacaacaccgctgcagcgctggacagcctgccgcagagtggtccggcactgggcctgtacaacacgctgctgatgtatgacgcgggtaccgcgcgtgcggcgttcgaccagttgtccggcgaggtacatgcggccagccgtgcggtgctgctgtacgacaactacctggaagagggcatccgccagcgtctcggcagcgaactgccgaccgtgcgtggcgagcgtgcctcggcctggctggccggcagcggcaaggtgttccgccaggacggtgacggcaacggcgatgacatccgctccaaccgcaatgcactgatggcgggcgtggactggcagctgggcgaacacgtggtgctgggtgcggccgcaggcaacgagcggctggatacgcgcctgtacgatcgcagctcgcgggcccgcctgcgcggcaacacgttcggcctgtatgcgcagggccagtggaacaacggctttgcggtcggtggcagcgtatcgcgcggtgactaccgcacgcgtaccacgcgtgaggtgccgctgctgggccagaccctgtacagccgccaggactcggatgtgaccatcgcgcaggtggagggcagctggacctggacccatggcaggacccaactgcagccgtatgtgcagttcaccaggcactgggtcgacagcgatcgtgcggtggagcagggcggcacggctgcgctggtgctggaaggcggcaaggacacgctcaatgtcagcaccgtgggcgtgcgcggccgttgggatgtgggcagcggcgagcgcttcccggcgcagctgacggttggcctgggctggcagcatgcatcgggtgataccgatgtggccagccgcaaccgcttcgcggtgggcggcaatgccttcgacgtctacagcgcggtgatggcacgcaatgcgctggtcagtcaggtgggcgtggcggtgggcctcggccgcaacagccagctgtcgatgttcgtgcagggccagcacggcgatggccgccgcgacgtgggcgggcagatcaacctgcgcgtgggcttctga

SEQ ID NO: 498563 - DNA, 300 bp, Stenotrophomonas maltophilia
atgaccgatatcaaccgactgtgccggatggcgtgggttcctttcgcgttgctggcgctgatggcctgcgcacctggcagtgacccggcgaagacggtcgagcgcgatgcgggcaccggggccgttccggcgcgcccgatcgccggagtcgcgcagccggcatcgctggcggagggtggggccgccagcgaggctgtggacctgcgtcgcaccgatgatggtggcgtggacatccgcaaggtggatgcggctgggcagggcgctgacgcatctgcgccccctgccgcggcgaaacactga

SEQ ID NO: 498564 - DNA, 738 bp, Stenotrophomonas maltophilia
atgaacaccgttgcgcgatcgcgctgtctgctgctggcgatgggcctggggcttgccgtgcaggcgtccgccaacgcccccgtgattgcggtctaccgcggcgaggccggttgcccagggtgttcggaggccgtcgaacaggccatccatcgttcgcgtccggactatcacgtggtattcgtcggcccgggcgaggccgtcgatgtcgattcgctggccacgtcgcgctaccgggcctatgtgcagccggggggcgggcaggacatcgacgccgcgatggcggcggtgggcgaagagggggtggcagtcatccgtcgtttcgtcgatgcaggcggaatctacatcggcctatgcatgggggcctacctggccggtgcatcgcatctgggcctgctggcgcaggacctggacgccgaggccggcaggccgggattcccggtacaggatgaagacgatgccgtgattcccgtcgtctgggacgggcgtcgccagacggtgtacttccaggacggtccctacctgcccaaggcgccacgcgaccaagggttcaaggtgatttcccgctacaccaatggcgacattgcggctgcgtcgtatcgccacgggaagggcagggtggtgctgtcgggaccccatccggaagcgccgacgcagtggttcaagatggcggaaatcccgctttcgcagatgccgtcggccgatctgttcaagtcactgctggatgaggatcggcgctga

SEQ ID NO: 498565 - DNA, 510 bp, Stenotrophomonas maltophilia
atgcttccctcgcacggctatcaacgtttccgcaccgccccgatcccctctggctgggtccagaccggtgagcgctgggcgctctggtacaacggccgcgagacggccagcgtcacgcctgatgacggtcccggagtcaggctatggatggaaggccagaagatgtggcaggtgaaggaagtgcgcgccgccagcgtccgacaggcgaagcgctacgctgagcgctggtgcgcagcacgtctgtatcccgagctgcctctgcgtgaggccgtcgcccggctgaccgacagcacgccgatccagttgcccccgccactgcccggtctgccgccgacccgcgagcagcagcaacaggctcgacgcctggccgaggccggagcgaaggaggtcgaacggatcaaggcagcactcgaatcgcgcaagccgccggcagagacgaagccccgagcgagggacatccgcagcaaggcatgggtgagggcagggcttcgcgatctacgcggctggtga

SEQ ID NO: 498566 - DNA, 933 bp, Stenotrophomonas maltophilia
atgtgctattccgcccagatcaccgccgcctaccagaagctggtcaggatgaccggggccacgctatcgcttcaggagttcgccgcgctctacgctcatgacccgggcaagaagcggccgaagaccccgaaagccatggatgacgccttccgggccggcgcgagcccggcggagctggtggtgtgggccgagatcgagcaatggaacagggccgaggccaccctcctagagcaggagctgttcgccaaccgtaagcggctggccgatgctgagcgagcgctgcagttgaaggagacaaagaaggcccgggaggatgtgcggattgccggcaacaaaatcgaacgggccaaggcgcgactggcggacctgcagcgcgttgagccgaaggaccgggacggccgcatcttccccggcgtctatgccccggtgatcgtcgccgagggcgggaggcttgtcataaagccgatgcgctaccagtgccggctggcggggaagccggccaattacgaccagcgctaccccggcacctacaacgcccgtcgcgacagcctggagaaattctgggcgccggcgttcggacacagccacggcgtgatggtggtcgacaccttctacgagaacgtcgagggcccggacggcaagaaccaggtggtgcagttcaccccgcgcacgggcgagccgatgctggtggcgtgcctttggtcgcactggaaggatcccgccggcaaggagcctgatctgctgtcgttcgccgccatcaccgacgatccggagccggaggtggccgccgccggccacgaccggaccatcatcaacatcaagcccgagcacgtggaggcctggctcaaccctgacccggaagacctagccgcgctgtaccggatctttgacgacaagcggcacccgttctatgagcatcggttggcggcgtag

SEQ ID NO: 498567 - DNA, 621 bp, Stenotrophomonas maltophilia
atgcggccccatggacctgcccgaactgcagagtacaaaacaccacaggggaccgtagtgaaaggaccaaaaggcggattcgcgagagagattgccatagcaggcgctggcggattggtgacgacagcttgcactactgccatcgtctggctcagccctcgcgcgcaggagttcctgacacgcccctccctatttctgatctgggaagtgttcgggtccatgatagtaatgctgatcctcgggaccattctcggcctcttgattggctatcacagggggcaagtgagcgtagagcgagatgcaccaaagtcagcccctccagccaaggcagcagcgacggtccccacatcgtttgagccgacaccgctacaggtactctgcatccgggcgctgcgcattgccgacaacaaataccaatcggtggcaatgatctcagccttgttggccaggatgggacacgccacacccctctcggacattgagcagtctctggagggcctgatcgatcaatcctgggtatcgaacatcgccaacccgtcgaagggtgtatgggagtacagattgattggcgaaggaactgcttacgcacgtgatagaggatttcctgtctctggcatgtga

SEQ ID NO: 498568 - DNA, 792 bp, Stenotrophomonas maltophilia
atgcccaagcccatcatttcctggccgggcggcaagcgccgcctgctgaagcacctgtatccccacttcccgatccacgattgctacgtcgaggcgtttgctggtggcgccgcctcactgctgatgcggccgtatccagcccagatggaagtgctcaacgacatcaacggtgagctggtctccctgtaccgctgcgtgcggcatcacctggacgagttcgtacgcatgttccgctgggccttggtatcgcggcagatgttcgagtgggcgcagatggagcggccggagacgttgaccgacattcagcgtgctgcgcgcttctactacctgcagaagctggcctttggagggaaggtgcagggtcaatcgttcggtgtggtcacggctggaggtccgcggctgaacctcctgcggatcgaggaagagctgagcgcggtgcatctgcgtctgtcgaacaccgtgatcgagtgcctcccgtggcaggagtgcgtgcggcgctacgatcggcaggggacgctgttctacctcgatcctccttactgggaaaccgagggttatggcgtcgagtttcccttcgcggaatacgaagccatggccgaactgatgcgcacctcggctgggcgatttgtggtctccatcaatgatcacccgcagatccgagaggtgttcgccgggttcgacctggtgccgctgcagctggattacacgattggtggtgggcaggggaggggaaggaagttcggggagctgatcatcaagagctgggacgacagccaggcccgtttgctatag

SEQ ID NO: 498569 - DNA, 234 bp, Stenotrophomonas maltophilia
atgcggactgacctttgggatcaattcggcgaactggtcagcagcagccctcgactgctggcgaccgtcaccgcgcacaacagtgatggcaccagcacgctgacgacgtatgacggtgtacagatgcgggcattcggccagctgcagcaggccatcccctacaacgtctgggttcgtggtgggcgcttggtcgaggcggctcccaaccttccggtgatggaagtcaccatctag

SEQ ID NO: 498570 - DNA, 1026 bp, Stenotrophomonas maltophilia
gtgatcaataccgtgtcattcgtacggcttcctgaccgtatgccgatcgaagtaacaagaatcaccctggaatcgggccggagcgcatggggctggacgttcgactttgagcttgccgatccggcacagcttgatctcctgaaacccacggcagcgggcccgcgccagttcgaggttgtgcttaacgggcacgcttggaccgggatcgtggagagctatcagaagcagcgcgagttcgcggatggggcggtgcgtctgagtggtcgctcgcgaaccgcgcttctcgctgcgccctacgcgccagctcgggtgaaggtcaccggtgacgataggagtgtgtcgcaactggtggcggaggagcttgccgatacgggcttcacaagccagtactggactgtcgactggatcgttcccgccggtgcttggttctacgacgcgaacacgcctctggatgccatcagtggcttggccggggcaagtggcgcggtggtgcagtccgacccggcccagccgatgttgcgagtccgggccagctatccggttagcccgtggctttggcgggaatcacctcctgaccacgttgtgcaggaggacatcgtccttaccgagagcctccagatgcgcagtgcgccgctgtacgatgcggtggtggtcacaggtgagctgccggggaagggcgtcacctgcaaagtgcgcaaggacggtgaggcaggtcagctgttcgcacagcaggtcagcagcccactgatcaatgttgctgctgccggcgccgagcgcggtcggaacatcctcagtgatcgcggtgagcaagccgctgtcgacctcaccatgccgctgtttcccaagccgcttagaccaggtgaggtcggtcctatcatgccgttggacttggtggaggtcgttgacgctgcggggagatggcatgggcagtgcgagtcgctgcgcgttgatgttgtgatcgatcagcaggcagtggtgatcgagcagaccgtaacccttgaaaggcactacagcgatgcggactga

SEQ ID NO: 498571 - DNA, 177 bp, Stenotrophomonas maltophilia
atggtcttcgagcgcggcggtggggtctgtgtggcgtccactatgagccgcgccgacggaacgtggagagtcgatcgtctccatccggcatttcgtttcacggtcatcggcttcgatgacctcggtcggcagaatgccgcaatccaggactggattgcgccggcggcgcgcgagtag

SEQ ID NO: 498572 - DNA, 996 bp, Stenotrophomonas maltophilia
atgagtctcgttccaactgtttatcgaagcaccgatgtgggtgcccctctgctttccggtgtgcccggcgcaatgcttgcgctgctggatgccatcttggtcgatggctacggcaccggcgccggacgaaaggatgggctcggctggacaaaggagttcggggccgtcaacgtgcgtgtctaccgcaactcgcctgtctcgggcacgggctactacttgagggtggatgacacggctgcaaagtcatgcttgctccgtgggtactcgtccatgagcgacgttaatactggcgaggatgccacgccttcgctggcgctcaaggcaagcggttcgatgtgggagaaggcgaactctgccagtagtacgatccgtcattggatcgcgatcggcactgagcggttcttctatctctttgtggatacggctggctactacggaacccagggcatggctggtgcgcacggccactacgccggcgatatcgcgtcgatgaaacctggcgacaggcaccactttgtcgtgtcgtacaagggcggcgactccgagggaagcagtgcggttggatacgggtttaaggctcgagcctggaatgacttcggcaatgcggatagccagacggcggcattcattggtcgctctatgtcgggcatgccagggtcggttcgttcgttcgtatctgctgcagccataaccgcaaacgttgcgctgggtaaccagtcgtcttatccgtcttatccatacatcgggaacggaggacttctctactcgaccgtggatatcctggagaacaacatgcaaccgcgtggatttctgccgggcatctacgctcctatccaccgcaggccattcccagagttgacggtggtaaccgacgtcgatggattgccggtcggcactgagctcctggcaaagtgcgtaacggtggataacatgaatggattcaatgaaacatataccggccaaattctgatcgacatcacgaacgcatgggggtga

SEQ ID NO: 498573 - DNA, 759 bp, Stenotrophomonas maltophilia
gtgtctttcggacgcacgcgaatcgccggtgtcgaggtcagggactccaagggggctccggtcgacagtgcttggtatgcagtggatcccgcgttgggtcggctgaccttcagcgaccctctgaatttgtccgcctacaccctgcccatcgtgatcagcgagcgtgtcgaggatcgccggctggtagtccagcctcagatcacgggggaaatcgagatcaacagtgggctgacgcatgatttcccggccggggaggccatgatcagcgcggccctacgtctgggcgaggctaacggatcgctcgacctgcaggcacgcacggtaaacctgttcgaccaggcggcatggaccggtgtgtggagcgaccttctcatcggcagcgctgctcccggaactttcaacgacaccgactatccactggttgtcaccaacgccgatgccattaccgagcggtgggccatccgcttcaacagctcaacgacgtttgaggtgatgggggagacggtcggcaccatcacgacaggggcggttacttccgattgcgcgcccatcaatccacgcacaggacgtccctacttcaccattccgcgctcaggttggggctccgggtggtcgaccaacaatgtggttcgcttcaacacggtcggcggcttggcgccgatctggatggtgcggacaacactccctggtacgcctgaaagcgtcgtggattcgactcgcttccaggtcattggcaacgtcgcaggagttcaagcatga

SEQ ID NO: 498574 - DNA, 432 bp, Stenotrophomonas maltophilia
atgttcccgcaaggcgccacggtcgcgcagatcaagaccgctggccgcatcaacggcacccaccaagccatcggctacacgctgaagggtttggcgcgcagcggccaggccatctgccaccgctcgggagtgcgtggcatctggcgcctctccggccacacgcaacatgcgatcgccccactgcgcgcggcacctgcccgagtgcagccgaccagcacgtcagttccgcttacaggcgtcagtgacgcggcaaccacgatccgacaccgggaactcgaccggcagcagcttgccgaggacctggacgctttcctcgcagcgggcgggcacatcgaggtgctggggcacaccccacttcgcccgctcatgtgccgtcgcgccgccaaccacggcagctatgcagagcgcatggcagcacatgacattgactga

SEQ ID NO: 498575 - DNA, 393 bp, Stenotrophomonas maltophilia
atgagcagcgaatcgcacgcagctaccgtcactgagaccggcaagcccggtagcacctactccgatggcccagcatggcatgccttcggcctcagtcgcgccgcctatcacgtggtgccgcgacgcaccctgcagtcgatgccggtcgaatggcaggcgcgctttgtcgcgctgatggaggaggcacgcgaagcgctacccgatgaagcattccctgagtaccaggtgattcgcatcgaaggcggcaagttcgcatcggaccccaaccgccgctatcgccacgccgcgcccttcccccttcgccccgctggcgccgtgcaggcgtcccaggtagcgccgctcgctggcgcgttcgtcaacaccgacacccaattcgagcaggcccgccgatga

SEQ ID NO: 498576 - DNA, 723 bp, Stenotrophomonas maltophilia
atgaacgaaaaactcaacactcttcccacgaactgccccgttctgcgcgacgcattcgaaacgatcagcgcgatcgctgtcgaggctgtgtggctcccaaaccaggcgaaggccgtcaccctcgcccaggcccagaccgcgcagcgtgatctgcatcaccgcctccagcgcttgcaggatctgcgcgtgttcgaagcggccgtggccgcctatgtctcgactctgcgcagcagcatgcaagacggcgacacgccgctctgcgataccacccgggcccggcttgcgcaggcgaccgaactgcttgagctggtcaggagtcagacacgcaccgtagtcgatccggcagacccgtggcaaggtctgtaccacccaagtcgcctcccagcgcgcaatgccgacggcgagatcctgtgccatccggacgtgccggcgtgggccgacggtcgcgaggtatcgctgcgaccggtgttccttgcgcagggcttcgacctggtcgtggttgagggcgagttctctgaggaaggcatcggatcgggcgtctacagcgccacgcaggagctgcacgattggaatccggaggcacctggcgaggattggcggcttgcgtggctgggagaaaccgaggacggccttgctgcatggtttgtgcggccgctggcaatcgccgcgttagcggcgagctccacagggaaagctgccaggtcagcgaggagtcagcgatga

SEQ ID NO: 498577 - DNA, 933 bp, Stenotrophomonas maltophilia
atgaggctctgtcagtttcaccgggactgcacggtatcgaagctcactaaccagcatcaccgaggtccaggtcatctcgggaccaagatgcaatcacggttcaacaccgtccaagctcaggtccaacttgatgccggccttttcgctggacctgcggcactcctcagaaaccgctccaaggtcctgctctatcgccttaagccggacgatcatcaggttgaagtggagtggccggtcttctattgcactgtttacgtagtcgaactcaaaagaattcaaggttcgcccaaatcctatggccctcaccagcctgcttccaagctgcggccccaacaggtgcagccgatcttgaaaactctcacagacaggaaaaaggaaaacttgcatgccctcaaaagcccatcgctgcttgtccacatctacggcgaagccctcccacccccaagcctccagtgctttgacggcacggcccgctttgctctcggcgagagaaacctccccggtgatcgaggccaagatgagttgacgctcattgctctcagcaaccgccctggctatcgcttccgcctcagcaagagccagcgccgccgcagtggcacggtttgccgccttgcccagccgaagagtcatggcacccaagaaaacggtggctgcaattccgagagccgccacaccaacggcccacgcgttccattcaggcttgcaagtctttccaaggaaccagcacgagctgagtgcgtccaaaaactccatccccccctccctattaagaaaggagccgacgatgccactgaatcgatatctagacaagggttaactcaacgacgcccgccctaccatgagagctcgacaccgagcgattgccacactgcgctcctatcgcttctctaccgcacaggactaccggcgctgtcaggatgggcggtcgaatga

SEQ ID NO: 498578 - DNA, 1182 bp, Stenotrophomonas maltophilia
atgccagtaggtcgtcctcgaaagatcccaaccaatctgccatcacacatcgattacagcaaggttccgaagggcatctactgggataaatccggtcgtggccggtggtacgtactcgaccgccatcccgatggtaagggctttaaagcaaaaactgtggcgcaagctggcgcgcgtatgtcagaccttcatatgattgccgagcaacgtgccggcagctcgactcgcggaagcgtcacttacttgatcgacctctttgaggctagcctcaccttcagccttcttgccagctcaactcaacgacactaccgagactacgcctccgcaatcaaggtctatccattgaagaacggagcgaagctgggtgaaatgatgatcgacaagctcactcctggcgcaattcgccgactcgtagacgttatcgcccaagggcgcgcggcatcggcaccgggagagctgcccgtgccgggctatccgacgaaggccaaccactggctgcgttaccttcgccgcgtctttgggtgggggcgagagcacgaccatatccagaccaatccagcagcaggcgtgaagcaggtcaaagagaagcgggaacatcggatgcccgaccttgaagtgtttcggcgcgtccaagcgttcgcagaacactgcggaaatttagggccgcgtgaaaagggagcactgcccagctacctctgggcagccatggagttggcataccaagcgcgtctgcgcgggattgaggtactcacccttaccgatgctcatgatctcggagccgaactgatgaccaataggcgcaaaggtagccgagacaatcttgtccgaaagggcgagcctcttgcccgtgcggtcaactcattacagcagcggcgccaacagatctggctacgacacggccggccagttcctccactagcggccgaccgatatctattcgtcggggaagatggtgaacccctcacgcgatcgggcttccacactgcgtggcaacgtatgatgcgcaatgcgatcagtgagcgactaataagccaggagcagcggttcgcactacacggactgaagcaccgcggcgtcaccgacactaagggtgacaagaaactggcaagcgggcacagaactgacgcgatgttgagcttgtacgaccatagtattcccaaggtcgatccgagtggcgtttag

SEQ ID NO: 498579 - DNA, 2631 bp, Stenotrophomonas maltophilia
atgttcttgggatttaaacaggaagatctgcacaacgaatcagacgtcgaacagaagttcattgtgcgccttctaacagcctcacctcccgaaggacttggctactcgctatcggactttcgatcaaaggccgacctaaggacgcttgtgattgacaaggggagcagcaagaaacgctattaccccgattacgcgatcatcctccatggcctacccctcatgataatcgaggccaaggccccgggagaggacctggacgaggcattgcgcgaagcaatcctgtacgcacatcagattaacctcctttacccagcctccaatccgtgcagcagagtgtttgcaactgacggcaggaaaattgttgcctcgcgctgggatggggggcagagaatagatgtagatcttgaaaacatgagcgcggtggactgtgacttttcaaagttcaccgattttgcgagcaaggcaagcctgcttgtcgacgcagaatcgatgctaaaggcgatgcgaaagcacgcgaattttgttacgccaatccaactcatgggaggacgggtagtagctgaatcaaccgttggagaaaactcttttggggccaacgtgtctattgcttacaaatacctgtttaatccggagacgcgcgaagatcgctcaagacttgtcgagaatgcctacatcacatcccaaaaaagactatctcatgtagctcccattgacaggctgatccgaagcacactgccctcattctctgttgatgcccggcccatagaagacaccagcaatccctccactctcctttccgaactcgaagggcggtccagagctggagagctttgtttgttaattggaagcgttggctcaggaaagtcgaccttcacagactatcttcgcacaaagggcatcagcccgagtacgtccaaaggtactgactgggtccatgccaacctcaacctagccccgcttaaccgagaccggatctacgattggatcgtcgacacgctatcggaggagctgagaaaatcccacgattcaatcgacatggatgacctagcattccagcgaaaaatatatggcttgcaattatcgaaagtcgagaaaggtcgcgccagtctttttgagccgggatcgctggattacaacagacttatttcagacgaaatcgcgaaactcgaagcggatagacagctcacattgaagctgaccatcgatcatctctataggacgacaggacggactcttatcgtcgtgctggacaactgcgataagcggagtagagatgatcagttgctgatgttcgaggttgcgacttggctgaagaacacgatgcattgcatggtattcctgcccctaagggacgtcacttatgacgcctacaggaactcccctccgcttgatacggtcatcaaagacctcgtctttcgaattgacccacctcgcctcgaccaagtcatccaagcacgcctggactacgccatacgtgaagccaaagcaaagcctggcaagttctattacacaatggaaaatggcatgcggggtgagtgtgcgcaccatgaagtcgggcaataccttgcgtcacttgtatcctctgtcttccaaaaccatagattcaagcagattgtttcgggacttgccgggcgcgacataaggaagggcatcgagatcgtgctggacctatgcaagagcggccacatccccgaggccgagatactcaaggctagaaccacacacggcctacacaactttccttccaatctgataatgcagattctgttaaaagggaagagaaagtattactcggactctgagactcatctgaagaatgtattccactctgacggcggcgagagtctaccagatccgtttgttcggctagcgatcttgaactggctgcagaggaacagcaatactctcggcccgaacaagattaagggcttccacaaggtcgggacgatgtacagcgaccttcaggccgctggcttcgctgaaggaacgatctcaaccgcactccacgacctactcgaagctggatgctgcacatccgagtccaatgatgctgaaccgtccagagaggatctaatctcgctttcccctgctggcaacattcacctcacgatgctcgatgacgcgatgtacctggccacggtcgctgaatccgtactgttccgggaaaatcaaccagcacttgaaatcaaagagatactcattggcaacggcaatcacaaggctggaacgagaacttcaaacatactgatcgcagagattctcacaaagtacctcgcttcctatttcaaggatttccacatcgctccctctggagtgctcaacgaacatgtcgcaatcgatttattgaacttaggcgcaatagagagcgctatcagtcgccaggcggccgccgatcgccatattgcggtggagcgccaacgagcagagaagtacccacccggaactaaggtcagcgctacgatcgcacttaaacttgggcatgcaatcattgtccaatttgatgaccgactgcaggcattcgttcgcatgagcagggatcaggtagctgatctgctgatcggctccaacatagaaatcactctaggcgagtggaacgccgcacatcagcgctatagtgctagtcattcttga

SEQ ID NO: 498580 - DNA, 2925 bp, Stenotrophomonas maltophilia
atgaccatccgtattcccgcactggggctggcgatccgtcgtgcgcttgcaatcacggcgaccacaaccctggccgttccagcgctcgcgcagcaggcaccggaagccaccacgctggaccgcatcgaaatcaccggctcacgcatccgccaggtcgacctggaaaccgcacagccggtgctgaccgtcagccgcgccgacatcgagcgacagggcttcaactccgttgccgacatcctgcagaacctgaccgcgaccggcagcccggcattgagccgcgccagcccgttgagcgccggcgaagccgccggcggcagctacgtgaacatgcgtggtctcggtgcccagcgcaccctggtgctggtcaacggcaagcggctgggcatgaccacttcgggttttcaggacatctccagcattcctgccgctgcggtggaacgcatggaagtgctcaaggacggtgcctcggccatctacgggtccgacgcgatggccggcgtggtgaacatcatcacccggcgcaaccttcagggtgtaaccgccaacgtctatcacggccaatacagtgaaggcgacggtgcccgtacccagtacgacgtggttgccggctggtccaatgaccgtgcttccatcagcgttgctgccgagcatgtcgaagaaaagggcgtctgggccagggaccgcggcttcagtgcctatacctataccgacggccacgcggatgacggctggaccacggtcggccagtggggtcgcatcaccggcttcaagggccccggctgcagcaacagccggggctgcagctactcgctcgaccgtggcagccagccaggtgggccggacagcttccacctcagcgacaacacaccgttcaccggcgatgtcagcaacagcaacgagcagatgcatctgcagacgccgatcaagcgcgattcgatcttcgtcgatgcgcgcgtggagctgaacgaccaggtccgtttcaacacccagctggcctacaaccggcgcaccaccacgcgccagattgccggctatcccttccagtccggcccagccggcatcaccccgatgtcggccgacagctggttcaacccgttcggcagccatcacggctacgacacgcccagcgatgtgcactggaaccgtcgtacctgggagattcctcgcgtcagcaccagcgatctaaccacctggcaggccgtcgcggcactcgagggcaacttcgaattcggcggtcgcgacttcgactgggaagcgggttaccagtacaaccgcagtgagctgacccaacgtgccaccggcaacctgcacaagcagcgcgtggccgatgccaccggtccttcgatctacaacccggcaaccggcaaggtcgaatgcggaacgccggatgcgccgatcgcaggctgcaaaccctggaacccgctggttccgtatggccaggacgatccctatggcctgaccggcaacacggagctccaggactggctattcccggaagaactcacccgcggccgcaccaccacccgcaacctgttcgccaacctcagcggcagccttgccagcctgcccgccggtgagctgggcttcgccgtgggggccgagagccgccgcgaggacggccgcttcatccccgatgcacttgcgcagaccggtgctaccaccaacctggcggcaggccccaccggtggtggctaccgcgtcgacgaagcctacctggaacttagcgtgccggtgctgcgcgagctcgccggcgcccgcgaactgaccctcagcgcggcgacgcggtactcggactactccaccttcggcggaaccctcaacagcaagttcggcttcacctggaagccgatcgatcagctgctggtccgcggcacctgggcacagggcttccgtgcgccgaccatcgccaacctgtacggcggcggctcggagacgttcaccaccggcttccgcgatccctgcgatacggtccatggcgcagccgcgagcagtgccgaggtccgcgcgcgctgtgctgccgacatcgccaacgccgacacctaccgccagctcggccagggcaatgaacccatcaccggcagcagtgggcagacgcccctgcccttcaccaacggctccaatcccgacctgcagccggaaacttcgaccagccgcactctgggcctggtctggagcccgacgttcgccgaggggcttcacatcgcactggactggtggaagatccgcatcgacaacaccatcgtttccgaccatcccaacgacatcctccgcgactgctacgagctgggtattgccgagcgctgcagcagcttcacccgcgacccggagctgggcatcgtcaacaaactcaacttcggcaaccgcaacagcggcttccgccaggcagaaggctacgacctggagatcggccacaaggtcgaaacccgctggggcaggttgagcgctgactggaagtccacctatgtggtcaacgccgaagagaagaccaccaacgaagccggcgtaccggccatccccagcaatggcattgccaccaacggcggcatcggcttccgcgtgcgctccaacgcgtcgctgggctgggagcatggcaatctcggcctgacctggggcctgcgttacttctccgccgtcaaggaacgctgcctgggtgcggaggattatccgaacgagtgttcccaccccgaccagcgcgcgccgtggttcagcggtacgcgcgactacaaccgtcgtggatcggtcaccttccatgacgtgcaggcgcgctacagcctgccgtgggacgccaccgtttcgatcggcgccaacaacgtctttggccgccagggcccggccatgtacagccagccgagtgccaacttctcctactacggtggcttcgacatcggccgtttcatctacatgaaataccagcagcgcttctga

SEQ ID NO: 498581 - DNA, 1125 bp, Stenotrophomonas maltophilia
atgttctggaccatcaaggtcgtgatcggcgacggcgagcgcggcctggtgtatcgcaaccgtcgtttccagcagatcctgctgccgggcgtgcaccgcctgtcgccgttcggcggccggccgcacgtggacatccacactgcatcgaagggcgcggcctacactggcagcgaccaggacagcctgatcgaagcgctgggcgcacagctggacacgcacttcgtgctggccaacgtcggcgccagcgaggtcggcctgttgctgcgcaacggccgcatcgatgaagtgctgccgccgggcagccgccgtctgtactggcgcggttcggtcgatacccaggtgcaggtaatggcgttgggtgacgagccgcgcattccggccgacgtgcagcagcggctgggtcaattgggcgtgctgccgcgtgtggcggtgatcagcacggtgccgagcgagtcggtcggcctgctgttcatcgatggcacgctgcggcagacgctggacgctggcctgcacgcgttctggaacttcaacggcaacgtgtcggtggagcgtgtggaactgcgtgcacgttcactggacgtgtccggccaggaactgctcagccgcgacaaggtgaccctgcgggtgaacctggccgcgaccgtgcaggtggtcgacccggtgcgtgcgcaccgcacgctcagcaatgccgatgagttcgtctatcggcagctgcagttcggcctgcgccaggcaattgccgcgcgcagcctggacgagctgctgggtgacaaggcggcactggacggcgagatcgctgcgcatgtgcaggcggcgatcgaaggccacggcgtgcgcttgctcggcgtcggcatcaaggacgtgatcctgccgggcgagatgaaggagatcctcaacggcgtggtgctggccgaaaagcaggcccaggccagcgtgatccgtcgccgcgaggaggccaacgccacgcgttcgcagctcaacaccgcaaagctgatcgaggacaacccggtgctgatgcgcttgaaggagctggaggcactggagaaggtcaccgagaagatcgacacgctcaccgtgttcggcggcctggatggcgtgctgaagcagctggtgacgatcaggtag

SEQ ID NO: 498582 - DNA, 903 bp, Stenotrophomonas maltophilia
atgaagaccactctcgatgaaatgcaggccttcctcgcggtgatcgacagcgggtcgatcagtgctgccgccgaacagctggggcagacgccgtcgggcgtgagccgggcgctggggcggctggaagacaagctcggcaccacgctgttgacccgtaccacccgccgcctgcacctgacggcagagggcgaggcctacctgcgccatgcacgggcgatcatcgatgcggtggagtccgccgaggaacagatggccgcccgccgcgagcgcccggccgggcgcctgcgcgtggacgcggcgatgccgttcgtgctgcacgtgatcgcgccgctggtggccgggtaccgcgcgcgctacccggaggtgcagctggagttgaacagctccgagcgctacatcgacctgctggaacggcgcaccgacttggcgatccggatcgggccgctggccgactccaccctgcatgcgcggccgttgggtcgctgccagctgcggctggtggccagtccggcctacttggcggcacacggcgaaccggccagcgtcgccgcgctgggccagcacaccctgctcagcttcaacgaaccggaatcgttgaatcactggccgctgccgggcgatgccgatggcctgctgcgggtgcgtccggatatcgcggtgtccagcggcgaaacactacgccgactggcggtggaaggcgtgggcatcacctgcctgtccgacttcgtgaccgaccgcgaccgcgccgccggcacgttggtgccggtgctggcgacgcagacgctggatgtgtaccagccgatccacgcggtgtattaccgcaacacggcggtgtcggcgcggatcagctcgttcctggattacctgggtgaagcgatggcgcggagcgattacctgcgctga

SEQ ID NO: 498583 - DNA, 1215 bp, Stenotrophomonas maltophilia
atgatccgtggcattcccctcgccctgctggcgctgaccctcggtgccttcgccatcggcaccaccgagttcgtcatcgtcggcctgattcccaccattgccgccgacctgcaggtcagcctgccctcggccggcctgctggtctctctgtatgccctcggcgtggccatcggtgcgccggtgctgaccgcgctcaccggccgcgtaccgcgcaagtcgctgctggtggcgctgatggtgctgttcaccctgggcaacgtcatcgccttcctggcgccgggctacacctcgctgatcgtcgcccgaatcctcaccggcctcgcccacggtgtgttcttctcgatcggttcgatcatcgccaccgcggtggtgccgaaggagaaggccgccagcgcgatcgccatcatgttcaccggcctcaccgtggcgctggtgaccggtgtgccgctgggcaccttcatcggccagcacctgggctggcgcgccaccttcctggcggtggccgcgctgggcgtgatcgccctgctcggcgcgctgctgttcgtgccgcgcagcgtgccgcagagtgcgccggccagcttccgccagcagctggccgtactcgcccaaccccgcctgctgctggtctatgcgatgaccgcgctgggctacggcggcaccttcctggccttcacctatctggcgccgatcctgcaggacgtcactggtttctcggcaaacgcagtcagcctggtgctgctggtgtacggcgtgtcggtggcgatcggcaacctgtggggcgggcgcatggccgaccgcatgggcccggtgcccgcactgaagcgcatcttcgccctgttggccgtcgtgctgttcgtgctcaccttcaccgcctacaacacctggctgatgctgctgacggtactggcactgggtgcggtggcgttcggcaacgtgcccggcctgcaggtgtatgtggtcaagcaggctcagcgctatgcgccgcaggccaccgacgtcgcatcggggctgaacatcgccgccttcaacatcggcatcgcgctgggcgcctcgctcggcggcctggtggtggagaacatcggcctgatgcacacgccgtggctgggcgcgctggtggtggtgggtgcgtatgcattgaccgtgctcagcggccgcctggaccgccgcgacggcatcgatgaccgcgccgatggcatcgccgtggccacgcattga

SEQ ID NO: 498584 - DNA, 1422 bp, Stenotrophomonas maltophilia
atggcctacaatcggcacatgactgattcaccgcgtaatggcgaactggacctggcaatcatcggtggtggtgcggccggggtgctggtggcgatccaggtgttgcgccaggcgaatgcgccgctggcgctggccatcttcgaacccgcctcgcagctggcccagggcatcgcctatgccacgccgtggccggagcacctgctgaacgtgccggcggcgaagatgagtgcgtttgccgaccagcccggcgatttcctcgactacctgatggccgccaatgcctacccgggcgaggcgcgcgaggcgctgggcgagcgctacgtgtgccgctactactttgctgcctacctgcagcagcgcctgcaggaggccgctgcgaccagcccggcacagctgcaggtgatcgcgcagccggtgctgggcctgcagccggatgaccacggctaccagctgacactcggcgatggcagcacgctgcacgccgcgcaggcggtgctggccaccggcaacagcatgcggccgttgccggtggccggtgccgaggcactgcccgccgatgacgtgatcgaggcctgggactacgacggcgtacgcaccctggccggcgagcaggccgtggccatcgtcggctccggcctgagcatggccgacagcgtgttggcattggtcgccgccggccacaccggcccgctgcatgtgatctcgcgccacggcctgctgccgttgccgcatgcgcatggtggcctgcccacgttcgacccggccacgctgctgccgatgaacctgcgccagcgcctgcgcgcgttgcgtgggttcgcacgccaggcacaggccaacggcctgccgtggcagggcgtgatggaccgcatccgtccgcacgggcaggcgctgtggtgcagcctcgacgcggccgaccagcgccgcttcctgcgccatgtggtgcgctactgggacgtgcatcgccaccgcatcgccgaagaggtcgacgcacagctgcaggcgctgatcgaaagcggccaactgcgtgttcaccggtcccgcctgcaacgcgtcggccgcgaaggcgatgccctgcggctgtcgggtcgcgatgccaccggcaatgaacagcagtggacgatcagcggggtgatcaacgctaccggcgtggaaacccgcgccagtgcactgcgcaacccgctgctgcagcagctgcaggccgatggcctggcccgccccggcccgcatgggctgggcctggacagcacggtgccgggcgaccgcctatgtgccgccagtggccagccgcaggcacggctgggcgtgctcggcagcctgcgcatcggcagcctgtgggaaagcctggcggtgcctgaactgcgtcagcaggcgcaggcactggccacccaggtggtcgcaggagccgcgacggcgatgccgtaa

SEQ ID NO: 498585 - DNA, 738 bp, Stenotrophomonas maltophilia
gtgaattcactgcgtttgggcgggcttgtaagcactgcggatgagttcttgtcgcgatatctcttgatttctgtcgtggctattgttgcggcatcgttgaatttttcgatctatctcaccgtcgcccttgcttcaaattacaacgaatacgaactatgtactggaagggtagactgttatgtttttctgggtgaacttttcactccgcagatagagatgctgaaggccggagccgccttggcatctcttattatgctagtttccggtgcatatctggcgtttaggagctatttgtctgcatctcaggttggaatgtttggaaatgcgatatctcacgtgacattctttgagagatttgtagtttctgaaatctccagaagaccaaggctggtgctcaggaagatcgatgtattcgcaatctatgagctgatgtttccgcggagtcatgctaacgagagatttgctgcgaaatcttttaccggagcggttgatcagttgtttgcggtgatcagggaatcttcggcgtactacgactcgaggaagagtctatttaagtttgatgatcatcggcaaagggtaataaaggccatggccttgctgagcattgaaatggatccaagtgcccgaatggattttttggagacagaggacgatgtaattgacttcattgttgttctttgtagggtattttcttcccccgactacgtaattgctcctcctcagaggacatatcgctga

SEQ ID NO: 498586 - DNA, 1182 bp, Stenotrophomonas maltophilia
atgacgctgcgaggatctgctggaccaatcaggtcaaactgcgcactcgctagagctttgggatgtactgagaaattcctctcggacgtgatcgcccgagatacatcgtcaaagtacaggctggtggaggcgccagccaaactggatggaacaaggcgagaagtgtacagcccttcccgtgatgttcgattgattcaaagacgcatcgtaaatagattcttcaaaaatccgcgcgtaataaaatggcctccattcatatatggcggaatacatcgtgatgccttggcgccaggggaaagccgggatcacgtcgcgtgtgctcaaaagcactgcggagcgcgatcgatggttaagttggatattagaagtttctttgacaacgttacgcatgacatggtggtagagacaatggtcatgcagttgggttggtctagagggccggcgattcttcttgctgatctatgtacaagagacggctcacttccccaaggtggaataacttccagctatctcgctttgctttctatatatgatgtggaaagcaaaatattcaatattgttggatacaagaagcttgtctacacgcgctatgtggacgatatcacgatttcgtccaggaactcaggctacgacttttctcccattgtaaagatggttgatcagttccttttgtcaaaaggtctgtcaatcaatgatgcgaagacgtccgtaagtgtatcgggcttggagccgctggtcgtgcatggcctaaatgtggcgaataagcatccagtgcttccaaaggcggaggtcaagcgaatcaaatcagtaagccgtcaaaccataaacgacgcgagtgaggaggggcgaagaactcatgggtttagacggagatactatcgatcaatgggcttgatcaataagctgtcacgcgttcggagtagctcccataaatcttcattgtccaagttgaagtctgtctcacccttgccaaactttgctgactacgatattgccactgtagttgcatatcgtttgagggacttgtatggagcgaagaaagggggaagatggtattggcgcaaatttaatgtacttatggctaggttggatcttatagccgtagagaatccaggttgggcaaaaacccttcgcagatacatgagaaggcactatcgtccggattacaggaggccggagtga

SEQ ID NO: 498587 - DNA, 765 bp, Stenotrophomonas maltophilia
atggcggaagagcagccgactgacagtcggctctaccacgcgcctccggcgttggggccccggcctgcggctggttcccggccctgcctgccgtgggtagagtcgactgtcagtcgactttcgcgcggagcgcggggtttgctgcatatggcggaagagcagccgactgacagtcggctctaccacgcgcctccggcgttggggccccggcctgcggccggttcccggtcctgcctgccgtgggtagagtcgactgtcagtcgactttcgcgcggagcgcggggtttgctgcatgtggcggaagagcagccgactgacagtcggctctaccacgcgccttcggcgctggggccccggcctgcggccggggcccggtcctgcctgctgtgggtagagtcgactgtcagtcgactttcgcgcggagcgcggggtttgctgcatgtggcggaagagcagccgactgacagtcggctctaccacgcgccttcggcgctggggccccgacctgcggccggggcccggtcctgcctgctgtgggtagagtcgactgtcagtcgactttcgcgcggagcgcggggtttgctgcatgtggcggaagagcagccgactgacagtcggctctaccacgcgccttcggcgctggggccccgacctgcggccggggcccggtcctgcctgctgcgcaggcaggaccttcgtcccatgccacgggccgtgggcggtgccatcatcggggcctgccttcccgggaacctgtgctcgtga

SEQ ID NO: 498588 - DNA, 249 bp, Stenotrophomonas maltophilia
atgagagctgtgttgctggtcggactggtcctgttggcgggcccggtactggctgcacctccagcaccgccttcggtgtggctggaacgccagcagaccgctgcggctgacgaggccaatgctgcggcggtctctgcgccgaaagccaaggagcgctgcagggtcgcgaaggaatggaaggtcggcaatacggttgtgcagcacagggtctgcgaggatccaccgaagaagccggctggaaaggtgtag

SEQ ID NO: 498589 - DNA, 957 bp, Stenotrophomonas maltophilia
atggacacaccttggcgcgaagatgcatctgtcttcatttcttacgcttggggcgggcaatttcatgcaaaggaatggatccgtagcgacattgtccgcaacttggattggaagtatcgagtcttttgggacagggacagcgtcggttttggtcaaaacatcgacaagctgattgaacgcgcgtttgcggaacgcccactgatcgttttctgcctttgtgacagcgactttctctcggccatgtcgagacccggctcaggattgaatcgcgaactggctatgctggagaagcacgtggatcagtccgacgtgcgaatcgtcccagtcatcctcgatgctgaagcccgcacagcactccctcctgttctacaaggacgagcatacctggatctcaccgaactgcattcggaaagcattccattgggtgaatttctgctcgcggcaaccgatggatccacgcaagcccagattacacagggggtacagcagcgtctcgagtatcacgcactgagcaaacgtgcactttgctggcttcagcaccacggagtgagatttaccggctcagcgagaacccatgaagttctctacaacggcaggctccttacgccaccagactggatgtacgagagccccgactggaactacatgattcacgatgacaacgaggacttctgtccggcaaagggtcgctggctctgggaccatagcggtccttctctcgcgatgcgggccctgggaactgctgttgcttcggtgctgttccttgaccgttcaaggccggagctgcatggagcattcaattcagccggctccgttcttgctgaagaatttttctgctacatcaagtcccatgaatcatttcatgttgatggagaagagatcattagaacgttactgaatagttccgatggctaccgcgtgatgtcgcgtctattcccacctgcaggccaagtgtaa

SEQ ID NO: 498590 - DNA, 1347 bp, Stenotrophomonas maltophilia
atgaagcgcatcacactgtttgtgggcttggccgtggcgttggcactggggcaggcttccgctgccacgccaggctcccgctatctgcagctggccgctgaccagcgcgtacaacccggcacggcaaccctgctttcgagcaccatcgatctgaacgcccctggatgggtatacgtgcagtcggatggacggtacttccctggcggccgctctgccgccaacgcctacatcaccatcaacggtgaggtggtctccaacgacagctacatcgactggcggcagtcgacatcggcccaacagcactccttcaatgtcatcggtgccaagtacctgcccgccggacaccatacggtcaacctggccggacaggccatcggttcggccgtcaatttcggctccgccagcaacctttccgtgctcatcacatctgcaggctcggtaaccaacagcagccttccgagtgacaccgcgcagctggacttcaataccgtcggcagtcctgaaggaatggcgttgcaggccaaggaccgcaagctgctgatgactgcccaggccggcaatcccggtggccccatcgtggccatggcttccggccgcgcgttcgcatggggcaactacggcgatggcatgatgggaattttcctgaacgagcaggagcccggcatcgaatcgatgacctggtcgatcaatgacatcttcagtggcgcagaaacgcaggctcccttctattcgcaaggcctgttcgtcaatccgccggcttacagcactgtcagcttcgtcgcgtccgaatcgccgtactaccagccgcaggacgccaacaccaacaacgtaaagtacaagttcggcgccaactcccgactggtgacgctgtccaacggctttggcgtggtcggaaaggggttgaatcctggattcaactacgccgccgcaggcccctaccgccgcttcgcctatgtctgcgtcgggaccaatggcttcgcgccgggctgtccgtcagcgggctcgcaggtggtcattggcgagggccaggtctgcattccgcaggggcacaacggcgtggtgcttttctcgacaaagtcccgcgtgcagggtgacccgaacgacggtggcggaagcgtgttcctgttcctgaagatcgatggccagcaggtgggcagcctcggcacccagcagttgggctccagaccggactcggtcagcacccgtaccatctccgccagctacctgagcgcgggatcgtccgcgctgggaacgggctgccacaccgtgcaggccgtggcccaggtgctaggagatttccgccacatgtcgctcaatgccgacatgccgctggtctggttcgactga

SEQ ID NO: 498591 - DNA, 219 bp, Stenotrophomonas maltophilia
atggctaccgagccgctcgttttcatcaagatgcccgaggtcaagcgccgcacgggcttgggcaagaccacgatctacgaccggatcagcgctggcaccttccctgcgcctgtgccgctcggcggcaacgcggtaggctggatcgaggctgaggtggacgcatggcaggccgcgcgggtggcggagcggaaaggaattgaacccgcgaaggctgcatag

SEQ ID NO: 498592 - DNA, 309 bp, Stenotrophomonas maltophilia
atgacccaggaacatatcagccacccggaagggttgccgaactgcgccgccggccaccgcgcgcgccacatccacgacaagcgctgcgcctccgccggcggtggccacctggtcgagtgcgcctgcaggtcgaccagcaagcacgcggagcccgacgcggccattgctgcatggcacaggctcaaccgccccgcgcgcagcgcccggccggcagcggtgcctggggcggccgacaacgtggtgcagttccagctcggcctggccgagcgcaaaccgaagacccagcgcgcggcgctggcgtcgatctga

SEQ ID NO: 498593 - DNA, 357 bp, Stenotrophomonas maltophilia
atgcaggccgacgcagggcacgtctatgccgcccatcaacgtgggctcgttgtccgtgcactgttcgaaacccctcgcgtaatccagcccgagaaggtccacgacttccagcgcaacgagtgcacacgctgcggcatgagccaggactgggcaggcccggattgcttcccgccggacaagaaggtcgacccgcgcaccctgctcccgttcgacccgtcctggctggtccagccactgcagtggctcagggacgcgccggccaacctcaacgcctacgaccgccgccaccgtgcagcgcaagccgccttcctcctggaaaagctccaggcccacatcgaggagtgcaaccagccatga

SEQ ID NO: 498594 - DNA, 753 bp, Stenotrophomonas maltophilia
gtgcagaaggtgaccgggctgctcggcaactacgccagcctcatggccgacgtgagcacccagctgatgacggccaacctgacgcagtaccagtcgcaggcgctgtcgatcgagcgcacgtatcgccagcaggtgaagtcggccaacgactacgccaaggcgctcggcttgtccggcgctcgggcggaggacttggccaagatcgaggcgcttcgtgccaccaacatgggcaagctgcaggcgcagatcgacaaggacaagaaggccatgcagtacggcctgtcgatcagtgacctttcgccgctgacggaccaggagaagctgggcgaggcgatgaaggagctggagcgggcggtgtccggtggcgacaccagcgccgcgcaggcggccgctcaggccgcgctgggctttggtcggaacctctacgccagcgggcaggactacaacagcctgtacggccgcgtgacgggcctgatcgatggcatgaaggtcggcgacctgaacagccaggacggcaccagcatggggacgctggccgacgccatcgaggcgttgccggacaacttcagccgggccgtgttcgacctggtcgttaacaacgacgctcagacgcaaacaaccgccgccatacagcagagcaacgctttgctcgccgaacagaaccagctgctccgccagctcgtgtccaccactacccagggcgtacgcaacgccagcagttcagcgctgcgcgaagcactcaacgcgaggtaa

SEQ ID NO: 498595 - DNA, 339 bp, Stenotrophomonas maltophilia
atgcaagcaaggaaactcacgctggtggaaatcggcgtgggcgggctgccgtccgcgtctccggtggcgccgcgcttttccacgtggttcccggtgcccttcaaggcgccggacgtgccgccggcgaatggggtcaatcctacgccggtggccgacggcgtcgtgctcgaatgggacgccgtcgatctggagggcgtggtctacgtcatctcgcgcagcgagagccaggacggcccctggacggagatccaccgcaccaccgagacgcgctatgtctatagcgacggcagcggcaagacgtggtggttccagatcaccccgatgcgaacggccggctga

SEQ ID NO: 498596 - DNA, 282 bp, Stenotrophomonas maltophilia
atgcggatcatcggtgtaggcggcgtctttcccaatggcggtatggaagaggacaggttccctgacttcaccggcaagacggtcgccggggtgatctgcgcgccggcgaccagcacgttccagaacagcttcaccgtgatggggatcggcaacgggcagggcgttagcgggaagcacggcctgttcggcaacgccatcaccatcccgaaaatcgggactggcggctcaccaaaccaggccgtggtcgggatcgtgatggcggttgacgtaacgaactactga

SEQ ID NO: 498597 - DNA, 225 bp, Stenotrophomonas maltophilia
atgaacaattccccgcagaaccagaacgaccgtcccaactcggatggcgagaagaagcagccaggccagcagggtcaggtggacggaaatgagcttggcggtgaagacctcgccggaaagcaaggtcagcaacagcaacagcagcagccgggaggcaaggagagtgagcagtcgacccatggccaggaccaaaagggcagtgctggtcgcgatagtcgccgttga

SEQ ID NO: 498598 - DNA, 450 bp, Stenotrophomonas maltophilia
gtgcctatcagggcagttgtatatgcgagcagcgctagcgaggcgatcgctggcgacaagctgggcttgtccaatggaaagctagaccagattgtggacgacgcggcccggttcaaccgtaacgctggagttacgggggtgctcctcttcgatggcgaacgcttcctccagtacctggaggggccagaggatggactgtcagtcgcctattcccgcgtgttgggcgcaagtagccataacgggatcgtagagctgcagcggggcagggtgggccagcgccgcttgccgttctggccgatgagatggctgcccgttgaatcggatgagcttgggcgtgtggcccatgcggactggacccgattcaatcagcggggcgatcaccaggcagcctatgcgactgccatggatctgttggtcggactggtggagccgtacgccatcgcagtctag

SEQ ID NO: 498599 - DNA, 276 bp, Stenotrophomonas maltophilia
atgaccgatggcatctccgaactgctggaccgtctccactgctgcgaagtcgcgatcgaggttcaccggggctatctcaaggcaatggagtatgcgctgcgggtttctgtcctgacccacccggcgcccgagcagttgaccgatacttggttgcgcctgctacccagcatcgcggcgaagcacaaacacgatggcggcgctctcttcgccgccgccttcgagcaatcgctaacggttctgaccgagcaaatcggagagccaaacgacagagcctag

SEQ ID NO: 498600 - DNA, 195 bp, Stenotrophomonas maltophilia
atgcgcccctgttcgggcatcctctgccagagcgtctaccgcgacgaccagctggtcgcgagcgagaagaacgttgaggatgctcatttagaaggcaaccggaagttccgcgaaatatggcagcttgagtgcttcgagtccaacagcgatgaggctcagggaagtagcgtgagcttccacttgagcttggtgtga

SEQ ID NO: 498601 - DNA, 483 bp, Stenotrophomonas maltophilia
atggctactcgcggttccacccagttcttccttcgcatctacgagctggcgctgcaggccagcttccgcgcagatttcacgatggagcagctctccgccgagctagggttggtggtggaccagctatggccgaattacgagaaggcggcagctgaggccgggctgccgctcgaccagcttgggaccgagttggtgcttggcggctggtcgccgaagaacggccggatgatggcaaccgcgtatgccaagagcgacagttctcgcccgtccgtagtgcagcccctggatggaggactagcctctcctggggagcccttggttggcaggccagacagttttgctcctgaagacgtgttcgctgctggccggatccaagcggcttggctcaacaaacagataggaaggcaggtggcgggtgggcggctcctagccgccggactgcgcgaggggcaggcggtagttcaggacctagggccgatctag

SEQ ID NO: 498602 - DNA, 1017 bp, Stenotrophomonas maltophilia
atggctactggcaaggaagtgtctggcaaggcagcgggcggcaaggctcgagcagaatcgctctcaccggcacgccggaaggagatcgccaaggcggctgctgcggctaggcaagagttggcttctctcccgaaggcttcgcatgggagtgcggatcaccccctgaagatcggggacgttgagatcccctgctatgttcttgaagacggcactcgcgtgatatcacagcgaggcttcatcactggcgttgggatgagtcttggctcgtcgaaatctggtgatgcgcggcacatcgctttcttggagctcgagtccataaagccccatgtaaacagtgacttgttgccgatgctgaggaatcctattcgcttccgacatccccatggtggcggtatcgcatatggataccccgcaacggccttggcagatttttgtgaggccgtcctggccgcacgtcgtgcgggagatcttcccaccagacaatcccaagtcgccgaccagtgcgaagttctcgttcgaggtttcgctcgcgtaggcatcatcgcactggtagacgaagccaccgggtatcagcgcgaccgcgaacgagatgccctggctaagatcctcgaggcattcgtcgcgaaggaactgcagccctacgttaagacgttcccacctgagtactacgagcagatgttccgtctgcgaggtcttccctatcctcccgccaacgcaaagtaccgcccgcagtattttggtgttctaaccaacgacatcgtgtacgagcgcctcgccccaggcttgcttaaggaactgaaagcccaggcagcgaaggacgaaaagaaggcaaaactgcatcagcgccttaccactgagatcgggcatcctaagctgcgcgagcacctggcatcagttaccacgatcatgaagctgagcaaggactactcggattttcagagcaagctgacagttatccaccccaagctcggcgatactggccagctggcactagaggacgctgctgaatccgaataa

SEQ ID NO: 498603 - DNA, 504 bp, Stenotrophomonas maltophilia
atgtattcctcccacggcttccgcaccgccccgattccctctggctgggtccagaccggtgagcgctgggcgctctggtacaacggccgcgagacggccggcgtcgaacccgatggcggccttggggtgcgcctctggatggaaggtcacaagttctggaaagtgaaggaagtgcgcgccgccaacgtccggcaggcgaagcggtacgccgagcgctggtgtgcggccaggctctatcccgatctgccactgcgccaggcagtcgcccggctgaccgacagcaccccgacccagccgccgccgccgctgccaggtctgccaccgacgcgcgagcagcagcaacaggcccggcgcctggccgaggccggagcgagggagatcgagcggatcaaggcagcactcgaaccgcgtaagccgccggcagagacgaagccacgagcgagggacgtccgcagcaaggcgcggttgagggcagggctggagcagatgcggcggggcgtgtag

SEQ ID NO: 498604 - DNA, 1206 bp, Stenotrophomonas maltophilia
atgcctctgaccgacgcagccatcaggcgcgccaagcccagcgacaagccgcagaagatcaccgacggcggcggcctgtacctctatctcaccccgaccggctcacgcagctggcgctggaagtaccgcatcgccggcaaggagaagctgctgtcgatcggcctgtacccggatgtctccttggcgcgcgcccgcgaagcccgcgaagaagcccgcaggctgctggcccgaggcgtcgacccgggcgcgcagaagaaggctgccgccctcgcccactccgccctcggctcggacagcttcgagaccatcgcaaatgagtggctggctacacgcccctgggtgcccagctatgcggagaaggtcgaagcctggatgaagaacgacgtcttcccgtggattgggtcgcgttccgtaggtgaactcagcgcgccggacttcctccgtgtggcccggcgcatcgaggaacgcggcgcgatcgaatccgcgcacaggatcatgcagaactgcggccagatcatgcgctactccgtggccacgggccgcgccgagcgaaacccggttgccgacctgaagggagcgctcgcgccgccgaaggaagcccaccacgcagcgattaccgaccccgtgcagctgggtggcctgctgcgctccatcgaggcatacagcggatccgccatcacccgggcggcgctgcggctggcgccgctggtgttcctgcgtcctggagaactacggcatgcggaatgggaggaattcgatctcgacgcggccgtgtggaccatccctgccagcaagatgaagatgcgtgcggcacatctagtgccgctgtccaggcaggcgctgcagatactggcggacatcaagccgatcaccggccggcacaagtgggtgttctctggcgcccgcgatgccaaacgcccgatgtcggagaacgccgttaccgcggcgctgcgcaacatgggttacgaccgaacgatgatgaccggccacggcttccgcgcgacggctcgcaccattctggacgaggtcctgcacttccgtccggacatcatcgagcaccagcttgctcacgcggtaaaggatcccaacggtcgggcctacaaccgcacatcgcacctgcaggagcgcgtgcggatgatgcaggtctgggcggattacctcgatggcctgcgcgatggcaacgtggtgaagctgcgggccggatga

SEQ ID NO: 498605 - DNA, 1125 bp, Stenotrophomonas maltophilia
atgagcggcctgctcgaacgcacgccgcgcacggtcggcatcgtcggcagtgccggcgcctacggacgctggctgacccgcttcttccagcagcacatgcagctgcgggtaatcggccatgatccggctgatccgggctcgcatacgccggaacagctgctcgcgcaggccgatgtgctggtgttctcggcgccgatccggcatacgccggcgttgatcgccgagtacgtgcggcagtcggccggccgcgagcaggaccgcctgtggctggatgtgacctcggtgaaggaggcgccggtgcaggcgatgctggcctcgcaggccgaggtggtcgggctgcacccgatgaccgcgccaccgaaagcgccgacactgaagggtcgggtgatggtggtctgcgaagcgcggctgcggcactggcagccatgggtcgattcgctgtgcacggcgctgcaggctgagtgcgtgcgggccacgccgcagcatcacgaccagatgatggcgctggtacaggcgatggtgcatgccacccacctggcccaggccggcgtgctgcgccagtaccagccgcagctgggcgacctggccgcgatgatgccgtaccggtcggcatcgttcgaactggatacggcgatcatctcgcgcatcctgtcgctgaaccccgcgatctacgaggacatccagttcggcaatccgtacgtggcgccgatgctggagcgcttgatcggccagctgcaggccctgcaggcccaggtcgggcagggcgacgacactgcacgcagtgcattccgtgagcagctgctgtcggccaaccacagtgccttcggcgagcaggcactggccgagggcaactacacctttgaacgcgtgggctatctgctggctgacctgaccgagcgcaatgcgttgtcggtgcacctgccggaagatcggccgggctcactgcgtgaactgctgaacgtgttcgagcagcaccgcatcagcctggcctcgatccattcctcgcgcacgcctggcggcgaagtgcatttccggatcgggttcgtggccggcagcgatccgggggcgatcagtcgcgcggccgccgaagtggacgctagcggcatcgggcgggtgctgggctga

SEQ ID NO: 498606 - DNA, 624 bp, Stenotrophomonas maltophilia
atgaacctcgccctgcccgcccctgccaccggctatgcgccaccgcctgcaggccttaccctgtacgccgtggaagccagcgcactgccaaccgatgaagccttgatgctggcctgggccggtggcgacctgcgcgcgttcgaaagcctgtatgggcgccaccgcaagcgcctgttcggcttcctgctgcggcaactgcgcgacaccgcgctggccgaggagatcttccaggacgtctggcagcgggtgatcagcgcccgtgccgggtggcaaccggacgcggcgttcagcacctggctgttccgcatcgcccacaaccgcctgaacgaccattggcgcgccgcccgccaccgcccggctgccccggccgatgccgatctgcgcctggccgcgatcgaggatgggcagaccccggaaggcgagctttccgaattcgaacaacgtcgccgcatccagctggcgatggaactactgccgcctgagcagcgcgaagtgctgcaactgcggctggatcaggaactgagcctggaggagatcggccagatcaccggcgtaggccgggaaaccgtgaaatcgcggctgcgctatgcgatggacaagctgcgtgcgggattgaacgcatga

SEQ ID NO: 498607 - DNA, 1098 bp, Stenotrophomonas maltophilia
atgcgccggattgccgggttgtgcctgatcgtgtgtggcctttcgtcctgttccagcgtgcccgatgtcgcctactggcccgagcatgaggcccgtcccctcgcattgcctgcgcgcagcgagcgaatggtgatcgagatcgatgatgccgggggcttccattggccgggccagttcaaccgcctgcaacgctggctggcggcggaacctgtcgatctcccggtggtggtcttcatcaacggctggcaccacaacgcatcgcccaatgacagcaacttcactgattttgaagaattccttggcaaggtcgaggccaaggcgggaaccccggtgagggggctctatgtggggtggcgtggtgactcctacgataccccgctggcctgggagccgagcgactttctgacggtttgggatcgaaagaacgcctcggtgacagtaggggagaacgggctggcgcaggtggtggccctgttgcgcgagcagcatccggagagggcggtctacatgatcggccacagtttcggcggctcagccctgttccatgccatcaaggatggcctggtgcaggagcagttggatggcttcgagtacttcatgctcaacccggcagtggccgagcgtgagttcgacgaggtcgagcaggcgctggtatccgcgtgggcagcgtcaccggcatttgccggaacagtatcgatcacggctgctgacgctttgcgccagcatcgaaaggtgacggtgctgcaggcgcagggcgacaaggccgtcggtatgggctaccggattgcgttcaggggcacgcccgttggatttgaccgtcagcgccagacccatcgagcctgggtctgcgccacggccgatgcctgtccgccaccgccgctggacgcctgtaccgcaacgcttgccgatggccgtttcgttctgcgcgcccggaccataccgggccagggctgtgcgccaatgcagcaacgtccggtctgggtgatcgcaggcgcagacagtgtctcggccgaccacaacgacatcctgaactcgatccaggcggacgccctggccgacctggtggcgcagcgctggcggctgcgggcagggcgctga

SEQ ID NO: 498608 - DNA, 837 bp, Stenotrophomonas maltophilia
atgcacctgcggctgcccgcgctggccctgctgcctgccctgttcattgccccggcgctggccgccgaagggccggacctgcgttcggaccagtgcggcatccataccgactacgacgtgctggtggacagcggcggcatctggctgcggcatggcccgcaggccccccatgaagtggtgttccacgacggtgagctgagcctggacggcaggatggtgacggtcagtgccaccgacgccgcccgcctgcggcagatggaggccggcgcgcgccagttgatgccggcggccaccgcgctggcccacgaagtctccggggtcaccttcgatgcgctggacgccgccttcgaagccatcaccggcaagtcccgcaatcgccagatgcgtgcgatgcgcggcgagatgcaggactggatcgacgccagcctgggccgcggctactgggaacaggaggccttcggcgacggcttcgatgcgcacatcgagcagatggccgagacgatggccgggtcgatgacccgcagcgtgctgtggcaggtgttcactggccgcgctggggccatggagcgccgcgccgaccgcctcgatgccgaagtcgaccgccgcatggaagcgcgcagccagcagctggaagccaaggcaatggccctgtgcccgttggtgcagtcactggcagaggcccacgatgcgctggaagtgcgctaccagggacagccgctgcggctgctggagcgcggcgagagtgtacgggtggagcacggcagcggttcggggctgcatgtgtcggccgggccggatgagcggccgcgtgacgacgccgtggcgccgacccgatag

SEQ ID NO: 498609 - DNA, 1020 bp, Stenotrophomonas maltophilia
gtggcgaaggatagcaaggcgattgaattcgcgaacgtcgtagtgcgctttggtgaaaaagtgctgttggatcatttcgatgagatcgtgatgccttctttcttggaaggtaatgagagatcttattccgatacacgttatttcttccagatggctgacctagtgcactacggggaagacgaatatggcatgccggttctggcgatcgtcggtcgcttcattaaagacggtgtactacgtcggcaacaggtgtacgagcaaggcgagttgcagcagaagcctggaaagatgaaatcatcaccctcggcattgttcatgcttctacttcataaccaccgtctcatctacgtgaaggaaacgccggatgctccttcaatggagacgttcaggacgacccttctcgctttcctgaagagaacgcacggaaagattcgtcgtgacaagttcaaggagattgataaggcagaaccaaagttgtccggtcggagaaagaaaaaagacaggtttgatgaggactatcaaactccaaccgtccagctaatcccgctctcgtcgccggacgatattagatcattcgttgaacggtacaagattctgcggcaggtgaaatttacgtttgcagagactaatgatgagaatccgctgcacgatatgtttgcccagatgagagctgcgaaagaagcagttggtgctgacacatcttcgctgatccacggcgccaaagatggcttggacaagaagcaagcgatcacgcagatatcggaggcgacagagcagggcttgaatgaggttcagctgcgtggcatcgatgctgagggggactctttgtctggaaacaccgaggaattcaagctgaagaagtcaattggcaatatcagcactaaacctatagatgcaggttctacaatgcttaaggtattcaacgatctcaaggatgatgggatgattaccctagggaagatagcgccaaagactgtcaagcgcatccaggagatctgtcgtgagtacttcgccgaataa

SEQ ID NO: 498610 - DNA, 627 bp, Stenotrophomonas maltophilia
gtgagtacttcgccgaataacgagctcgggccagctagttttacggctgagctgaatctttggcaggtgtggaataaggctaggcggataccgaccagcgggttcaacctttggtccaccgctgcagtattcgcatttgttgctacgacaacgttcttctcctctcacgacgcagttgcgcttatcagctctgttcgagagcttgcgcagtttggcttcaatgcggcagtgacagttcttggattcttggtggcagggttcacaatatttgcgagtgtttcgaatccgaacatgctgatagaaatgggtagtttgcagcatccgaagagcgggctatcttggatgaagcattctttcttcgttttgcttagggccttcatttactacataatttacgccgcaatttgcttttttgtcgtctatctcggtgtggcaaagggtccgatctcctttcttctcaatttgacgccgcatcctaatgaatatgcactctgcctcgcaaaaattacttacgtcgtactggtggtcgggcaattttttctcctgatgcaattgaagtcattcattttcaacgtctatagcggtgtagtggccaatctccgctacaaggcggagaacggatactga

SEQ ID NO: 498611 - DNA, 360 bp, Stenotrophomonas maltophilia
atggaagattgcgatgtcgcccttcatcaatacggcctggccgcgcttttcatcggggcgctacccatcgccgctcttgcggtttttttcagcagctcgatcaatgcgtcgcagaacggctggttgatgcaggcgacgctgctgctggtgccgttctcgaccctggtattcctcgggttgggttggcagcgtctgcgcaaagcacacgccgaacacccgattctgaaaagcgagctgccccgtgtggcgacggcattgatcggcaacgtgaagctggcggcgctatggttcggcctgaccttcgttggcatgttcaccctgatgctggcgtgggtgttgctgtataggtcctgcagctga

SEQ ID NO: 498612 - DNA, 1845 bp, Stenotrophomonas maltophilia
atgggctgggccggcggcagtttgccggctctgtttcctgccacgcgattcccttacagtgctgcctcttccagccgcatcttcgtcggtctggcagccatctgcagggaacaggacatcgtggaacagggacgtaatgtacgcagccgcgcgttgcactggcggttgtccgtgggcgtggcactggccatcgccggcttccaggcaccggccggggcgcaggtcgtgtcaccggagcaggagctgctccggcagcaggagcgcgaacgcgcgctgcgcgaacaacaggaagccacgccggatgtccggctgcagccggctaccgaagacctcggccatctgccggtggacgaatcaccctgtttcaccatcaaccgcatcgagctgcagggtgaccaggccgaccgcttccgctgggcactggcggccgccgatccgcgcagcgaccccgccaccgggcgctgcctgggtaccgccggcgtggacatcgtgatgaagcgcgtgcagaacgcgatcatcgagcgcggctacgtcaccacccgcatcctggccgcaccgcaggacctgaagaccggcatcctgacgctcacggtcgtcccgggccgcgtcaatgccatccgctttgccgacggcgcaggccgcacccccgccctctggaacgcggtgcgggtggcacgcggcgaagtactgaacctgcgtgacatcgaacaggcgctggaaaacctgcagcgcgtgccgaccgcgcaggtggacatccagatcgcgcccccggccgatggcgcggcggccaagccgggcgagagtgatctggtgatcagctggcagcaggcgcgcctggtacgggtcaacctgaccctggacgatgccggcagccagtccaccggcaagatgcaggccggcaccacggtgtcggtggacaacgcggccggcctcagcgacctgttctacatcaacgtgggcagatcggtgttcaacggcagcgagcgtggcaccgacagttgggcagtgcattacagcgtgccgctgggcggatggctgctgggcgccaacgccagcaacttcgactatgagcagaccgttgccggcgcattcgagaattacgtctacagcggctccagccgcaacgccgagctgcgcctgacgcgcatgctgttccgcaacgcgcgcgccaagaccagcatgtacgcgcgcggctggtaccgcgaatcggacaacttcatcaacgataccgagatcgaagtgcagcgccgccgcatggcgggctgggaactgggcctgggccaccggcacttcatcggcaaggcgacgctggatgtgaacctggcataccgcaaggggaccggcgccttcaacgcgctgcgcgcaccggaagaggtctttggcgaaggcacggcgcatggccgcatctacaccgccgatgcgcagctggtcgtgccgatgcagtggggccgccagagcctgcgctacaccagcagctggcgtgcgcagtggaaccgctcgccgctggtaccgcaggatcggttctcgatcggtggccgctacaccgtgcgtggcttcgatggcgaaatgtcgctgaccggcgagcgcggctggctgctgcgcaatgaagtgggcgtacccctgggcagtggcgtggaggcctacgtcgcggtcgatcacggccgcgtcggcggtccgtccacggcccggttgctcggcgaccggctcaccggtaccgcgctcggccttcgcggtggcacccgccacatcaactgggatgccttcgtcggcagcccgttgtccaggccgcgcggcttccagaccgcctacaccacgctcggaatgaacatgggcgtctcgttctga

SEQ ID NO: 498613 - DNA, 15111 bp, Stenotrophomonas maltophilia
gtgaacaaagtctaccgtctggtcttcaaccgtacgctcggggtcatgcaggttgcgtccgagctggtcaacgccgcgcacggcggtgccgacaatcgtgaaggccgcacggtcggcaccctgcgaccgatcagtttcgcgttgtggctggtgctgggctgggtggggctggtgcagccgttgtcagcgcagcaggcgccggccgacccgggccgcatcgccgccgacccgggcgcgccggcaaaccagcgcccgacggtgatcacctcggccaacggcacgccacaggtcaacatcaccacgcccagtgcgggcggggtgtcgcgcaatacctaccagcagttcgacgtcggccagcagggcgtgatcctcaacaactcgcgcggcgaggtgcagacccagctgggtggctgggtgcagggcaatccgtggctggccacgggcaccgcacgggtcatcctcaacgaggtcaacagcagcaatcccagccacctcaatggctatgtggaggtggccggtgcgcgggcgcaggtggtcatcgccaacccggccgggatccaggtcaatggcgcgggcttcctcaacgccagccgggtgaccctgaccaccggcacgccgatcgtcagcaatggcgtgctggaaggctatcgcgtggaaggtggcagcatcggtgtcggtggcacgggcctggataccagccgcgccgactacaccgacatcatcacccgttcgctgcaggtcaatgccggcatctgggccaaccagctgcaggccagcctgggcagcaacgtggtcagtgccgaccacagcagcgtgcagcagcagaagcctacgtccgccgcgcccaccttcgcgctggatgtgggcgcgctgggcggcatgtatgccaaccgcatctggctggtcggcaatgaacatggcgtgggcgtaagcaatgccggcaagatcggtgcccaggccggcgagctggtggtcaccgccgacggccggctgcagaataccggcgcgatgcatgcgcagcaggacctgcgcatcgacgccagcgcgggcatcgccaatgccggcacgctcagtgccgagcgcgagctgcgcgtgcagaccccggcagatgtcgacaatagtggcggcacgctcaatgcgcgacgcatcgaagtgaatgccgatgcgctgcgcaaccgcggcggcagcatcgaacagcttggaacgcaggcgctgcagctgcaggccgccgacctcagcaacctgcagggccgcatcggcaccgtgtccagcgtttcgccaggcaccggcaccggcggcaccggcaccccgccgggtacgggtacgccaggcacgggtacgccaggtaccggtacgccaggcacaggtacccccggcactggcactcccggcactggcactcccggcaccggcggcggcaccccgccggtcacgccgcttccgccgctggcggccggtgtgctcaacatcgcaggaacgctggacaacgacggcggccgcatcgaagccagtggcgacctgcagctcagcgcccgcaacagcctggacaacagcgacggcacgctgggcgcaagcaccctgcaggtgcagggacaggcgctgcgcaacatgcgtggcaccctgcaggtccagggcgcggccagcgcgcaggtgcaacagctggacaacagcggcggccgcatgaccttcgcccgtggtttcaagttgaaggcgcaatcggcaatcaatcgcggcggcagccttgcccacggtggcagcgccgagacgacctggatgatcggccaggtcgacaacagcgagggcagcatctccagcaatgccacgcggctcggcctcgacatcggcaccctggtcaacacccggggcagcatcaaccacgccggcagcgaggacctgctgctgcgtgcggaggtactggatggcgtgcagggcagcatcgccaccgccggcgcggcagacctgcagctgggccgcgccgaccaccgtggtgcgcagctggtcgcccgccagctcggcctgagcgcacaggacttcgacaaccgcggcggccgcgtgctgtccacggggctgcaggccagcacgctcaacgtccgcaatcacctggacaacagcgacggtggcctgctggccagcaatgccgacctgcagatcgatgcagcgttcttcggcaatgccggcggcaccgtgcagcaggcgggcgctggcaacctgcgcatcaccaccgccagcctgcagggccagggcggcaccgttctcagcaacggcaccctgcagctgcacggcgataccctgaacctgcgcaatggcaccaccgccgcgcagcgcatcgatgtgcgcgccggcgacctgaccaccgccggcggcacgctgacctcgaccggcggcgatgccctgcagctgcaggtatcgcgcaccctggacaacagcggcggcaccgtgggcgccaatggtgcgctggacatcaacagcggcatcctcatcaacgacggcggcaagctgatcgccgcaggcaccggcaccagccacatccacgccagccagcggctgcagaaccagcgcggcctgctgtccggcaatggcgatctgcagatcaagaccgatggcctgctgaacgagagtggcagcatcgaccatgccggcaccggcacgctgcagatcgacgcgaccaccgtgcagggagctgctggcagcatcgccagcaatggcctgctgcagttgagtgggcagcagctggacctgcagaagggcagcacccgcgcccgtgacgtgaagatcacggccaccggcctggacaccagtggcggcagcctgttgtcactgggtaacaacgcgatgcagctgcaggtgcagggcctgctgcgcaacgacggcggcagcatcagcgccaatggcgcgcagcagatccaggcgggtgcgctgtccaaccgcggcggtgcgctcaattcggcgggaacggcagcttcgcagatccaggtcgacggcacgctcgacaacagtggcggcagcatcgccagcaatgccgcccacctgcagctgaaaagcggcgggctggtcaatgccggcggtaccctcagccatgcgggcagcgacggcctggtcatcgacagcgggcgcctggacggagcaaagggacagatcgccactgccggcgccctgcagctcaccgcggccgaggtcgatcaccagggcgcgtcgctggctgccacgcagctggacatctcggcgaccgggttcgacaaccgcggtgggcgcatcatcgccaccggcaccggtggcaacacgctgcgcgtgcagggcacgctggacaacggcaatggcggcaccctggccagcaatggcaacctggatatccacgcgcgtaccttcggcaatgccggcggaaccgtgcagcaggccggatacggcagcctggtcatcaccacgcaggacctgaccggcgccggtggcaccctgctcagcaacggttcgctggagctgcagggcgacaccctcgatctgcgcaacggtactaccaccgcgcagcgcatcagcatcgatagcgacaccgtgatcaccgccggtggccagctgagtgcgctgggcacccaggcgctccagctgcaggcccgtaggctgctcgacaataccggcggaacgctgggcagcaatggtgcggtcgatgtgcacgcaggccgcttcgtcaacgaccatggcaagttgattgccgccggtgatgctgcatccgcaatccgcgccgcgcagctggagaaccgcagcggcgcgatctccgccaacggcaacctgcgcatcgaggcgcaaacgctgtcgggccagggcggcagcatcggtgccgcccgcgcgctgtcactgcagggcgggtcattggatctccgcagcggcagcgtggcggccgagcagctcgatatcgtggccggcagcctggacaacagtgcgggtgcgctgcgcgctacgggcagtggaacgctggcgatgcagatcagcggtcgcttggccaacgacgccggcaccattgccagcaacggtgcccagcacatcgaagccagtgagctctccaaccgtggcggcacgctcagttcggccggcagcgcgtccactgagctccgcatcgacggcctgttcgacaacagcaacggcatgctggccagcaatggtgcggcgctgaagatcgacgccggcagcatggccaacgtcaagggcacgctcagccatgccggcagccagggcctgctgctgcgcaccgggcaactggatggccagggcggcaccatcgccagcgcaggcggcatcaccctgcaggcgggcagcgtggaccatcgcggcgccaccctgcaggccgagcacatcgcgctggacgcacagtcattcgacaaccgggccggcaaggtcatggcgactggtgcagagggcagccggatcgacgtggtcggcagcctggacaacggtgaggggggcctgctggccaccaatggcgacctgggcatccaggcggcggtgttcggcaatgccggcggcaccgtgcagcacgccggcgaaggcgtgctgtcgatcaacgccggaacgctcaacggtacgggcggcacgctggtcagcaatggcagcctgctgctcaagggcaccaccaccgacctgcgcacgggtgtgacctcggccaagcggatcgaggtggataccggcaccctgatcaccgccggcggcacgctcaccgcgaccggcagcgacacgctgcggctgagcgcgcgcgaacgcatcgacaacagcggtggcaccgtatccagcaacggtgggctggacctgcgcagcgccgcgctggtcaatgctggcggtacgctgcagtccgccggtacggcggccagccagctgaacatcggccagaacctcaacaaccgtggcggtcgcatcctggccaacggcgggctcggcatcaccgccggcagcatcgacaaccagggcggcacgctgcacagcgctgcacgcctggtggcaaaggccgatggcctgctcgacaacagcaacaagggtgtcatcgccagcggtgcgggcatgcgcgtgtcagcggcttcgctggacaaccgcaccggcagcatcgagcaggcgggcgacagcctgttgcagatcgatgccgacacgctgcagggtcatgccggccgcatcgtcagcaatggcgagctgcaactgaagggcgagaccatcgatctcagtgcgggcaccatggccgcgcagcaggtcagcgtcgaggccggccagctggacaacacggcgggcacgctgaccgctaccggcaaccaggcgatgtcgctgcaggtacgcggcgcgctgggcaatgacggcggcaccatcgctgccaacggtgcgcagcagatcagcgccggttcgctatcgaatgcgggcggtaccttaagttcggcaggtacgtccgacagccggatcaccgtcaccggccgtttcaacaacggcggcggcaccctcgccagcaatgccggcaatctgcgtgtcgatgccgggcaactggtcaatgccgcgggcagcatcgtccatgcagggaagggcgtattgaccgtacaggccacccagctggacggcgccggcggcagcatcgccacggcaggcggattgcagctggatgcggtgaccgtggaccatcgcggcgccaccctcactgccgatcacttcgccctcaacgccgaccgcttcgacaaccagaacggcaagctgctggcgacgggcacgcaggccagcaccgtgcaggccaccacgtcactggacaatggcggcaacggcctgatcgccagcaatggtgacctgacactgaccagtgcagtgttcagcaatgccggcggcaccgtgcagcaggctggcaccggcatgctggccatcaacacacacaccttgaatggccagggcggcaagctgctcagcaatggcgccctgcagttgaccggcgaaaccaccgacctgcgtgacggcacgctgtcggctacccgcatcgccgtggatacaggcacgctgctcaacgcgggcggttcgatcatcgcctctggcagcaatgcattgaaggtgtccgcgcgcgacaggctggacaacagcggtggcacgcttgccggcaatggcacgctggatctgcgcagcgctcagctgctcaacaaccggggcacgatccaggctgccggcggcggtatcagcaccctggcgatcacccacgcgctggagaatcgcggtggccgcatcctgaccacaggagacgccaccctcatcgcaggcgcgttcgacaatcgcggcggcatcgtgcacagcgatggcagcagcgcattgaccgtgcgcgtcgacggcctgctcgacaacagcgacaagggcaccctgtctgccggaggcgcactgctggccgaggcacagtccatcaacaacggtggtggcaccgtggcttctggtcaggacatgcagctgaccagcgccgatgcgctgcgcaaccagggcggcctggtccaggccggcaagcacctgcaggtctcggccagcggcctgaacaacaacagtggccggatcatcgccaacgacctgcagctggatacccgcggccaggcgctggaaaaccgcagcggcatcattgccagcctttccggaaacgcagagctgcgcagcggtgccctggacaacacaggcggcctgctgcagtcggcggcagccctcagcatcaacaccgccggacagcggctgatcaacgccggttccaacggcaacggcattgtcagcagtggcacgctgcagatccgcagcggcgatctggacaaccgtggtggcgcggtgtccgccaaggccggtgccgacgtgcaggccatcgacatcgacaacagtggcggcggctcgctggtgagtgcggccgacctgctgctgcgcgcgcagcagctggccaacaccggtggcagcgtgaccgccggtggcaatgccgacatcagcttgcagggcgcgctgctcaacagtggcggcctggtggccgcgaccggccgcctcgacctgcaggccggccgtgtcgacaaccgcaatacgctcagcccgggcaatggtcctgcactggggttgcagggcaagaccctgcaggtgaccaccagcaacctggacaaccagaacggccaggtgattgccgacaacctcgtgctgcaggtgaaccagcgcctggacaacagcggtggcctggtgtcggcggcgctgggctctgatgtccgcgccgataccctggtcaacagcggcggcaccctggtggccggcaggcagcagaccctccgcacccgcgagatcatcggtgatggccggctgatgtcgcagggtgacatgactctggagctgggccagagccacaccaaccgtggcgagatggtggccaacggcacgctgagcctgtccatccagggcaacctggacaacaccggcaagctggccggcgccaacgtcaacatcaatgcgggcaacatcaccaacgcctccaccggcgagatcagcagcatcggcctgacccgccttgcagcgggcggcgcactggtcaactacggcctgctggacggcaacgtcacccatatcaccgctgcgaccgtcgacaacatcggcagcggccgcatctacggtgaccgggtcgccatccaggcgggctcgctcaacaacgtggcagccaacatcggtggcgtggaccgtgcaggtaccatcgctgcgcgccagcgcctggacctcggcgtcggcacgctgaccaacagcggcaagagcctgatcttcagcgatggcgacgccgccatcggcggtggcctgaacggtctgggcgcggtaggcagcgcgcagaaggtcgacaacatcggctccaccatcgaggtcagcggcaacctggacctgtccgcgctggcggtgaacaacatccgcgagaacgtggtcgtggagaaggtcaccaccgtgcatgcaccggtgcggctggaacaacccggctggttcaagaacgccaacaacaacaaccgggatttccgcgctacctcgaattaccagccgtatgagatctactacctcaacccggcggacatcctcgaagacaccccctatgtcactccggatggccagcagatccgcaaggcggtgatccggctgtccagcaacaccagcgcctatgcgttcgcccgcggtggcgtgcatggcgcacgcgcgtcacgtgagcgcctgagcgtgcaggacggcacggtcacgatctactacgtcagccgcgccgacaaccgcaacaatcccgatcagctcggcgcaggcgcggaagatcccttccgcgatctgtccacccgtggtccggggtcgccgccgatcgagtacgtgaccgatacccttcggtacagcaacgcctatggcacctgcaccacgacctgcgtgcagatcatcacctatccggactatgacaatccggaagcgacgctgatcaacatgcagcgtcacccgcaggagaccagcggcaacgagaagacccgcattgccacccgcaccaccgtggaagacgttgtggtttcggcaggaaacaacgccgtgatcaacgcgggcggcaacatgcggatcagcaccgatcggctggagaaccgtttcgccaacatcgccgcgggtcgcgacctggccatcgtcggcctgaaccgcgatcagtccgaggtgatcaatgctgccgagcagctgacccgtaccagcactttcgacaaccagtccatcacctacggtggctcctccagccgctggaaggcggcaccgatcaccgagaagaccggcgcgctgggttcgtcgataaccgccggtggcaagctcaccatcgatgtcggcaacctgcgcaacgacaacaacgggggcagcaaccccaacgccggtggtggcaagggcaccgcgcagctggataccaacggccgcggtgcaggtgcggtcggccccggcgcgggcagcgtgcaggggcccggccagagcacaggacagggtgccggcagcgtggacgcacaggggccgggcaccgctggcgcggcgcagggcgccaacggtggccatcagcaggcggtcgcccagaccgacggcgtgcgcgcggacgcggcgggtgcccagggccccggccaggccggcaacgccggggcgggtgctggcacggcgcaggacatcaatgccgcccaggccgggcaggccaatgccaacggcccggcggcggtgcgcgccggagagcatgccggcagtggtggcaatgccgcagtggatggcaagcaggccacgacgacaaccggtgctgatccgcgcgtggtgatcaccaccagcccgaatgccagtgcacccaccgccagcctgttcaatgtggacgccaaccgtggcaaccacatcgtggaaaccgacccgcgctttgccagctatcgcgattggctcagctcggattacctgctgcagcgggcaggcttcgagccctcgcagacgcagaagcgcctgggcgacggcttctacgagcagaagctggtgcgcgagcagatcggcgaactcaccggccgtcgcttccttaccgggcacgccagcgacgaagagcagtaccgcgcgctgctggaggccggcgccacggtcgccagcgaatggggcctgcgtcccggcgtggcgctgaccgccgagcagatggcacgcctgaccagcgacatcgtctggctggtggaaaaggacgtcaccctggccgatggctcggtggtgcgcgcgctggtgccgcaggtctacctgcgggtgatgccgggcgacctcggcaacgacggcgccctgctggccggcgcggaggtggacgtcaagctgcgcggcgacctggtcaacagcggcacgattgccggccggcagctggtcagcatcgatgccggcaacatccgcaacctgtccggcggccagatcagcggtgcgcaggtgggcctgtcggcgcgccaggacatcgacatcatcggcagtaccgtcaaggccaccgatgccattgcattgaaggccggtggcaacatcaccgtggcctcgaccacctcggaatggaaggaccagggcgaccgcctgtcgcagcagaagaccacgctggatcgcgtggccggcctgtatgtcaccaaccccggtggcgatggcgtgctgtcggtggtggccggcggtgatatcggcctcaaggcagcggagatccgcaatgctggtacccacggcatcacccagctggttgccggtggcaacctggaactggttgcgcagacgctgggccagagcagtgcgctgaaccacgacagccgcaaccacaccagcaacagccagaccacgcatgcggtgacgtcgattgagggcgctggcgatgtggtgctggcggcgggcaaggacatcaacctggccgcaacccgcatcaagaccgatggcggcatggccctgcaggccggtggtgacatcaacagccaggtgctgatagacagccgcagcagtgatttcagtgccggtggcaagcgcagttcgctgcagatcagccagagtgacgagaccgcgcgtggcagccagttgcaggctggcgacaatgtagtgctgagagcgaaccgcgatatcaacctgactgccacccaggttgccagctcggatggcacgctgagtgtggcggccggtcgcgacgtcaacctgctttcggccaacgaaacgcatgacttcagcctggacagctacgacaagaaaaagaagaccctgtcgagcaccaccaccacccgccacgccgagagcagcgacagctacgccattggcaccggcctgatgggcgagagcgtgagcgtcaccgccggccgcgatctgaccgccgtaggcgcggtggttgatgccaccggcacagtggtcctcggtgcgggcaacaatgtgctgatcacttctgcggaagaccatcacagcagtgagtccagcgagagcaggaagaagtccggcttcaccggtggcttctccaatggaactgcttcgatcggctacggcagctcgaagaacagcagcagttctgccgagaagtcgaccactcaggtcggctccgccatcgcctcgcgcgaaggcagcgtgctgatcaacgccggcaaccagctgacgatcgccgcgtccgacgtggccgcaggcaaggacctgaccctggtcggcaaggacatcaacctgctcgcccgccaggatacggtggatacgcaggccagccagtcgagcaagtccagcgggttctcggtgggcgtcacctacgacccggccaaggcgtaccgcactgcacgcgacaacgccaccgaaggcatggccgacagtggcacgatgatgggccggatcacgcgtaccgctgaaggcgtagcggccggcgtgtcggcggccgtgctgccggcgatcacggccggcagccagcgctcgaacagcaaccagagccactccaccagtgacgcccgggtcagcaacctcaatgctggcggcaatctctcgctgatcgccaatggcggctcgatcaccagccagggtgcgcagatgacggccgagggcaatgctgtcctgctggccaccaaggacatcgtgttcgatgtcgcgcacaacaccgagcgcagtgacagcgacagccggggcaagggttggggtatcgccaccaactccgccggtctgccgtttggcaccaacaattcgcgcagcgagggcgccggccagagcgataccatcaccggcacacagctgtcggtgggtggtggtgtacgcatggccaccaccgagggcgatatcagcctgaccgccgccagcatcgcggcggaaaaggacgtcagcatccgcgctgcgggcgacctgacgatccgtagtgggcaggacacggtcagcaatgccaaccgctcggacagcaaggcgatcggcactgtgcagatctccgataccgagaagttctccggctggcatcgcgagcagcatcgcgatgacagcgcgcaggtctcgcaggtggccagcaccgtcggcagcctcggcggcaacgtcaacctcaccgcaggtggcaagtacacgcagagcgccagcaatgtggtggcagcgaaggacgtggacatcaccgctgccgagatcgagctgctgaccgctgacgaaagtggtcactactcgcagagcgacaaggacctgaagatcggtgccttcgcgcgggtgaagtcgccattgatcgatttgctcaacaatgtcgacgccgcccgcaagtccgacgaccgcctgcagaagatgcaggggcttgctgctggtgccaatgcctatcaggccgccagtgccatctccagcatggccggcaagggcggaggcggggcgctgctcagtgccgaggccggcgtcggcttcaagacctccagcagcagtgccgatggcagcagccaggtctcgcgtggttccgccatccagggcggcggcaacgtcaacctgaccagcacccagggcgacatccacgtggtgcagggcaatctgagcgcgggcaacacgctcagtctggattcggccggtgacatcctgctggaagccggcaaagcgcatgtggccgaccgcagcaagagcagcaatgccggcgccgaagtcggcgtgggcgtcgcggtgggtgcgcagaccggtgtgtatgcctacgccgaagcgagtgtgggcagcagcaagtccaatgccgagagcagcacctggcagaacaccacgttgaccggcaagaacatctcgatgaaggccgagggcgataccacccttcgcggcgcgaccgccaccgccgaccgcatcgacgtcaagaccggtggcacgctgaccgtcgaatcgctgcaggacatcgccgagagcatgtccaagaatagccaggtgggtggccgcgtgcaggtgtcgttcggcaccgcgtggaatgccgacggctacgccagtgcaggcaaggcaaacggtagctatcagggcgttggccagcagagcggcctgtttgccggcaatggtggttatcacgtggatgctggccacgtgaatctggtgggcggcgcgatcgccagcaccaatgcaggaaacagcgagctgactgcggattcgctgacgtttaccgacctgcagaaccgcatggactacaaggccacgtcgggcagcatcagcggtggcttcggcaacgggggcaagggaccggctggcaagggcgtgggggccggcgagcagctgaagggcatcggcacgagcatcgtgacgggcaagttggaggggccgacgggagtctcaatgggtggcgggctgcccatgcatgagagcggcagcgacagctcaagcacgcgtgcaacactgaccgagggcaatatcaccatcggcggcaggaagaccacggcggccgaacttggtgtcaataccgatgcggctgcggcacaccgtgcgctggaggcgatgcctgatgccaacaagctgctggccgatcagcaggcgatggcgaacgcagccagcacggtgctcgccaccagcaagaaggtcgccgtggatgtgcaggcctatcagagcaacaaggcaacccaggcgtactacgacagcctgtcaacggaacagaagaaggagttcaacgcgctgagtgcggaacaacgcgatgcggtgctgacggcaaacagcccagcctacgaaaatgccaagaagtggggcacgggcggcgaatacaaccgtgcattgaacgcggtgacgacagcgcttgtgggaggcgtagcgggacaaggtgctggtcaggtcgcgtccaatgcactggcgccctatgccgcttacttcatcggcagcacgcttgacccgaaccacggcagcgaccccaatgcgacgctgcaattgctgtcgcatgcggtgttgggtgcgctgctggcggaagccaatggtggcagtgcggggaccggtgccgtgtcggcggcaggcggcgagttggctgcgaaggtgctgaccaatacgttgaccgggggagatccttccagattgagtccggaacagaaggagatggtgctggctttgtcgcaggcggtgggtgcgctggcgggtgggctgtcggggcaggatctggctgggatcgcgttgaatgcggggattgccaagaactcggttgagaacaacttccttgccgaggatcaggctcgagtaatgaagcagcaactcgacgagtgcggcagcgacacgtcatgtcagaagatggtgcgtgacgttgccaagcaactgtcggagcgaatggactatgagctgctctcggtttgtacagcgaactcggcgagccctgcgtgtcaggcgtttgtgaatgcggccgtttcctacaagtatggctcgtggcccggagagcttggactgttcgatgatctcggccgtagcagcgaggcgctttcctcgttcgctcactccatgaatggacgtgcctatcgcgagctgatttttgagaacggggggctccagcccgtctatatcctgcctcaggaatatacggtggccgcgctggcgcagtggaccgccggtgtcgacacttccatcgatcaatatgggctgtggtccaaggagactgcaggcgaagtaggccttgggctggcacagttgctggcacgacgctatggaatggtcaatatagtcggcggcaacggaggctttgggagcggacggagtgatgggacaccgaatacctcaagcgggacgcaagtggatgcggagaagtccgcactggagagaatcgcaggtcgcccggcagggcccgatttgtctctcaaacaacctgaatccgttcttcaggcgtactcgcaaaagcgaattgatgacctcgcacaccaatacaatagcaagtcattggatcctaaggattttcagctgaatcttggttcaaaggtcttgaaggccgatgctcaagtcagtacgggtgctccggtttatattggtgcaagcacatccgatgtcatgctgtatttcagacagctgactggaactgatcgcatgcctgtcgcgaaggtcgtacctggaaagggtcttctttatacggcaaccacgagctctggtgcaaagataactcttagagatttttcaacgagcgcgcagaagactggtgcgagttggacaattgatgtgcaggataaatccataaataatggaaagcgagtagaggtgaagttcaaatga

SEQ ID NO: 498614 - DNA, 345 bp, Stenotrophomonas maltophilia
atgaaagatgggatttattgtgcagtggtgacttcttcgtttgggttatcaatgggtaccgtctggcagcacatgacgatggaaatgggaggtgttgggatctcggaaagaaaagacgcgttcttcgagttgatgggtcgtttgttgagggaagggaaagtgaggcttgcaacggacggggtgttcttgcaaggcgactggagggagcagctgacgctaatctcaaacgcttggcccgaaaatcctggtgaagatgatatcgatggattcggcctctggttcttgaccgatgctccggcgggtctggtttggatcggcgcagatggccgtgaacactggacgtag

SEQ ID NO: 498615 - DNA, 270 bp, Stenotrophomonas maltophilia
atggagtttgatgcggggagtgtcgcttttgagcagcagacggaagagttcttctcgatgcttaggatgttgatgcaggaagggaagctgaagcttgcctcggatggtgtcttcgccgatggcgatatcgatgcgcaactggatgttttgcgtcacgcttggcctgctacaagagatcaggaagatctcgatgaggatggattctggtttcttacggatgcaccgtttggattggtttggaccgcgcctgagggagacgtctggacctga

SEQ ID NO: 498616 - DNA, 324 bp, Stenotrophomonas maltophilia
atgaactacgccgccttgaggtcggacaattatcgggatgcatttgttctgatgaagtgccgttcctggcccagggcagagcagaaaaagctggccaactactatttgcaggctgttccttatgcgagctcatatccctacgaggtctttctttcgttcatgtcggtaaggtccttcttgagttgtcttgatgcttttattccagaggccggtgcctatcgtgaccttctcgcctaccatcttggtccagttctggatcgagtggggaagaatgattctgatcggatgttgattgcggagttcatgggtgagctcagcgggtag

SEQ ID NO: 498617 - DNA, 393 bp, Stenotrophomonas maltophilia
atgagcatttcgctgtttcttgaagtcgaggttggttccaaactcgaagccgtgcaacgagccttggattcgatccaggccgagtattccgatggtctggacaagctgcaggggtatcttccagcgtccaacacggggttcgggttccgcatcgttgagccgccggaggctgtcgtcgcagaagggctggaggccgagtggcgcgtggggctgctgggttcgttccatttccgcgcaagcggatttgaatgcgcttgggaggaaatttgccgtttcatcaagcgctatgctgcggcatgtgaatcgcggttcgtgctttccttccagttcgagagcatctatgccgcaagatttggacaggatctgatctttccgggtcctgctgccccttag

SEQ ID NO: 498618 - DNA, 243 bp, Stenotrophomonas maltophilia
atgacccggttgcgaaacaggcgcttgaacccagcagatccaaggccgaacaagaccacgccaccgatcagcccaatccaccatgccaggacggcgcccgaccagattccgaaggaaatggaacagaccaagaccaacaaagaagcccatccggggctgccgtactcaatcctggccttgcacccccggcacacgatggcaccgcgtggcacgtatcccatgcacatcgggcagatcatctga

SEQ ID NO: 498619 - DNA, 219 bp, Stenotrophomonas maltophilia
atgctggacatcctagacatcgagttgcccaagtggctgcccatttccctatccatactcctgtccctgtgggtaggcggcatgtatctcaatttccaccttgagctgcacgaccggcgcgcttgcacaggactggaggcgcttcaaaacgactctttcgcgtttgagaagagactgtcccaatgcctgaaggaggggcgcacgttcccggctagatga

SEQ ID NO: 498620 - DNA, 1200 bp, Stenotrophomonas maltophilia
atgaagcatcttcgtcttgccggaattgctgcagctgcgctgctttcgttctactccagccatgcgctgtgttcttcggagttggaaaacgaggacaacagcaccccaatagctacatactcaaggatgttcggggtatccaagattgaagctgaggcgcgtttcctcatcatggcggaatcgaccaaagttcaagagatccttcgaacgaagtatccaacgactttcggtggcctgtatgtcgagcaccagccccaattccgtgtcgttgtgcgtttcacagattccccagcagaaagtctgcgcgcagtgacagcagacccagccttcgttgccctgccagcatcccattcactggctgaacttagcgcggctcaacaagccgttggtgaggagctccatcgaaatgggatcaacttcctctcacgtctggacttggagcattcaacggttgaattttccgttgaagatccgcaggcggtggaacagcccatgcgttccctacggtccgaaattccgttcattcgattcaagaaaaccactggcttcttgcagcccactctactggaaatttcgctgagttctgcacagaagctcaaggagccaccgggatcctactgcaccagcgggtttggcgttaagagcggcacgactcgtggcatcactacggcggggcactgcaataacacgttgacgcatagtggaaaccgtttgacttttcaggccgaaaaaaaatcgggctcagaggacattcaatggcacacctatccagacacgagccggtatcactacgtcccctcccaccgcgtcgaggccggatctcagagccgtattatggtcgccgtaaggccgcgctcagggatgaaagttggggacattgtctgtaaatacggaaaatcaacgtatgagacttgcggtctcatcaccgatcttaaatttcaagcaacctttgaaaacgctatcggagagttcgttcgggtggttagcccggaaggccgcaccatgacagattttggtgatagcggcggccctgtctatgggacgcagaagcctgacgggcgcttctacgacaccgcttacgggatggttcatggccggggcaattcagggacagagttccacaaagacctcttcttcatgcctaccgactatttcgccagcttgggcctgcagatccttaccactgcggatgatccgtaa

SEQ ID NO: 498621 - DNA, 291 bp, Stenotrophomonas maltophilia
atggaagagttgccgaagcggaagaagaagcctggccgcaaagacggcttcccttggaagagcatcattgccgtcgtgattatcgtcggcgttgtccttgccgtaacggaaatggggcgggttgaccgcgagtaccgcgcgcaggccaatcgccaagccttcggcgcaatgcaaagtgcgctccatggggataaattcgtggctcgcccggctgcggacacgatcccggccagcgatgcagatcagaacgatcagaaggccgaaacagacccctccagcaacgtgaagtga

SEQ ID NO: 498622 - DNA, 390 bp, Stenotrophomonas maltophilia
gtgaaagcaatacccctatctctgttgcttgcgacccttaccgcgattagcttcggcgccagtgccgctcgaaacagctcggtcaactacgtttactttgatgtcaatggcacgcctgtcggtcaacgcgcatacttctgcaacggcaaaaggttggagggcggcgacaccactaccccgtactacctgaaggtcactgatggctgcgatgggagagtaatctgcacccctaagggtcaatgccatatcggcgacgacccatcgcacgcagtcctcctgctcggcaacccgccgttcaccaaggaagaagcttgtcagttggcgggcgagatggtctgcctgtccatggaaccatggatcttgtacgagttcggttggacacccagctga

SEQ ID NO: 498623 - DNA, 2046 bp, Stenotrophomonas maltophilia
atgtcccagccgttccgctcccgttccgcgcgcctgccgcgcacccgcctggccagtgccctggccactgcctgcctgctggccctgcccggcctggccgctgcagaggccagcgccgatgcctccaccaaggacctggataccgtggtggtcaccgcctcgggcaaccagcaatggatcaaggatgcgccggccagcatcagcgtgatcagccgcgaggacatcgcgcgccagccggtgcacgacctggccaccctgctcagccgcgtgcccggcgtgaccggtggcctcagtgcggttggcgagcagtccaagatcaagctgcgcggcatgccgtcgaactacacgctggtgctggtggacggcaagcgcatgggcagctcggcctcgaccaactaccggccggacctgggccgccaggacctgaactggatctcgcctgaccagatcgagcgcatcgaagtggtgcgcggaccaatgtcgtcgctgtatggctccgacgccatgggcggcgtgatcaacatcatcacccggcgcatcggtgatgactggagcggcagcgccacccacagctatacccgcccgggcgatggcaagcgcggcgactcccagcagatcggtgcgacgttctccgggccgctcggcgagcgcttcggcctgcgcatcggtgccaacagcatgcgccgcgattcggatcgctccaatggcggtgtctacggcaacgcgtatgcaggcgagaaggaccgcaatgtcgatgcgctgctgcagtggaaactgagcgacgcgcaggaactgtcgctcgaagccggccatggcgtgcagcaggccttcatcgacgcttcgctggaaaagcaggatgaaggcgcctggggtgccagcgaactcaagcgcagctcgctggcgctcaaccacgatggcaagtggagcttcggcaattcgaagatcagtgcgtactggaccgagtacaggaacgacatcggtgctaccggccgttccgaagccaccgatacgatcatcgagggcagcctgaccacgccgttcaccctcggcgttgaacaccagttcgccgtgggcggccagtggaagcgccaggagctgaccaacaccgacaccatcggccgcgcgccgatcgactatgccggcaatgccgtcagcggctccgatctggaagtggatacctgggccctgttcgtcgaagacgaactgaagctgcaccgcaccctggcactgaccttgggcgcgcgcctggatcaccatgagaaattcggtggccacgtcagcccgcgcgcctacctggtctggcatccggccgagcaatggaccatccgcggtggcgtttccaagggcttccgcgcccccagcctgaccgagaactccgccagcgccgccacccagtccggtggccgtggctgcacctcgctgattccgctgggctatacccgcggcggctgctacatggccggcaatccggacctggacccggaaaccagcaccaaccgcgaaatcggcatcagcttcgacaacgacctggtcgatgccggcctgacctacttccacaccgacttcaggaacaagatcgagtacgcaccgctgggcaggttcaacggcatctggtggacgcggatgagcaacgtgcagcgcgcacgcaccagcggcatggaaggcagcttcaatgtccgcttcggcgagcactggcgctggcgcacctcggcgacatggatgaaggaagccaggaacctgaccaccggccgcaacctgatcgatacccccgaattctcgggctattcgtcgctggactggacgcccgacgcggtgttttccagcagcctgtcggcgcagtacaccggcaggcaggccggcacggcgacgaccttcctcaaggcctacacgctgtatgacctgaccgcggcctggaacgtcaatgaggtactgaccctgcgtggcggcgtcagcaacctggccgacaagaagctgtatgcggaaggctccaccgattacttcgtggccgggcgcagctacttcctcagcatgaccgcgcggttctga

SEQ ID NO: 498624 - DNA, 462 bp, Stenotrophomonas maltophilia
gtgatcgccagcgcgcccacgatccgccaggccacgccggccgatgcggctgcatgggcgcagttgcgtctcggcctgtggcctgatgccgatgatccgctggaggagctgacgcagtcgctggcagatgccgaaggtgctgtgttcttggcctgtgccgcggatggcgagacggttggtttcgctgaagtgcgcctgcgccatgactacgtgaacggtaccgagtcttcgccggtggggttcctggagggctggtacgtgcagccgcagtggcaaggcagcggcgtcggccgcgccctgctggcggcggtgcaggcgtggacgcgcgatgcgggctgccgcgaactggcttcggacagtcgcctggaagacgtgcaggctcacgccgcgcatcgggcctgcggcttcgaagagaccgaacgggtcgtctatttccgcatgccgctggagccatcggcgtga

SEQ ID NO: 498625 - DNA, 732 bp, Stenotrophomonas maltophilia
atgaaagcgaagcaagctccactcttctgcctgctgctgggcctgtcgatggccgctgccgtgaccgccagggaatgcccggtggaggccccgcggcagatcccgccaaccgtcctgaccggaggcttcttcgatgcccatccggacctgttctggcgcagcatggcccagcgggccgaacgggacagacagcccgccagggcgctggactactacaagcgttcggcgcgctacgccgacaaattctcccaggccatggtggcgcggctgtaccaggagggcctcggtacccgggccgatccggtgatggcctacatctggatggaccttgccgccgagcgcatgtatcacgacttcctggtgctgcgggagcactactgggcacgcctggacgcactgcagcaggcacaggcgatcgagcgcggccagcagatctatgccgactatggcgaccgcgtggccaagcctcgcatggagcgcgccctcagggacggccgccagcagatcaccggcagccgcctcgggtacgtgagctccggcttgatcgtcgtccagcgccgcggcaacgagcagggcatcgtgacgccgggcagcatcgtctacgacaacgactactggcgcgccgccgactactggtgcctgcaggacaactactggcgccccgcgctgacccccagcgtcgagataggacggccggacgcggtccgcgacgacaaggcggtggacgactag

SEQ ID NO: 498626 - DNA, 1539 bp, Stenotrophomonas maltophilia
atgacgcgactgcagacgcccctggagacaggggcgtttttttttatgcctgccggcctggaccgctatgatcggcggatgctcgccctcttcgactccctgcgtcattggctcgacggcatcgcccaccttggctcgatcctggcggtggcctacctgctgtatctgttcgcgctggcgggctggatcatgctgcagaagcgtgagccggtcgccacgctgagctggatcctgtcgttggcgctgctgccctacctcggcttgttcatctactacctgctgggcccgcagaaggtgaagcggcaacggctgcgccgcggacgcgcacgttcgggcatggagcactacagcgatgtctgcccaccggatgccgactgcaccgagctggccaagatcgcgcaggccaccacgggcctggcgccgagcagcgcgaccgaggtgacctggctggtggatggtgccgctacctacgccgctctgttggaagcggtggcgcaggctcgcgatcacgtgcacctggagtactacatcttcaatccggaccatgccggcaccgccctgcgcgacgccctggtcgagcgcgcccgtgccggcgtgcaggtgcgcctgctgctggatgcagtgggttcttccgccctgcctcgccgcttcctgcagcccctgatcgatgccggtggcgaggcggtctggttccatccccggcagctgctgaagccgttcaagcggccgtggttgaacctgcgtacgcaccgcaagctggtgatcgtcgatggccggctggccttcaccggtggcatcaatatcaccgacgatgaagacgagagccgcaagccgaacgcctaccgcgacctgcacatgcgcatccgcggccacgtcgtgcgcagcctgcagctggtgttcgccgaggactggctctacgccagtggccaggatccctcgcgcatggacattgcccgtctgtggccggccgacatgccgctgcgcggcgatggtgcgatcaacgcccaggtgctggtctccggcccggactcgggctgggaaacgatccaccgcctgcacgtggcggccatccaggaagcacacgagcgcgtgtggctggtaacgccctacttcgtgccgggcgaagcggcgcggatggcgctgacttcggcggcactgggtggactggacgtgcgcctgctggtgccgaagatgagcgactcctggtttgtcacccaggccgcgcgctcctatttcgacgaactgctgcacgccggggtgaagatctacgagtacggcccgcgcatgctgcataccaaggctttcatcgccgacgacgatgtctgcatcgtcggcagcgccaacttcgaccaccgcagcttccgcctgaacttcgagctgtcgatgatgatcagcgaccgtgaccgcgtcgccgctctggccgggctgctgcagggcgagtttgaccgcgccacccgcgtgcacgaccaggctggccgttcgctgtggctgcaccgcctgcccgaggccttcgcccggctggcctcgccgctgctctga

SEQ ID NO: 498627 - DNA, 738 bp, Stenotrophomonas maltophilia
atgccgcggacacccccgcaaccggacccaccccgccttcgacagatttccgcgatctgtggatccacgccatgcgtggatgaatctctgtcagataacgaaatcgattggggccagatccgttttccaaaggaaaacggatctggccccaggaccccatgtcgttccaggatcagtccaaccgtcaccgggaaactgtcaaaggtggggcggtgtgggctggcaggaccgttggcgccatggatggcgccatcgagccccaggggtgagggcgctttgcttgcgaagcactgcttcgcaagcgcccgaacgcacagccgccagcggctgggccggaccccggaagggggtttacggcgtgtcctgccagcccacaccgccccgccaaaccagcagaaaaccagagccgctttggctttggctttgggttgttgccggccagcggccggcacaccgcgggtgcagggcgcagccctgccgacccaccctcccctgcgcacgaaaacgatttcactgttttcagcaaaccgtcatcccttcgccacgccagtaccatattgcggagcagcatgcgcccacgggcgacccatgctaaaaaacgcccgcccatcgcttagatcgatccaagacgacattgcgatggccgggagttgggggagcggcaacaggacgtaccaggccacgcgcacggtgcaactgccactgcatggcgatagcgacaatgtcacttcaaattag

SEQ ID NO: 498628 - DNA, 3078 bp, Stenotrophomonas maltophilia
atgggaatgaagcattcaacacgtacgcatggccaggacgcattgtcgctggccgtcgcgctggccttggccgccgccgtcgttccggccggcgccgccgcgcagcaggcaaccaccagcggctcgcaggaagccaccaacctggacagcgtccaggtcaccggctaccgctacgccatcgaaaagagccttgagcagaagcgcgacgccaacgccgttgtcgaagtgatcactgccgaggacgtcggcaagtttcccgacaagaacgtggccgacgcactgcagcgcgtgcccggcgtggtcatcacccgcagcggtggtgaaggcaagagtgtcagcgtgcgcggccttgcgccggacctgaccctgacccagttgaatggcaactacgtggccacgtcggaaaccaacgacgaagccacccgttcgttcaactacaccctgctgccgtcgaacatgctgtccagcgccgagctgttcaagtcgccggaagcacgcatcgacgaaggcggcatcggcggcacggtcatcctgcacacccgccgtccgctggacatggagtccaactcgggcttcgtcacgctcgagggcacctcctccgatacccaccacgatatcgacccgcaggcctcggccctgtattcgtggcacagcaaggatgagcgtttcggcgtgctggtcggcgtgacgcagcagaagcgcacgacccgtaccatggaagccagcaccgaggactaccagtggtacggcgccggcaaggcacgcgacgcctatggcaacgtgcagcagcaggacggcatccactactggtggggcaagtccggcttcaacaaccagaccggcggcaactacagcgacttcttcatgccgacctcggtcaacttcgccgtgaaggaagaaaagcgcgagcgcaagggcggccagctgaccttccagttcaagccggtcgacaacgtcacgatgaccgccaactacttccgcttcgagctgcagggtgactacacccagaacatgctgaagattccggaatggagcatggcccgcttcaacggcgatggaaactgggccggcggccgcctgctcaacggcctggatttcgaccccagcggcaacaccgtcaccggtgcccagttcgaaaagctggccggaaagacctactactgcagcgaagaccaggccaaggccgccggcctcaagcccggcggctggggcccggacgactgcacgattccgacaccgcagctgaccggtggctacagcaaggaaaaggcgctgtcgcagaccgccgacctgaccatcgactgggacatcagcccgctgtggaaggcctcgttcaccggtggccgcacctggtctgaaggtggtccgtcgatgaacttccgcatgtcggccaagccgcgccgcaaggtcggcaacgactacctgtccggtaaccagtacagcgcatgggacctgaccggcacgccgtctgccaccttctcgcccgacctgcagcagcagctgatgaacggcatcgccgaagtcgacaccggctcgaccgattcgtcgtggaagcgcaccgaggtcaagcagaactacttccaggccgacgtgaccaagctgttcgagtccggttggctggattcgatccagttcggtgccaagtaccgtgatggcaaggtccaccgcaacaccggcaacacctactgggtatgcccgggccgtgacccggccgactatgacaacagccgctaccagagtggctgcgatccgactgccggcgatgcgcagcccggcttcttcctgtcgaacccgatcagcaacattgccggtggcttcaatgccaacgtgttcccgggcatcaactacccggcgtacatcgactatctgaacaagacctacggtggttcgcacaaccgtaccgaggaagacttcgtctacaacgtcaacgagaagatctactccggctacttccaggccaacttccgcaccgagcgcctgcgcggcaatgtcggcgtgcgtgtggtgcgcaccaagcagttcgcgcagtcttccgactcgatcgagaagttcaacgactacttcctggacaacgcgtccggcgcgccgatggcgtgcaccgaccccgccgctgcggcctacccgacctacagctgtgagagcggcttcgtgcgcctgccgcatgacctggcgcagagcaagacctacagcctgatcggcgtggaccgcacctacaccgacgtgctgccgagtttcaacattgcatgggacatcaccgacacgctggtgctgcgtggtgccgcatcgaaggtgatcgcccgccctggctacaccgatatcgcagcaccgggcgcgctgagctactacagcgaggagtacgtcaatgatcgccgcgttgccggtggcgcatcgaccgcaggctgggtcggccagggcagcaacaagcagctggagccgttcaaggccacccagttcgacctgggcctggagtggtacttccagcctggcgcggtcgccggcgtcagcctgttccgcaagaacgtggacaacttcaccctgccggtggtgcgcgacacgcccatggtcatcaacggtgaagcggtgaacgtgcagcgctacgagacccaggccaatggccgcgatggtgtgtcgcagggcgtcgagctgtatggccagtacaccttcgatttcggcttcggcgtgcaggccaactacacctacaacgacaccaacctggcttccattgttctggacgggcaggaaatcggctcctcgccgctggtcggcagcgccaagaaccaggccaacgtgacggtcttctacgagaacgagaagttcctcgcgcgcgcctcgttcaaccgtcgcggccaggtggtcggtgggctcaacaatggcctcaccgtctacaccgagccgtatgaccagctggacctgaacgtggcctacaacctgaccccggactggaccctgaccgcctcggtgatcaatgccaccaagtccgagcagcgcgtgcacctgggaagcgacaccaaggcacgcctggtctccaatacctatgcaggccgccagctgtacttcggcgctacctggaagttctaa

SEQ ID NO: 498629 - DNA, 468 bp, Stenotrophomonas maltophilia
atgttcatctggaaggcggtcggacccgagggcggcggcatcgacgatttgctgggcggcgtgacgctggcaccctctgctacaggcgtgttcgtcgacgcacgggtacatcggatcggggagaagcgctttcgcgcgctctatcaggtgttcgattcaaacgcttccaacccgatggggcgctgtggcgcggggcgtgagatccatctgttcgtctacgaattgaccctgccgaagcccattgagcgcggcagggtattgatcagcagctgccttgagaccctgtctctggcgagccagaactcagggcgaccccacagtgaatccgacttttcctcggtcatctggcagggcgacgggttcaccatcgagtggtggggtatcagacacagaggcgatgcgtcgagccgctacgccctccgaaatggccacttcgtcccgactcgatcgggtgaggggaatcgctga

SEQ ID NO: 498630 - DNA, 696 bp, Stenotrophomonas maltophilia
atggccgcgatcaaagacattcgacacagagccagcggctacacctacagcgattacatatatgcacccgcaaagctcgacaacaaacccttcgctgcgtactcggacaagcaggactcaattcctatcgcactggaggaaattgaaacaatctctatcaagaagatgagcgacggatctggcagaaatgccctgatttgcaatgcaaaactcaggattgaaataccggccgcagtcgcggacataatgaagcttaatcagcaccaaaagatgcgcgtcctggataatgccaagggaaaatttggcgacaggagcgtccatttcgacaacgtcgagttcagagcacatgagattgatggcggttcaatcacagcagacgtttcgaactacaacgggccgtggtcgttacatgtcatcacgacacttgccgtcaatggccggcacctgatgctggaggacgcactcaggcaatatcgaactcaggacgccaacctcaacttgatctgggagaatttgccgaagtatcggcaggcgactgaacgtgactcccagcggagctggatcaagtcgaaaacagataaatgcggggagatcaatctcgaaccatatgattcagaagacatctttgatcgcatcgacatcatcgaatgccacgcaaaaatgacaaagtctcgagtcttcgagatgcgtagatag

SEQ ID NO: 498631 - DNA, 1278 bp, Stenotrophomonas maltophilia
atgatccgcgacacttccgcccaggaccagatcgtttcctccgctccggccagcgctccgcgcgccaactggctccgttaccgttggccggcgctgggcacgatcgccctgctcgccggcatcggctgggccgtgcacgcctggtccaacgccagccgctccttcgacagcagccgcgtgcgcatcgccgaagtgaagcggggcgacctggtccgtgacatcgccgccgacggccgcgtgatcgccgccaacagcccggtcctgtatgccatctctgcgggcaccgtggacctgaaggtggtcgccggtgacgtggtgaagaaggggcaggagctggcggtcatcgacagccccgaactgcgcagcaagctggcccaggaacaggccaccctggccggcctggaggccgaggccagccgtgccgcgctggacgccaccctggcccgcgccaagtcgcgcaaggaaaccgaccaggccaccatcgaacggcaggccgccgaccgcgacctgcagcgctaccagcgcggctacgacggcggggcggtgccgcagatcgacctggccaaggccaaggactcgctgaagaaggccgacatcaccctggccaacgccaccaccgatgcgcgcctgcagagccagggcgcggacctggatgcccgcaacaagcgcctgctggccgatcgccagaaggcggtggtggccgaagtacagcgccaggtcgatgcgctgacgctgcgtgccccgttcgatggccaggtcggccaggtgcaggcggtgcagtccaccaacctggccgccaatgccccggtgctgggcgtggtcgacctgtccaagttcgaagtcgagatcaaggtgccggagagcttcgcccgcgacctggcgatcggcatgccggcacagctgaccggtggcaacggccagccgttcccgggtgagatcagcgcggtgtcgccggaagtggtcaacggcgaggtcaatgcccgcgtgcgctttgccagcgcgcagccggaaggcctgcgccagagccagcggatgtcggtgcgcgtgctgctcgatacccgcaggaacgtgctcaaggtcgagcgcggcccgttcgtcgaacagggcaatggcatggcctacgtgatggatggccgcaccgccgtgcgccgtccggtggaactgggcgtcagcagcctgggcgaagtggaaatcaagtcgggtgtgcagccgggcgaccgcatcgtggtctccggcagcgacctgttcaaggacgccgaacgcgtctccgtcaactga

SEQ ID NO: 498632 - DNA, 1299 bp, Stenotrophomonas maltophilia
atgttcgcctactacgcccgattggcggcgcgcagtttccgccgcaacaaggtcctgaccgcgctgatggtgatcgccatcgcgctcggcatcggtgcctcgatgaccacgttgaccgtattccacgtgctgtccggcgacccgattccgggcaagagtgaccgcctgttctacgtgcagctcgatgccgcgaccggcgcctatgtcgccggcgaggaaccggaaacccagctgacccgcttcgacggtgaagcgctgctgcgcgaggccaagggcgagcgccaggcgctgatgagcggcggcggcggcaccatcgaaccggacaacagcacgctcaagcccttcagcatcgacacccgctggacctcggccgatttcttcccgatgttcgaggtgcccatgcagtacggccgcccctggacgcgcgaggacgatgaaggccgcgcacgcgtggtggtcatctccaaggcgctcaacgacaagctgtaccagggcgccaacagcgtgggccgcgacctgcgcatggaaggccagagttaccgcatcgtcggcgtgatgaaggaatggagcccggagccgcacttctacgacctgaccaccggcagctacggcaagaacgaagacctgctgctgccgatctctacctcgttcgacctgaagctcggcaacaacggcaacatgaactgcttcggcgaaaaccccgacggcaacagctactcgctcaatgccccgtgcgcgtggctgcagtactgggtggaaatggacccggccaaggccggcgactaccgccgctacctggagaactactcgacccagcagcgcgaggccggccgcttcaagcatccgccgaacgtgcgcctgcgcaccgtgatggaatggctggacttcaatggtgcagtgcccagcgacgtgcgcctgcagctgtggctggcgctgggcttcctcggtgtctgcctggtcaacacggtaggcctgctgctggccaagttcctgcgccgcagtggtgagatcggcgtgcgccgtgcactcggtgccagccgtggccagatcttcctgcagtgcctggtggaagccggcgcggtgggcgtggtcggtggcgtgctgggtatcggcctggccctgcttggcctgttcgcggtgcgccagcagccggtggaatacgcaaagctggcccacctggacggcaacatgctgctgctcgcgctgggcctgaccctgttcgccagcctcgccgccggattcctgcccgcctggcgcgcgatgcaggtcaccccggccatccagcttaagtcgcagtaa

SEQ ID NO: 498633 - DNA, 840 bp, Stenotrophomonas maltophilia
atgacgacgctcgatgtaccccgctacctgcagcgcctgcagctggatgcaccgccaccgcggaccctggccggcctgaccctgctgcagcagcgccacaacgcactgatgcccttcgagaccctcagctgcctgctgcgcgatgcggtgccgatcgacctggacagcgtgcagcgcaagctgctcgacgagcgccgcggtggttactgcttcgaactcaatggcgggttgctggcgctgctgcaggcattgggcttcgatgcgcagccattgagcgcgcgggtactgctggccgcccaggacggcgaactgaccgcgcgtacccacctgctgctgcgcgtgaacgtagacagcgacgactggctggtggatgccggtttcggcagcctgaccccgaccgtgccgctgcgcctgcatgatccgcagccgcaggccacgccgcacgaacgctatctgctgcagcgcctgcacgacgagggtgatttcgtactgtcggccgagtccaacgatggttggcgggcgatgtatcggttcgacctgcaggcgccggcaccgatcgacaacgtggtgggcaactggtacgtgtgcacccatcccgactccagtttccccgggcagctgcgcgcgtcgctgaccgggccggactggcgccgcaccatcggcagcggcaactacaccgagtatcgccccgggcaggcaccggacaagcgcccgctgcatgatgtgggtgatgtgcgtgccgtgctgcaacagcgcttcggcatgcagctaccggacgacccgcgactggacccggccatcaatgactggctgcagcgctcgcgcgccgcgaccttgtag

SEQ ID NO: 498634 - DNA, 1329 bp, Stenotrophomonas maltophilia
atggcgacgctcgccgcaaccccgctggccgcggaagggcgcccctggcggcgcgccctgctgtggctggccctgctgggtccgttcttcttcgcaagctatggcttcgccaactggatggccggccgccacgccaccctgccggtgatggcgttcgcgtgggagacacgcatcccgttcgtgccgtggacgatcgtgccgtactggtcgatcgatctgttctacgcgatctcgttcttcctgtgccggcgtcggctggaactggaccggcatgcgctgcgactgttcagtgcgcaggtcatcgcggtcacctgttttctgctgtggccgctgcgcttcagcttcgagcgtccggagatcgggggtgtgttcggctggctgttcgatgtgctgctgggcttcgacaggccgttcaaccaggcgccgtcgctgcacatcgtgttgttgatcgtgctgtgggtgaagttcgcgcagtacctgcatggcgtgtggcgcgggctactgcatgtgtgggcactgctgatcggcgtctcggtgctgaccacgttccagcaccatttcatcgatatcccgaccggcctgctggccggttggctgtgcgtctggctgtggccggagcagggcacgccaccattgcgggcctggcacaccgcgcgtgatgcgaggcgttggcgattggcagcgttgtacctgttgggggccgccgtattgctggtgccggtggtgcttctgcgtggcgccgcgttgtggctgctgtggccggtgacgtcgttgctgctggtggcgctggcctatgccgggctgggtacagcggtgttccagaagcgcgccgatggccgcctgacgatggccgcgcgatggctgctggcaccgtacctgggcgctgcctggatcaactcgcggctgtggacgcggcgtgcgccgcagccggtgccggtgatggacggtgtgtggctggggcgcattccctctgaggcattgccggcccccctggtgggcgtggtcgatgcctgtgccgagctgtcctgtcgcgcgcagggcgccgcgtatgccagcgtgccgatgctggacctggtggtccctgcaccggaacagctgcgcgaagcggccgaggccatcgagcgcctgcatgcgcacggaccgttgctggtgtgctgtgcgctgggctattcgcgcagcgccgccagcgtggccacctggctgctgcgcagcggtcgtgcggccgatgcggacgcggcggtggcgatcgtgcgtgctgcgcgccctggcatcgtgctgggtacggcccatctgcgtgccatcaccgacgcggcaggagtgcgcgcatga

SEQ ID NO: 498635 - DNA, 483 bp, Stenotrophomonas maltophilia
atgagaacgtatgactgtattcagccctatggaccctggagtcagaccgaggtggcgtgggcactggggcgccatctgattgactttgaggttgtgaagcactgcgcgtcggagcagaaggaactggaagagaagttcaatctgaacgccttgattgaaagacttgaaggggcttttcccgatgagcgtaatagcgtagctgcgcagttggcggcattcgataagaactcaaacgaggatgagattctcagaagatggcttgttgcatttctcgcggacgcttacgccaagcgcgatgagattgctgatccgctcggagaggttgagaggatctacgctgattttgattacccggagtctctggagagctttgtcaggtacatgccagcttctgatgggtatgatccgactgcgcactcacatgagcagaatgttgcgcgtctcttcgagaactggaaacgttatcttgactcggcgaaatag

SEQ ID NO: 498636 - DNA, 1002 bp, Stenotrophomonas maltophilia
atgcgcaggttcgggggaactgcaggcggtgtgtcgacccgcttcggggcatttgaagatcgaactcgcaagcttggtgttataggcgcctggctgtgctgcttgctgctgatgggccttggcctgtcaccatccgcaatcgcccagacaacgatcacatacattcacactgatgccctcggctcggttgtggccgaaagcgatgccaacggcaacgtcatcaaacgatatgactacgagccctacggggccgtggtaggcggtcaggtcacggatggacctgggtacgccggacatgtgagcgactcggccacagggctgagctacatgcaacagcgctacatggatccacaactgggtgtgtttttgtcagtggacccagtcaccgctcaccaaaagccagttgagcagttcaataggtatcggtacgcgaacgggaatccctacaggttcgtcgatgcggatggaaggcaggccgcagagcgattcgttgagcggcatcggagggatattgctgccggaaatggcgccgtatacgagccgatgagaccggccgcaatcgctgttacagcggcaatggctgccccagtgctgatcgaagctggcatggttgcgatggccaatccaagtgtcgtatcagcagctaccagtatcgctgctgatatcgcaggagttacaggtgccggtggagcaggtgtggcggcatccaaagttctgagtgttgaaggtcgggcacttttgaattcccgacctgtgggaagtgcactcaaagccgacgctgggcacaattcggcgaccttcatgcgagagaccgctgcagaagcgggtgttcatactccattgacagggggtgacggcgtggtccgcactctgactcagctgccaggtgaactcaatggaaaggccggtcgatttgaatacatagtcgacaaggctggcgacttgacccatcaaagatttgtggaaggtggcagcatgaacggaataccaaacaagaagtga

SEQ ID NO: 498637 - DNA, 1728 bp, Stenotrophomonas maltophilia
atgagcgacaaaccgctgaccgatttgaccttttcctccttcgagctgcacccggccctgcaggccggccttgaaggagccggattcacccgctgcaccccgatccaggcgctgaccctgccggtcgcgctgcccggcggtgatgttgccggccaggcccagaccggcaccggcaagaccctggccttcctggtcgctgtcgtgaaccgcctgctgacgcgtccggcgctggccgatcgcaagccggaagatccgcgtgcgctgatcctcgccccgacccgcgagctggccatccagatccacaaggatgcggtgaagttcggttccgacctgggcctgcgcttcgccctggtctacggcggcgtggattacgacaagcagcgcgagctgctgcagcagggcgtggacgtgatcatcgccaccccgggccgcctgatcgactacgtcaagcagcacaaggtggtgtcgctgcacgcctgcgagatctgcgtgctggacgaagccgaccgcatgttcgacctgggcttcatcaaggacatccgcttcctgctgcgccgcatgccggagcgcaccacccgccagaccctgctgttcagtgccaccctcagccaccgcgtgctggagctggcctacgagcacatgaacgagccgcagaagctggtggtcgaagccgagaccatcaccgccgcgcgcgtgcgccagcgcatctacttcccggccgacgacgagaagatcccgctgctgctgggcctgctgtcgcgcagcgaaggcgcgcgcaccatggtcttcgtcaacaccaaggtgttcgtcgagcgcgtggcgcgttcgctggaaaaggccggctaccgcgtcggcgtgctgtccggcgacgtgccgcagaagaagcgcgagagcctgctcaaccgcttccagaagggccagctggaaatcctggtggccaccgacgtggctgcgcgcggcctgcacatcgacggcatcaagtacgtctacaactacgacctgccgttcgacgccgaagactacgtgcatcgcatcggccgcaccgcgcgcctgggtgaagagggcgacgcgatcagcttcgcctgcgagcgctacgccatgggcctgccggacatcgaggcctatatcgagcagaagattccgtccgagccggtcaccaaggaactgctgaccccgctgccgcgcccggaacgcccggctccggctgcaggcgaggaaggcgaggacaacgaaagcgtcggccagatcttccgcgaagcgcgcgaagcccgcgccgccgaggaagagcgtcggggcggtggccgcagtggcggccgttccggcggcggtggtggtggccgtggtggccgtgacggtgagcgcagcggcgaacgccgttcgcgtggcccgcgcaagccacgcgcggaaggcgagcagggcgctcccgcgccggccgccggtgccgaaggcgccgctgcccaggccccgcgtccgccgcgcccgccgcgcgccgaaggcgcaccggaaggtgctgcggacggcgagcacaagccgcgcaagcgccgccgccgtcgccacggtcgtccggtcgagggtgccgagggcgtgcagaacgccgccggcaatggcgccagcccggtcacgccggtgcaggtggtggccaagccggtgcgcacggctgctgataccggcgattcgttcctgacccgcatcggccgcaagatccgccggatgctgtcgggtagctga

SEQ ID NO: 498638 - DNA, 1449 bp, Stenotrophomonas maltophilia
atggatacagatgatcagagcgcgatgatccccccccgctaccaacggctgtccgacgaactggccgaggccatccatggcggccggcttccggtaggcagccgcctgccctcgctgcggcagatggccctgcagcgccggctcagcctgaacacggtgatcgccgcctaccgccagctggaagacgccggtctggtcattccgcggcccaaggccggcttcgaggtcgcgccgcggctgtcggtgccggaacgttcgctgcgcgacacaccttctgcgcccaccgcgccgctgcagcaggtactgatggcccgcgtgctggaagcacagcgccgccccggcgtgatcgacctggcctttgccggcccgcgcggtcgccagttctaccccggcgcgcagctggccaagcacacggcgcaggtactgcgccatggccagcagaccgtggagacctatgcacgccccaacggctcgccacggctgctggcgcagatcgtgcgccgcggcccgcgcatgggcctgcatacccacagcgaacgcctgctgctgacccacggtgcgatggaagggctgcagctggcgctacgcgcggtcacccagcccggtgatgcggtcggcatcgaggcgccgtcctacttcaacctctacccgttgctggccaacctcggcctgcaggccatcgaactgcccacccatccgcagttcggcctggatgtggatgcgctggacgcgctgctggagcacacgccgctggccgcactggtggtgatgccgaccgtgcacaacccgctcggctgcaccatgccgaccgccgccaagcaacgcctggccgaactggtcaacgcacgccagctgccgctgatcgaagatgcggtgtatgccgagctgcagttctgcgaaccgccggcgccgttgctgaaagccttcgatcgcgatggctgggtgatggtggtcggcggcttttccaagacgctggcgccggattaccgcatcggctggctcgatggcggccgcttcgccgagcgcatcgcgctgctgaaattccagtccaccggcggcgagccgcagctgctgggcgacgcggtggcggcctatctggaagcgggcagctacgagcaccacctgcatcgcatgcgccggctgtaccgcgagcaggtcggacggctgcgccagctggtggccgaacacttcccggccggcacccgcgccaccgaaccgcagggtggcttcctgctgtggctggaactgccgggcgtggacacgcgcgagctgttcgagcgtgcactgcaggaggacatcgtgttcatgcccggccaggtgtattcacgcggcgcgcggtatcgccattgcctgcggctgtcgtgctgccagacgctggatgcacgcttcatcggcgcggtggagcggctgggcgcgatcgcgcgggagctggcggccgcagcacgctag

SEQ ID NO: 498639 - DNA, 291 bp, Stenotrophomonas maltophilia
atgtcgttgtcggccgggcctgatcggggcacggccggtactttccaagcgcacggctggatggccgtgcgtctttttttggtagtgccggccgctggccggcaatccctggaaccgcaggagccggccagcggccggcactacccggggcgttaccgcattggcaggagcgtcaccgagcgccagccggccccacggaaatgccgtcagcgcatcggcaccagcaccgcatcgcgccggtacaacgccgggaactgcctgcccagcgcggccagcttcggcgcgtcgtag

SEQ ID NO: 498640 - DNA, 534 bp, Stenotrophomonas maltophilia
atgacccgctggaccacctggaaagcaatagccagcgttggcatgatgttgctttcgtgcatggaaactgcgctatcgcacgacagagttgaagtgcgttccccacagcgtctggatgccctgatcgacgcgctcgtcaccacgccgtcgccgatcagcccggcccagttgcatgagctgggcatcatcgcgccgttttcatttgagaaggatgcaggaccgcgcatctaccggtcacagccgatgctgaccgccgatggctttgccatcgataacgtggagtatcgcgttatacgcggcgaggacgatgaaatccgccttctgttcgtcacgttcgtggatacgccatgcttcccactggagcggttggctaagcgttacaccctgcagccattcatctatccacccagccatggtgcgccattgatcgcgcggaaccacgagcagcaccattcgctcaccgtaggagcgcaggagatcatcgtccgcagccagcgcgatgctccgcactgcgtgctgggcctgaggcgctga

SEQ ID NO: 498641 - DNA, 1395 bp, Stenotrophomonas maltophilia
atgcatcgtctgctggtgtcgtcgttgttgctgtgcctggcgcccgtgatggcaacggctgccccatctgcgtccgcaccagcagccgttgtccatccgtgtgaggacgcatcgtcctcgccagagctgcagggtagcctgtgtaccgtcgtgcaggtaccgctgcaccatgccgcagccggtgggccatcgatttccctgttcctgcgtcggattccggccgaggcgtccactacgcgccggggcgaggtctggctgctgtccggtgggccgggcgagtcgggtgcctcgctgtacccgctgatcgtgacctaccagaaggccttccccggctatgacctggtcatccccgatcatcgtggcaccggccgctcggcgcgcatctgcccggtgcaggaggcgccggacagcgccaacggtactggactggctggagccgagtgggggccgtgtattggcgccatgtatgcagacatggcgcgcaccaccgccttctccattaccgaagctgcgcaggatgtttcctggctgctgacgcggtaccgccgcgagggtgaggtcatcctgtacggcgtttcgtacggcacgcagctggcgttgcgtacgttgcaggtatctccggtgccgctggatgggatgatcctcgatggactggtgcctcgcgaggacacgcaggcatgggacttgagcagacgcacggcactggtggatgcggtgggccggcaggtactgggcgccgaaggcatcgcccactaccagggcgtgctgcaggcatcggaaacagcctcgtggaaggctgctgtgcccggaggagatctgcgccgcttcctgggcgcattgttgaacttcccggcgctgcgcgaccgcattcctggcatcgtggacgatcttgcgcacgatgatgcgttctcgttgcgacaggctgtggcagatcacagcacggcactacgccagatggggcagggcggcaacaaccagccatcgctgccgttggtgatgttgattgcgacgtctgagaacaatgcacgtcccggattgagcaaggccgtggtcgacgcggaggccaaggacgcattgtttgtcagccccattccaggcctgctggtggacagccccgttccaacctacgcgaaggataccgcgttcggaaaacggcctgcggcgttgccgcgcacgctggtgatgcagggaacgcttgacccgaacacgtcctatgagggtgccagggatcacgcggaaaggttgtcgcgtgtgggatcggttcgattccacaccgtcgagcgcggcgcgcacctgctggcgtttacggcgccgcagtgctttgcagcggccacggcggcgtttctgggccattctgacgtggcaggcgcgtgtactgagccgacgcagcgctga

SEQ ID NO: 498642 - DNA, 759 bp, Stenotrophomonas maltophilia
atgaagattgttgcagcacagatgcgatcagctcctggcgacatcgatggcaatatcgaacggcacgtgcacttcattgaacgagccgcctcgtgtggcggtgcggcggtcttctttccggagatgtcgctgaccggctatgagccgcggttggccgaacagctggcagtgaccccagatgacgcgcgtctggaggtattccagtctctgagcgatcggcaccagagtctggtcgcagtcggcgggccgtaccgcggcaacgatgggccggagatcggcatgttcgtcttccgcagcggtcaggcaccggctgtctacaccaagcagatgctgcatcccgacgaactaccttatttcaaggcaggaaccacgtccctgttagtaacccttggagaggaaattctggtccccgccatctgcttcgagtcgctacagatggaaagtgcattgcgggccaagggcgcgggagcgacggtctacgttgccagtgttgcaaagaacatgatcggtatggagcgggctcaccgccactacgcaacagtcgcgcgggagcttgggatgatcgtgttggcatgcaatggcgtgggcaatgccgatggattcgagatgacgggagggtctgcagcctgggacaacagtggtgcgctcaggtgcagcgccggaactggagacgaggcattggtggtgtatgacctcgcagaacagagcggtagtgccgtgacactcccagcaatgggcacgctcgggggtgcgggctaa

SEQ ID NO: 498643 - DNA, 2700 bp, Stenotrophomonas maltophilia
atggccgacacaccggttttccagggacaccatctgatcgaacagaatgcgttcgaacaaagccagctgctgaagtcgcttgccaggagtggtcatttcacgctccacggttccgacaacatcctcaacctgcccgcgaaccccgcgctggcaacccggttgggtatctcgccgcactcgggcgggccgttgagtgcgtactcggatcaactgaagttcgttctcgacgacctcgcagaaacctacgacggccgagcgctgttggcgaaggattctgcgccggatgtgcgcgctgccgccgccgagcgtatgggtgcccgcatccagaacctggagttcacgcttcgcgccggcatcctcaacggcgacctggtcaccaacacgccggagaacatgaccccggccgaagccaacgccaggatccgcaccttcttcgccgatctggacggctaccagcgcacccacgccgcgcagattgcggaactgaagaccctcaacccgaccgagttgcgctggcgcggcgtcacccactccgaagccaacgtgacggcggcgctggatgccatcgaccaatccggcaactccaccctgagcgagcgctgggggggccgcgcatcgttgggcaccgcaatccaggaggccaaccagggcggccgcctgccgctgagcgagcacaccgcggcccgcgtgcgtacggcgttcaacccggagatgccactgaccatcctgcgccctggcccggcaaccacggctccggaactggccggctctgctgggcgcgctggcgctgcggaaggtgccgccgaagctgccaccgcgcgcggacagatcaccggcgcgcgcgtactcggggccgcgggtgttgccgcactggccgtggacttcgccatcaccggccaccgcgtggccgagttgcacagcgagggcaacaacgccggcgcaaaatccgcggccacccacttcgtggggcgcactgcaggcggcttcggtggcggcttcctgttgggcgcggggtacggattgttcaccggatcgtggaccgggccaggtgcgctggctaccgggctgctgggcggcgtggccggtggcttcggcggtgagtactgggcccagtaccaggacaagaaagcggtttacacccaggtggaccgcagcggcaacgaatggagccgcgatccggaagatgccaagggcacctggagccgcagcgtgcgcacgccgcaacccgacggaagctaccgcgagaccaccatggtcgccggtggccggctgctggatgagctgaactacaaggccgccaacgactcatattcactgggcatggccaacctgcccaagccgcagaaccccttcaagcttgatgcaggcggcgagagcgcgccgccgcgcgagccgtttgaaaccaaccgccactacgtgcgcaatccgcacaacggcgaatggaacctctccatccacgcgatgattgatggacgcgtcccttttgactacagcgtgcctgtcggcccggaaaagtcgggccaactggaacgggaatcgcagcgcatcattgcccagaacgccttgaacacgccggaggcgcttgccgcccgttaccaggtggcgttcaaccagtacaactggcacgagttcgccaccattgagccggtaccggaggtgatcagcaacgcgctgacccagacgcagcccctgcgcgcttccaacggcgagaagtacacgcaggacgccaacgggcagtggcaaacgccgggttgggtgtatggcaccaacccggccgagggcagcatcgtcgaggagctcaatcgtacgcgccagagccagcaggccggcgtacaggagctgacgtccatggccgacatcgcccgggccaaccccacgccaaccgaatacggcctgcgcagccaggtggtggacgcctaccgtagtgccggcattttgcgcagtgccgaagagattgatgacgccgtagccgccgttgcacaggatcacgcccgcgccgtgcccgacttcggcacgttcacgctgcaggtacagaaggatggctcgctggccacactggctgggaaagatgacgagcgcatgcagatcgtttgcgtcaccacgccagaggaaattgcccaggcacacgtgcggcgctcgactgcagagcagcagcccgcggatgccttgccgcccgcgcccacctcacctgagctagcaccgaatgcatcgccgccacacacctccaggcctgccacgcagcacgacgctgacgtagaccggcgccacggcacggccctgcgcccagatggcagcgggctgttggaacagctgcgctcgtcggtagccatgctggatgagaagaacaacaagccgtgggaccagaacagcgaccgcctgctggccagcgcgtaccggcttgcagcagaagccgggttcaagcccagcgacaaagttgacatggcactgaacgaagccaccgaagcccatgctgcgggctccacgctgttcgtgacgcgctcaggaccgggcgcgtcatcggaccccgccgccaaccgggtgcagatgccaacacaggaggccctggcggtcgcaccggagcagcagtatgcagcggccaaccggagcctcggcacccgggaccgggagcagtcgcagcagctggcgcaagcgcaggaacggcagcaggaagagagccggcaggggccgcggttgggttga

SEQ ID NO: 498644 - DNA, 654 bp, Stenotrophomonas maltophilia
atgcaaactatgatcacaggaattttgctacgtagatatttttcgctgacccatgcacagatggcagcattcaacgcgcgggctgcgtcagtcctgaatctcgatggctccgaactttcgtcaatcgccatgagcgcacatgtctcaggctccgtcatatcagccggtgcgttcattgaagcgacagctaacgaaattgcagagagtgactcgcggccacgcaggaatgtcgcaggcatgccgtcttccctgctccgcctcaatgaaataattgaggatgctggcgcagttcccatcgagcattcggatagccgatggattgcagcgcggactctcattgatctacgaaaccgactcattcactatcagcatgactggctggatagcggaactgagaacatggttggccctggaaatctctattcgagcgaacttttggaaaggctccaggcatcattcgagttcttgccgacaagcgaacacaagacgccccgatttctttctccggattgtgcagcgtgggcgacatcttcagccattgatttcctcgacgaattttatcgccgccttggaaagactccaaatcatgaccatcttcggaatagcattactgtcgagcggccattggcagccgccatcgaaaagcaagtgtga

SEQ ID NO: 498645 - DNA, 435 bp, Stenotrophomonas maltophilia
atggcgcaggacaccgaatggacacccgtttcgcatgacacctgcgaccaggtcaccgggccgttctaccacggcacccgcgctgacctcgaggtgggcgagctgctgagcgcgggcttccgctccaactatcgcgacagtgtggtgatgaaccacatctacttcaccacgattgccaagggcgccgggctggctgcggagatggccaagggtgaagggcgaccgcgtgtgtatgtggtggagccgaccgggccgtttgaagacgatccgaacgtgaccaacaagaagtttcccgggaacccgacgcggtcgtaccggagtacgcagccgttgcgggtggttggggagattgcggagtgggagctctacgacgcggagttcgttcggcagttgaaggcgtttgttgcttcggggagtggggagatcattaattga

SEQ ID NO: 498646 - DNA, 201 bp, Stenotrophomonas maltophilia
gtgccgccggtcctgcgcgaatcgcgcgaggagctgcaggccaccttcaagagcgcactgcaggccgacctgccaaagctcgacctggtcacccgtgaggagttcgaagtgcagcgcgcggtgttgctgaagacccgcgagaagcttgatgcgctggaaacggcggtgcgcgagctggaaggccgcagcaaggcagaatga

SEQ ID NO: 498647 - DNA, 1809 bp, Stenotrophomonas maltophilia
atgctctcagttgtccggatgttgctcatagttcttgtcttttttgtggtttctgcagtgcgcgccgaggactattcagcggttctcaaggacaagatgcagcagatgaacgcggttccctatgacagccatcagggattccgggagaacattgacttctacaccgggcggctcattctctcgcagaccgaccttgctcttccaggcaacggccctgacatcgtggtggaaagaaggctcaccgcggcaaatctccctggtccaatcggtgcttgggagtacgattggcgaagcatcaacagcatggctgattgggaactcgtgacgccgcacctcgaggtctttgttccattccagtcctacgccaacggcctgcctcccagtggctaccgctatgaacgttccacacagtggaatgtcaatgccgctgaccaaggcgcccgttgcacgaacttcgccagcataccgaattacagaagcaccatgccggtcgtaggcgtcgtggagtcgcatcactggtggaccgggctcaagatggagctgccgggcaatgagactcaggagattctgctgagggcgcccgagaacagcaccgttcccacgatgacaatcgacggtaccactcgatcattcaatcttgtcaccaacaggaactggatggtgacctgtctcccttcgctgaggaatgctggtttcgggggggaggggttccttgtcgtcgacatgaccggtacgaaatacttcttcgactggatggccttcaaaggcatcaatgtgattggtacggccttcaagtcaggttccgcatggtcatccctgccgctttggggaacgaaagtcttgctccttgcgacacgggtggaagacagattcggcaactatgtgaactacaactatgagggggagcggcttgtttcagtcacatcaagcgatggcaggcacgttgagttccagtggacggtgaaggcgtgggggccacctgatccagttcgtggcttcacgtccggtgactttcatcatctggctggatttacggctcagccgcgtacagctgcagcgagaacctggtcctatgattaccagcttgcgcagcacggaacgaaggcaaggcgagacagccggctccggcgcatgatccagcccgatgggagcgtctggacatacgccttggacaacatcgtttcgggatgcttctacctaatgggaagtagcagtgtgatgaatcatgattgtgcgaggacatcgcctcacacttcatcggtgaccgctccttcaggagcaacaacgacctacgaattcgtctcgagcgtcaagaagcgctacgcgcagagcatgcctgcggaacaggctgtgttcgaccgcgtcgacattggcacgtaccggctgacgagcaagcggctgactggccctggagtgagcggtacgtggacctacacgatgaccggagacggcacaccgtactcgtaccatatgactctgaatcccgatggttcccagttgacccggaagatcgatgccatccatcggagcacgaccgagggacaggttcttcagactcaactgttccggcgtgtgggcgacgccaatccggttagatcgcagtccttcgagtatgccgctgcggagggccaagcatacccagcaagagtgggattgaatgttcaacgctggggaggcagcaatctggaggtataccgtcctctgcgcaagagcatcatcacgcaggatggtgtgaacttcaccagggagacgctcgaattcgaccatttcgcgcgggagcgcgtggtcaggagtacgtcatcgccctga

SEQ ID NO: 498648 - DNA, 252 bp, Stenotrophomonas maltophilia
atgatcgacctgaatcaaatcgatgacctcgcccgtcgcctcagcgacctggtgccgccgggcctgcgcgaatcgcgcgaggaactgcaggccaccttcaagagcgcgctgcaggccggcctggccaagctggacctggtcacccgcgaggagttcgaggtgcagcgcgcggtgttgttgaagacccgcgagaagctggatgcactggaaacggccgtgcgtgaactggaaggtcgcggcaccgcagaatga

SEQ ID NO: 498649 - DNA, 648 bp, Stenotrophomonas maltophilia
atgccgacacctgaacacacccgcctgctgactgcagccgcaagatccatactgcgccccttgggctgcgtgcaaaagggccgttcgcgcacttggcttgacgaccagggctggtgggtcggggtggtcgagttccagccttcggcatgggacaggggcagctacctcaatgtcggcgcctgctggctctgggaagaaaaggactacctgtccttcgacgtgggcggccgcgttgccggattcgaacgcttcaccgaaagcgccgagtttgcctcggccgcacaggcactggccgagcaggccgccgccgaggtactggccctgcgtgaccgtttccccaccccggggcatgtgcgtgcattgatgagccgccaccccaaaccgggcatccgcgaacacattcatgcgggcatcactgccgggctcgcgggcgcttacgacgagggtcgcaggcacttggcactggccgctacggaaacccacccagcgccatgggtcgatgtgctgaagcaacgctgtgccgaactcatgccgctgctgcaacctgatggcggcttcgaggcagagatcgccgccactgtgacgcgcacccgtcgtgcgctcggtctgccggagtggcggtcgtcccccctcattccgccgggctga

SEQ ID NO: 498650 - DNA, 660 bp, Stenotrophomonas maltophilia
atgtatcttcctgctctgcccccctcctcctgcggcgatgaggccgccaccctgctgctgctcaagcgcggcgaacgcttcctggcccccgacgtctatcgcacctgcctggacgggcgcgaggcagtcatcaaggactattcccgctaccgcggcacgcccgtttcgctgatcgcgcgactgatggtgcgccgcgaggcccgcatgctgcagcgcctcggcggctggaagcatgcccccgcgctgctcggcaccctcggtggcctggcgctgggcatggaattcatccccggccagaccctgagcaccgcgcaggccgtgggcaatgacgtgttcgagcagctgcagcacgcgctcagccgcctgcacgccgccggcatcacccacaacgacctgcatggcaccaacgtggtggtcagcggcggcgtaccggtgctgctggacttcacctcggcctggcgcgctccacgctggctgcgccgcaacccgctgagccggcaactgagccgcagcgacatgaagaacttgctgaagatccgccagcgcgtgaccggccaggcgccaagtgccgcacaggccgcactggtggccgacccgggctgggtcgcggccgtgcggcagggctggaagcggttctacaagtgggccaagcggcggtaa

SEQ ID NO: 498651 - DNA, 2973 bp, Stenotrophomonas maltophilia
atgatcaatcgcaagtcgctcggccggcatccgctgagctttgccctcgctaccgccgtgctgctcgccgcagcggcgccggcgatcgcccagaatggcgccgcgacgcagaccgctgaggaagcggccaagtcgaaggcaaccaacctggacacggtgaccgtcaccggctcgcgcatcagccgcgacgtgttcaactcggtgtccccggtccaggtcgtgacccgtgaggaaaccacgctggccggcttcaactcgaccaccgccgcactgcagagcaccgcggtgaccgcaggtgcatcgcagatcaacaacgcctacggtggctacgtcaccgacggcggccccggcgccaacaccctcggcctgcgcggcctcggcccgacccgcaccctgatcctgctcaacggccgccgcgtctcgccggccggttcgcgcggctcggtcggctcgacggacctgaacgtgctgccgaactcgatcgtcgaccgcgtcgaaatcctgaaggacggcgcctcctcgatctacggctccgacgcggtcgcgggcgtgatcaacatcatcaccaagaagaaggtcgacggcgtcaccttcgaaggccagcacaatgcgaccgacggcggcggcggcgacgaacgtcgctatgcgctgaccttcggcaccaccggcgagcgttcgcacttctccggttcgtacgagtacacagtgcgcaacgcacttaaccttggcgaccgcgactggacccgctgcgccaccgacaagtatcgcgacatcgatgccggcgactactggggcagcggcgacttcatcgatccgctgaccggcaagtccaagtgctacaccctcgacggcggcggcgtgaccatcaacacgcttggcaccaacacccgtaccggcgtcgccgcgccggggggcagcggcacccgcttcaaccgctggcgcccgaattcgtcggtcaccaccggcctggttggctacgaaggcgtgggtgcgctgaaccgcgacaccttcgacccgcagatgctcaaccagtcgctgatctcgccggtcaagacccacaccgcctacttccagggcggcttcgacctcaacgcactgggcgacgctgagctgtactacgagttcctcggcaaccaccgcaagtcgacccagaccggctatcgccagctgaccctggactatgcagtgggtaatccgcttatcccggccaacctccgcgacagcgttgcgggcccggccaccgaccagaccaatggcgtgccgatgggcgtacgtgccttcattggtttcggcaacgaccagagcaagcagaaggtcgacttcctgcgctttaacgccggcctgcgtggccacctgagctcggaatggaattacgacttcaacatcatgcattcgcgcagcgatgcggactacaccttccagagcttcctgaccagccgcctggcgcagagcctggacgtggtctcaaacggggccggtggcttcgtctgccgtgacgcctccaacggctgcgtcgccgcccccccggtgaacaacaacaccatcggcggccgcctgccgcaggactggaaggactgggtgttcgtcccggtcaccggcaacacgctgtacaaggaaaccacggtcaacttcaacgtcaatggcccgctgttcgacatgccgtatggctcggccggcggcgcgttcggtgtggagtaccgcaaggcccgcatcgacgacagcccgtcgcagtactccattgaccaggacctgtacaacctgaccgcttcctcgccgacccgcggcagcgactcggtgttcgaagcctacggcgaattggaactgccgctgctgtccggtgttaccggcgctgaggagctgtcggtcaacctgtccggccgctataccgactacaagtcctatggttccgacgagacctacaagattggcaccctgtggaccccggtgaagtggctgtcgttccgtgcatcctacggcacctcgtaccgcgcaccagccctgttcgagcagttcctgggcgccaccaccggcttcctgccgcagtcgtccgacccctgcgacaactacattgaggcccgcccggaatcgatgcgctaccagaactgcgcgtcgctgggcctggatccggagttcacccagctgcaaggcatcaccgtctacacccagggcggcgcggaaaacaacctgaaggctgaaacctccaccgccaagaccttcggcgtggtgctgcagccggagttcggcccagccttcggcgatctgtcgctggccctggactacttcgacatcaaggtcgagaacggtgtgcaggacgcaggcggcgccgccatcctgcgcaactgctacggcagctccaccgcagacttcactgcgggcaacggcctgtgccgcctgatccagcgcaacccgcagaccaaccagctgacggtcaccaacggcttcatcaacgtctccaccaacaaggtgcgcggcctggacttcaccctgcgctatgtgcgtgacatcggcccgggcgagttccgtgccacgctgcagggcacgcactacttcgagcagaccagccagctgttctcggacgatccgaaggtcgactcggccggcatgatcggctcgccggaaaacaccgccaccctggacctgaactacaagtggaagaactggcgcgtccgttacggtctggactggatcgacaacatggacagctacgcctactacgaggagcgcaacccgggcctgttcgatccggccaccagccagtacaaaatgtacaccccgaactacttcatccaggcagcctcgctgcagtatgaagcggacaagtggtcggtcaccggcggcgtgcgcaaccttgccaacaagaagccgccgaccatttcgcagggcgtgctgagcacggttggcaacgcgcccctgtacagcggcttcgattacttcggccgcacgtacttcgtgaacatcacccgctcgttctga

SEQ ID NO: 498652 - DNA, 3060 bp, Stenotrophomonas maltophilia
atgaatctgaacttcaatggacgcacgctgaagcgcactgcacttgcgctcgttctaggcgccttggccggcaccagctatgcccagagcaccaccggcgatatcgtcggcagcgtgacctcggcggacaagatccaggtcaagagcttggcgtcgggcacgacgcgtgaagtgaatgtcagtggcgacggacgtttccgtgtttcgcagctgccaaccggcacctatgaggtcaccacggtcagcaatggcagccccaccgcaaccacccgggtgaccgtggtcgccggccagtcctcgatggccaccttcgcgtccgcatcctctggtggcgcgacatccttggatacggtgaatgtacgcgcgctgggagcggcgaacgcaattgacctgggcagtgtcgaatcccgcaccacgttcaccgccgacaagctcaactcactgccggtcgcccgtgatgtcaccagcgtctcgctgctgactcccggcaccgtatcgtccagcggatacttcggcccagcctcgttcggcggtgcgtcggccgccgagaacagctactacgtcaatggcttcaacgtcaccaacctgtacgacagcctgtcgttctcggagattccgtatcaggccatcgaccagctggacattcagaccggtggttatggcgccaagtacggcttttcgaccggtggcgtgaccagcgtcaacgtcaagcgcggcaccaacgagtggaagggtggcttcagctggacaggcgctcctgactcgctgcgcgagaacgaaccggacacctactacaacgatggctcgatcttccgctcctacgacaagaacagcagcagttcgaacgtctacagcgtctgggctggcggccccctgatcgaggacaagctgttcgtgttcgcgatgggccagttcagcaactccaagaccggaagctacagcagccgcggatcgcagtacaccaccaacggtcgcccaccgagcgctgctgcgctctctacgaccgggtacgactatgagtccaagacgccctactggctgctgaaggtcgattggtacctcaatgagaacaatcacctggagtacaccggcttcgacaacagccgtcgctacagctacaactatttcaatgcactctatgacaagccagacgcgggtggcgaacccgcacgcaccaatgatctcggcgaactgatcggcaagaccggcggccagaccgacatcttcaagtggactagctacctgaccgagaatcttacgggttcgatccagtacggccagatgcgcaaccgcagctcggaacacacgatcagccccgatggtgtgaccagcttctatgacggcaacatcaacagccctgaaggcgcatgcccgtacgtgctggattaccgctcggagaccggcggcaccggccgtcgtatcggctgcgccgtcgccagcacggtaggaatgttcggcggccgtaacgagcgcaaaggcgcacgtgcggactttgactggcagttgggcgaccacaagatcggctttggctacagcgacgagaagtggacttcggtgcagggcacctcctactccgcaggtgcgctgtggtatctggaagatgactacgcaaaccgtgtgaacttccggaatggtggctcgatcgaaatcaagcagaagtcctggtatgtacaggacaactggcagattaccgacaacttcatgctgtacgccggcatccgcaacgactcgttcgacaacaagaactccgacggtatcagcttcgtaaagcaggatgatatctggcagccgcgcttcggattctcgtgggacattctgggtgacggccgcagcaagctgttcgcgtcggccggccgctactccctgcccattgctgcgaatgtggcgcttcgcgcagcgagcgcgtcgtactacctggaccagtacttcacctacgacggcatcaatccgaacggctcgcccatcattactgggagctacgaagatggtgcatatgacaacatcgtcaacggtgaaagcggcgtcaccccagatcctcgcgcggtggcgtccaagggtctgaagccctatacgcaagatgaggtgatccttggctaccagcagcagatcaactcctcgatcgacttcttcaacgattggaccgtcggcatcaaagcgacctatcgccgtgccaacaaggttatcgacgatacctgcgattcccgttcgctctacaacgctgcggtagccgccggctatgacctttccaactgggccgatccttggaccgtgccggaaggcctgccgggctgctggatctacaacccgggcagcgacctgcaggtcaccttggacgtggacggtgatggcaaggttgacgacatcacagtgccgggggcaagcctgggcccgaaggccaagcgcgtgtacaaggccgtaaccctcagtgcagacaagcagaccgagcgctggtacgccagcttctcgtacacgtggtccaagctggaaggcaattacgaaggtctggtcaagagcaccaacggccaggatgacactggcaccacatccgacttcgattttgccgaaatcatgtatggctcggacggatatctgttcaatgaccatcgccacagcatcaagctgtacggtgggttcaagttcacggatgagtggtcggtcggtctgaacatgctggcccagtccggtgcaccgaagagctgcctgggtggcggctggggcagcttcgataccgagtatggctactccggcgtgttccacagctgcgaactcaatggcaaccagccggctgacgacatctccaaggtcggtagcgcgggccgtaccccgtggcagttcacggtcagcccgaacatcacttacaccccgaactggctgaagggcctgagcgtgcagatgtcggtgatcaacgcattcaacaacatcaagccggtgcaggtgtacgaaacaaagtacggccggccgagctcggcaccgaccatccgcacctactacaactacaacacgccgaaatacttcaacgatccgcgctacgtccgcttccaggtccagtacgactggtaa

SEQ ID NO: 498653 - DNA, 573 bp, Stenotrophomonas maltophilia
atgagcatcaagagtgaccgttggatccgccgcatgtccgagcagcacggcatgatcgagccgttcgaggcagggcaggtcaagcaggccaacggcgagcgcatcgtcagctacggcacgtccagctatggctacgacgtgcgctgctcgcgcgagttcaaggtgttcaccaacatcaactcgaccatcgtcgatcccaagcatttcgactcgggcagcttcgtcgacatcaccgccgacgagtgcatcattccgccgaacagcttcgcgctggcgcgtaccgtggagtatttccgcatcccccgcgataccctggtggtgtgcctgggcaagagcacctatgcgcgctgcggcatcatcgtcaacgtgacgccgctggaaccggagtgggaaggccacgtcaccctggaattcagcaacaccacgccgctgccggcacgcatctacgccaatgaaggcgtggcgcagatgctgttcttccaggcggccgccgatgacatctgcgagacgtcgtaccgcgatcgtggcggcaagtaccagggccagaccggcgtgaccctgccgcggacctga

SEQ ID NO: 498654 - DNA, 1881 bp, Stenotrophomonas maltophilia
atgcccgacgccccagccgccatcgcccttccctctgcgggccctgctcttcgctggcgccggcttgcgtggtggtccctgttcgtcctgggcaatgcgctgctggcgacgatgatcaccctcggcaacgtgccgctgtacgacaacccgggcggccgccagggcctggcctatctcgcgattgccctgcccgggcacctgctcgccttcggcgcgctggccggcgcgctgccactgctgctgggcctgtggccgcgcagcgcgcgcacgctgagcatcagtgcggtactgctgcagggcttgtggttgtgtctgctgctggtcgacgccaaggtgttcaccctgtaccgcttccacctcaatgccatggtcctgaacatggtgttcggcggcgccctgcaggaccaggttgcgttgtcgtggaagacctggatgcaggtcggcctgctggtggcggccattttcaccgccgagggcatcctggcctgggcgtgctggaagctgctgccggccgcgccccgccggcgcagggtgctgcaggcctgggcggtggtcgccctgctgatggcgagcggccaggtggccaccgcctactacgacgcacgcggcgaccgtgacgtgattgcccagtggaactacctgccctgggcccagccgatcaccgccaagagcttcatgcgcaggctgggcgtggtcagtgaacagcaggtcggcctgcccgatcctcgccatgcgcagctgctgtatccgctgcagccactgcgctgccagagcccacagcggcccaatgtactgatggtcgtgctggaatcgctgcgccacgatgcgcttactccgcagatcatgccgaacacctcggcactggcggcctccgctcgtgtctacgaccaacatttcagcacgggcaacgccacccgctatggcctgttcggcctgctctacggcctgccgggcggctactggcaaagcatgcttgacgaacagcgcggctcacagctgttcaaggtgctgggccagcaggggtacgacctgcatctgtacggcagcgcgccgatgtacagcccggaattcgaccgcactgcatttgcggacgtccgcgaccagctgcaccagggcccgcccggcctgggttcggaaggccgtgacagcagcatcgtggcctcgcttcagaaggacatccgtgcaagccaggcagcgcacacgccgtggttcggcttcgtcttcctcgattccacccacgcgccctaccacatgcccgcaggctacccgccgctggcgaccccgatggcgcaggaaatcgacttcctcaggttcggtccggaccacgacccggccccggaactgaaccgttaccggaccgccgtgcattacgccgacagcctcgtcggcaccctgctggacgatctgcgcgcgcagggcctggatcagaacaccatcgtcctggtcaccggcgaccacgccgaggagttcaacgacctgaagctgaactactggggccacaacggcaacttctccgactaccagctgcaggtaccgttcgtgctgcactggcccggccaggccagcggccgtgagacacgcaccagttcacatgaggactgggtgccgacgttgatgcgccacgccctgggctgcgagaacgcattgagcgacttcagcaccggccaggatctgctggccgaacccgcaggcgagcgcgcactggtggtggaaagctggtcacaacgcgccgtccgccatggcggtgccatctacgtgttcgacaagttcggcaacgccaccgcgctcgaccggcactaccgcccgctgccgcgccaagccccggatgccggcgccgtccgtaccgcatgggaagcgctgacccgcttccgcaaccgctga

SEQ ID NO: 498655 - DNA, 435 bp, Stenotrophomonas maltophilia
atgcgcacccgcacgaaactcggtctctcgctcatggccctgttctcgtcgctaccgctgatgatcggcaccggcaacggctacttcatcctgcttctgctgatcggcctgcccgccgccatcctgtcctggttcgatctgggccgtgaactgcgtgccatccccagccccacccgtaccgagcgagcgctcggcctggcaatgggcgttccgcaggtgctgttcgggctgttgtgtgcggtcatcggcctgctgttggttgtctggatcctttacaacctgctgatcgagcaccaatcgcagtttcgcatcccgtcactgcccgccttcgcggctgggccgatgatgatcgtggtcgggctgggttgggcgcgcacagccttccgccgcgcggcccttgagcaggacgccccgaaacaggacattccggattga

SEQ ID NO: 498656 - DNA, 408 bp, Stenotrophomonas maltophilia
atgaagtggttcctgcctggcgtcttcctgttgttcgcaaccgtggccgggtgtgcaacttccgggcaggcaccttcctccaacccggcggcgctgctgccaagcaaggccatcaagggaagcgcggagctggatgggtctcaggtggaacttcgcggctacctggtggcacagttcgaggatcgtggcatctgggacagcaaagcggagtaccgccggtacaacagtgaagcaagctgtgtgtcgcttttgatccccaagcgcatgattgaccaggttgaacgacgctctggtgcctacgcgaccatcagggggaaactgatcggggacctgcgatcccgagggaccgtgctgctgggtggatgcaatgtcgtggcaattgaagtccaggagttgggtgagaactga

SEQ ID NO: 498657 - DNA, 954 bp, Stenotrophomonas maltophilia
atggacctgctggagaacggaatggtggcttcgaagctgcggctggcgttgttcgcatcgacttcactgatgtacagcgccattgccggcgcacaggtcgtcacctacgtccataccgacgccctcgggtcggttgtcgctgaaaccaacggggcgggcgccgtcatcacacgctatgactacgaaccctacggagccgcgatcggtgaaggggtggccgatggtcctggctatacagggcatgtaagcgacgcggctactgggttgagctacatgcagcagcggtacatggacccacagctgggagtattcctgtcggtggacccggtgacggcatatggacagccggttgggcagttcaaccgctaccactacgccaacggaaatccctaccggttcacggatccggatggacgatgcccggaaggggccggccggtccacgtgcatcgatgccaggcgtttcgaccagagccgatcaagtggcctggacatccagctttcggcgcagacggagaagaccgctctggccaacaccgattcggtgagagtcggtagtggcaaccgggagaaggctgtcaccatcgaggcaagcagcaacggtaccgagtcgatccgggtggatccatcaatggcgacgtcctcggatgcgtccgggttctatgcggaactgacgccgaccgccgataccgtggctgtgatgcacggccatctggagcagagtggcctggtggatcggctgacgccaggagattcgggtcccctcgtgagcccgggggttcccaacatcacggtggacagcacgggttcgcgggtcggtgtgcgtgagctggtcgacggcaaggtgcaattccggatgattcagggccgcatgacgccgaccgagcagcggctcatccagcagaacatcaccaagcagcaggagctgttctacctaccaggaagtgggcgatga

SEQ ID NO: 498658 - DNA, 192 bp, Stenotrophomonas maltophilia
atgcccggtagtgccggccgctggccggcatccctgtgtggtgggatcaatgcggttgccggccagcggccggcactaccgttcggcagtttcccaggggaagcgtggcagggcgtccaccgtctgttccagccgctgcagatgcagctggtcttcgcgcagcggccgaagcgctgggctgatgcccggtag

SEQ ID NO: 498659 - DNA, 135 bp, Stenotrophomonas maltophilia
atgcggttgccggccagcggccggcactaccgttccacggtttcccaaggggaagcgtggcagggcgtccaccgcctgttccagccgctgcagatgcagcaggtcttccgcgcggtggccgaagcgctgggctga

SEQ ID NO: 498660 - DNA, 333 bp, Stenotrophomonas maltophilia
atgaaaaatgaagaacgcgatttcctgcagaacgagctgaattccttcgtcgacgctggcatcagccggatggcgcactcaggggacaccatctactaccacacggttgaactcgccgagctgaaagaggccacggggcgtcagcgcgtcaacgatgaactgctgggcgaataccaggactttttcgctaagaagggcgtggaggttacctacgaccagaccaccgatagcctcgacgtccgcttggacctgggcagggtgcgcctcaatggtcgccagtcgcgcaacctcaccactgcgcaggactacttccgcgtcgagaacggcgcttga

SEQ ID NO: 498661 - DNA, 288 bp, Stenotrophomonas maltophilia
atgccgggcagggcgacgggctataaggctctggagatcaacccggaggcgcagcagatcgaggacgccgtgttcgagatcagccggcacgccccggcgatcggctgggtattgagggcctactactgcgggcagggccggcggaagttggagcgatggcacaccgccaactcgctgctgcagatgtccgggcttccgaccgtaagccaggccagctatgtggatatggccaggcgcggcaccgagcgggtgcatgggatgctgctagctctggtagccgctgcatga

SEQ ID NO: 498662 - DNA, 213 bp, Stenotrophomonas maltophilia
atgaccacagccgaggcccgcacgcggaagcgatacaacgcctacctgcgccggcatggccggtgcgcggtgtgcaccatgcgcgagcgcggcagcagcccggcgcactgccagcgccggccggaccggcagggcggctgcgacaccgacggcctgctgccggtgttccgattcgacgaggacgtgctgaaggggatgcgcgatgcagattga

SEQ ID NO: 498663 - DNA, 300 bp, Stenotrophomonas maltophilia
atgcgcaacggcgagggtaaggccatcgagggatcggtggccaggcacaacctggcggagggtttcgggcagctgaaggcaaccgtgcggctgctgggcctgcacctagtgctggtgcagccgtcggtatggaagcgccgattcgatctgtctgggaagggcaaggacgccggccgcgtgctggctatccagcggttcccggccgcggcggtgcagctgcagcggaagaaggacaacggccgcgcggatgccctgctgattggcctgtacggcgacagcctgatcaggggcggcgcatga

SEQ ID NO: 498664 - DNA, 171 bp, Stenotrophomonas maltophilia
atggcaagccgcctgacattcggtatcgaccccggcctgacaggcgccatcgtgacgctgctcgacggcgagcctggcccgatggccgacatgccggtgacggggaggtggatgcgcgcgccgttgccgcgttcctccggcagcagcgggatgcgaacccgggcgcggtga

SEQ ID NO: 498665 - DNA, 396 bp, Stenotrophomonas maltophilia
atgaagcgcggccgctctaccggcaagccgaccgtggcccagcagcagcggatggatgccattaccgaaatcggctgcatcgtggcccacagcttgggcattgacctggacgacagaccgatccccgccgaggtgcaccacctgacggtcggcggcaagcacggcgccaagcgtcgtggccacgatttcaccatcggcctcaacccctggtcccaccgcggcgagcccttcggcggcacgtccgccgcccgatgcgaggaattgttcggtccgtcctacgcccgccaaccccgcaagttccgtcaggacgtcggcagcgacgattacctgctggacctgcagaacaccctgatcgagaagcacatgaaggagagccgccaatggcaagccgcctga

SEQ ID NO: 498666 - DNA, 552 bp, Stenotrophomonas maltophilia
atggccgagccgctctactgctacccctttcagatcctctgccagccgctcagctggtgggcgtccgccgcatcttgggctcaggcaattctgtccgccgcagcgatctacttcgccgcactcgcggccacggcaccggacaagctggctagacgcaggaaagccagcagctatcttgcgctcctcgatatcgcagatgaaatgctcactacctacggagagcagttgggaaacatcattttcgtttcgcgactcaaccaggttgtaggccagttcgctgaagtgaatgtggaaaacatccccgactaccgcctgctgaagcccatgcaagagactcacagcgcgctgatcgtaatgagtgaaatgctcgaacgtcgcaaggcgcttcgttcccatgaagagtttagaagcgcagatcgagtgctcaaggaaatgagcattgggtaccgggaccttcttcgcgcgcgtaagccatatgttcgatcggtcgttgatgagatcgcgcctcagaactggtttgttcgattggcgagaagaattagagagttctag

SEQ ID NO: 498667 - DNA, 588 bp, Stenotrophomonas maltophilia
atgaccctcaccgctgcagcgaagaagatccgcgccaagcgcgcacgccgtcctatctacctggtggtggcgaagctgatcgacccgaacaccggtgagctggtgggcgccctagtgcaggccaatgccgtcgaccagcgcctcctgcgcgaccgcaagttccgcgtgggccgggagatccgcggcgagctgaagcagccgcgcgaggaatggcagcaccggctgatccagaagatcgggcacctgatggtcgacaacgttgaaggctgggagcagctggacgccaacgtgtgctgcgagatggtggaactggacgccacgccggtcatatcggcggtcctcgacgcgtgcgaggcgatgctgggcgctggcgcgcgaaaggtcattgccggagtcctcccggcgatccgtaccgtgccggtcaagcgcgccgagagcctgtcattcgacgagatggaacaggcccgattccaggagctgttcgacggcctgactgagtacatcggccaccgctacacctacgtgatgctcgacgacgtgcgcgccgagttctggaatatggctggctcgaacaggagggtggcgtga

SEQ ID NO: 498668 - DNA, 354 bp, Stenotrophomonas maltophilia
atgtcgcgcgcaccgaagcaccagcaggtgggcagcatcacccgcagcctgaagaacctggcccgtgatctgcgcattcccgtggtggcactggcgcaggtgaaccgcgaggccgacggcgagcggccgcagatgaagcatctggccgacagctcggagatcgagaaggaagccgaccagatcatgatgctgtggcgcgacctgtccaacccgcaggctgagcgcaccgcagcagaaatcaacgtggtgaagaaccggcacgggaacatcggcgtggtgcccgtgacgtggcacggtgggtcgacgtcctacgtcaatcgcagcgctgccgacgagctgggggaagtcgcatga

SEQ ID NO: 498669 - DNA, 639 bp, Stenotrophomonas maltophilia
atggatgcgaaccgggtgcgcgccaagatcgttgcgggctgggcccagttcgaggctgacgtcgccgcatatgagccggcggcggttgccgcgccggttgccgccggccgcgccccggaccagatgccggccgtgcgcatcgaggtgaccggcatggtcaccgcttccaacctggccgagtggaaggaccatgccatcgccgtattccaaggcatcagcaccgagctggtgagcgaccaggactttgccgatgccgagaccaccgtgaagtggtgcggcaacatcgaggaacagctgaaggcggccaagcagcacgccctcagccagaccgagagcattgacctgctgttccgcacgatcgacgacatcgctgccgaagcccgagccaagcgcctggacctggagaacctggtgaagcgccgcaaggacgagcgccgaaccgagatcggcaacgccgcccgccgcgccgcgcagcagcacgtgctggccattaacgagaccctgggcgagcacgccattgcaatgccgacgacgctggttgtcgacatcgccgaggcgatgaagggcaagcgctccttcagcagcatgcaggaagccgtggacgcggtggccgccaatgccaagatcgacgccagctag

SEQ ID NO: 498670 - DNA, 438 bp, Stenotrophomonas maltophilia
atgcgtaacctggtcgcggcacgcattgcagagcaccagcaggccgagcaggcacggctggacgctgagcgcgagaagatccgcgagcaggagcaggccaaggctcaggaagcggccgctgcagcccaggcggtacaggtccagcaggcgccggttgcggaggcagcaccggcgcggcccgaggccgctacccccgccagcgcaccattgccaagcgccacctcgcggcagatcgtccggatcaagctcggccagatcgtggatctgatcgcaccgctgaagatcgacgccgagggcctgcgtcagcttggcttcgagccggtggccaccgagcgtggatcgaagctgtacgacgccgcccaggtcgacgcgatgcgcgccgccatgatctgcagcctgcagcgcccactgtcgggcatcaaagcgcaggcagcctga

SEQ ID NO: 498671 - DNA, 216 bp, Stenotrophomonas maltophilia
atggacgtcgccctgtacccctgccacgccaagagcctgcgccgtaccgggcaggcccgcgcccagctgttcgcccatgtgatcgagggcaagcgctacaccacctcgcaggtggccgaaatcctggacatatcccacagcgccgcctacgagcgaatcaagcggcgccctcacccgctcacctgggcgggcctgcagaaggcacgcatgccatga

SEQ ID NO: 498672 - DNA, 690 bp, Stenotrophomonas maltophilia
atggcgatgtgcccgctcgcagtggattgggggaacgtggccgactgggctgcggtcgcggttggggtccttgcagccgctggaacaatcggcgtggcggtcctcgcgaaccggacgtcgaaacgcgcaacagctatcgctgaggaggcagccagaattgccgcgcaacagcatcaggaggctctcgataccaagtcggagaacgctagaatcctggggagaatgttgctcaacgagatatctacgctccctatgcggattggttctttgcgtcgtgcctgcaatgcggcagtcgactggaatcccccgatggaaattgggaatgtctcggctctcgagtttctgcttagggaatgcggtcactctcttttccctggagcagaggctgtcgaggcaaggattcacaaccttcccgatagcttgggagccgacttggcgacgctcattggcggcagccgcacgttgaacgacatggctcgtcgtatgaaggaacgcgtgcgagagccatcgcgcaaccccattggaaagtcctttccaacgacctacgcgggaaaaatggccgacttcgagctgttgagggatcacatcacttggttgcacgaacttagtccggagttcgcgaacgacttcagagtgtttgtgggacttgaaaggcaggactacgaagaaattgatggagcgcgcgcttag

SEQ ID NO: 498673 - DNA, 447 bp, Stenotrophomonas maltophilia
gtgctgattcaagtgcatggtgaagtggtgctcgctctcggaattgctaaaaatattgtgctcacactcaggggcgcaggtgtcggcgaacagctttttctgggtgaagacaaagttcggcaggccgtgttcgatgacgtcagtcgcttggaatttcctcaggtcgcctcggcaatggatcgaatgcacttcgttgaccgcgaggtttcgggttcccttctgcgagctgtttcgaccgcaaaagtcgcgcaggagacttaccgcttccacgccgtccctggtgtgacagtgaactacgcggacgtctacaagagcctgtcgttcctgctgccgtccgtatctctcgacctggatcgcgtgatggctgcgtgcgttttggccgtcaagcggatgggaattgctgcgaccattttccagagcgagggaagtgccgatctggatccgtga

SEQ ID NO: 498674 - DNA, 552 bp, Stenotrophomonas maltophilia
atggctgatggacggcatccctatgcttcgcgcccggaggcggcaacgcacacctggctgaccccgccggaagtcatcgccgcgttgggccggtttgacctggacccgtgcgccgcgcctgagcctcgcccatggccaaccgctgaccggcacatcacactgccggccaacggcctgaacatcgaatggcagggccgtgtttggtgcaacccgccgttcggtcggcataccgaggcatggctggcgcgtatggctgaccacgggcacgggatcgcgctggccttcgctcgcaccgagacggccatgttccagcgctacgtctggccacgggccgatgccgtcatgttcctggcaaagcgtccgcacttctgcaggccggatggaagccgggccacggacaataacggtggcccgatctgcctgatcgcatacgcctggaacaacgtcgcagcactgatggaatcaggcattgaaggtgcggtggtccgctgcctgaaggccgaagtaacccaggccaccgagcagctgcgcgctgcgctggccacgaattga

SEQ ID NO: 498675 - DNA, 198 bp, Stenotrophomonas maltophilia
atgcaactgatgacccccgagcggtggctggcccgctacttcgaagaaggcagccgcccgtccatgcaggtgctgcagcgactgctgcgcgagggcaagctgcccggccgcaaggtcggcggcacctggttcatcgacgaacacgaatggctcgccggcggcgatgacttggtcgaacgtgtgctgcgagcggcctga

SEQ ID NO: 498676 - DNA, 255 bp, Stenotrophomonas maltophilia
atgactttggttgagaaggtgacgcagaagccgtacgccaccacggtctggggcgctgtggccgccatcatctcgttcctgatccttatcataggaattagcatcggtgcctcgattgatgccaagaagcatctggatctagccgatgctactgctcgcgcacaacgcgaaagccaacgtcagtacgagagattgagtgaggcattcttggtatcaacgaacggatgccgcgcgcctgaggcgagggttgagtag

SEQ ID NO: 498677 - DNA, 993 bp, Stenotrophomonas maltophilia
atgggcaccgaccaggcccgcgcgttcgccgcggccaagaagctcaacacgctgctggtgccgacgaatgacctggtcgcccgcgtggtcggcggtggccatacggtgaatgacgctgtcgacgtgttcgagcgtgacgacatgccgcaccggaaatggggcgccaagaacatcgagaacgcccgttccctcatcaaccgcatccgcaagcatatcggcgagcggaacctggacagtttcagcgtgaaggactgcgccacgttcattggtgaagtcaccgaaagcgaccggtcccggcagctgttccggtccatgttgacgtgggtcttcgcctgcgcggtcgaagaaggctggatcgaccgcaacccggccgaggtcgtgcgcaagttccaggcaccgcgccaacgtgagcggctcaccgcggacgtctacaagaagatccacgccaaggcgccggcctggctgcagctggccatggatatcagcttgatgaccctgttgcgccgcgaggacgtagtgaatctgaagttcaccgactatcacgatggccacctgtgggtgatcccgggaaaaaccaaaaccactaccggcgtccgcatgaagatcgtggtcaacgaggagttggctgcgctgttggcaaaggcgcgcgacgacgtggcctcgccctacttcgtgcaccggctgcctttgaaggcccggccgagcaaccaacgcgcgaaggctcgcgtacaccatacgcagctcctgcctgagcagctaagccgcgagtttcaggacgtccgcgagtcaatcggcttggtcggcaagcatcaggtgtcattccacgaaatccgcagtcttggcggcgctcttctgcacaaccaacatggttggtcggaagaacaagtgcagcaccttctcacacacagttcgccagcgatgaccgaggtgtacctggaaggccacgaaagaccgtggaccgaaatcaacacgggaattctcgccattcgctag

SEQ ID NO: 498678 - DNA, 822 bp, Stenotrophomonas maltophilia
atgcggtgcaggccctttttcgtagtacaccctattcccaccctattaccacccaacgatctgtgtagcgctgcgccatcaaaggagtctgaggtgtctggagacagcaacacggaagtgattggaggcaagttccatcgcagaggttttctgcagctcgtcagtgacgctgtaacgtttcattgtctttcctctgccgaggcgcgcgcattacccggttgccgctttgcgaaacagtcaatcttgctgtcagctctggctgtcgaaagtgcggcaaattgcgttgttgctgatgcccccctatcgaagacaaagcggaaagatctactcgggatgcacacattcgctaagttcaaggatgcgctcgctcccaggggaaagttctttgatcgtgaacgcgatgaagcaaagcgcgtcgctgcgcttatccaagtgcgaaatgatctcgcgcatccaaaggtgttcaaggacagcgtggacatccagttcaagcgatcgaacgagaagtggatagctgaagttgagatggcactggcggactcgggtttgctggggatcagacacaagccaatgggctggactagcaaggagtcgcacactgttttggaggcgttaaatgacttctttgcatacctgtttgatagcgttctacgctactcagacggtgatctcgcaaagatgttcagttcctacgtagaaagcgatcttgggcacgtgatgttcgttgtagaggagcttcctgattttgacgaggcagagcgttgcggagtgaatctgactgcgtttcggcggtttgcgcgcgttggtgaaggcgagttctag

SEQ ID NO: 498679 - DNA, 408 bp, Stenotrophomonas maltophilia
atgaacacgcagaagggcttcacgctcatcgagctgatgatcgtcgtggccatcatcgccgttctggcggccatcgcgacggtggtgttccagccgtacatcatccgcacccagctgacagccgcgctggcggatatcagtcccggaaaaacactggtggagacggttgtctatcaaggacgatccgctagtgaggtcacccccgagttcatcggtggcgcccagaacgcccactgctccaacgtcgaagccgaactcagcgactccggtgtcggccacatcagctgcaccctgaagggtcacagcgtgctggaaggcaaggacctgatcctgcgacgttccgccgagggcatctggagctgtgatggcagcgcgttcgaagcgcgctatcgcccgaccggctgctga

SEQ ID NO: 498680 - DNA, 423 bp, Stenotrophomonas maltophilia
atgaagaaccagaagggcttcacccttatcgaactgatgatcgtcgtcgcgatcatcgccatcctggccgccatcgcgctgccggcctaccaggactacacctcgaagtcgaaggtcaccgctgcgctggccgacctggcctcgcacaagacccagttcgagatggtcatcagcgatggcggtaccccgtccattcagaacgctggcttccaggcagccgaaactggctcctgctcgaccatcgcagtagctcagggcggtatgacctgcaccatccgtgatccgggccgtatcggtaccggttccaccatcgcactgaactacacccaggcttctggtactggtgatactgcggtcgcaggtggttttgtctgcgaaaccaagcaggtcgacgccaagttcattccgaagggctgcaagtaa

SEQ ID NO: 498681 - DNA, 1233 bp, Stenotrophomonas maltophilia
ttgaaccggcatcggccgcaatcgatcggatcggcattgaagacgtcgacggttcgctggggcgcctctctcatccgcatgtcccttgatcgaaccgccctgcggcgctacacccagtggttgccgttcctggccctggtcgccgtctgtgtggcctggtggtcgcctctgggagtgattgtcggccttgccgtgtgccttgcgttggggagcgcgctgcagcgaatcgatctggtcggcaatgccgtgggcggctcacgactgcgctcgcgatcgatgaagccctttgccgaacggccgcccgcacatgatgtgctgttggattggggtgagctgggcatgggcggaccggcgtacagcacgcagatgctgcgcgatggcgccatcgtcgaaggcgtatccactggaggcagtcgtgatgccagtggtgaatggcaggacctgcctggaggcgcgctgcgcctggccagcgggtatgttgatcgatgcgaagcagtgatcgtctacgacgagcgccaaaagacggtgcaggtgcttgcggctgatcccggccagttccggcagcagctgggcgagcgcctgcagaccgatggggaggcgggggcggcgtcgtggctgcgcagccagtccggcggcgtgacccagctgcattcctgccgaggcctatggttggagcacggacatccggcgctggccgccggattgccgcgggagctgaggcacgtcctgcctgatgcccgggtgctgcgcgcggtcccgctgcttcccgatgatctgcgcgtgactgcgcatccggccctgttcgcgtgcatctgcccgtatgccctttaccttgacgagacctccagtggtcgccatgcctgtgatctggaggccgtgatcgcgagcccgtcgggacgctgcctggtggtggccggcagtgtgcttgatgagaacctgcgacccatcgagggcgtgtggcttgtctgctggcagggtcgttggcaagcctttgcccgtcatgcgatggggggcttcggcaaggcccggagcatggcctggatcaatgtgatcgatgctgacgatgacggcacactgcagtgcgaagcctatgaggaacgctgggagtccgatgccgtccatcgaaaccccacgcgccacacagccttggagctgcctgtggaatggcgtgaaaccgggttggcgctgcgcgcccgtgatgggcgcttcaggctgcgccttccctcgcgctga

SEQ ID NO: 498682 - DNA, 717 bp, Stenotrophomonas maltophilia
atgtccgatgtctccgatgtgatccctgccgtagccctgccgcgtgtaccggtggtgggcggtggcagtttccccgtgcaccgcatctactgcgtcggccgcaacttcgccgaccacgcccgcgaaatgggcgcggcggtgccggcggccgatgaccgtggccgcccgatgttcttcagcaagccggccgatgcgatcgtggtcggccacgacgatgccatcccctacccacccgcgaccgccaacctgcaccacgaagtggagctggtggtggcgatcggccgtgatgcgcccgcaggcgaactggccgtggccgatgccgaagcactggtctacggctacgccgtcggcctggacctgacccgccgcgacctgcaggctgcggccaaggacaagggccacccgtgggatgccgcaaagggcttcgacgcctccgcgccgatcagcgaaatcgtccacgccgaagaggtcggcgacctggccgcgctcaacctgtcgctggaagtcaacggcgaggtgcgccagcaggcgctgctggaccagatgatctggaacgtgccggagatcctgcacgagctgtccaagctgtggcagctgcgtgccggcgacctggtgttcatgggcaccccgtcaggcgtggctgcactgaagcccggcgaccgcttcagcgcgcgcctggaaaatgtggccgagcgccacggcgtgatcgccggctga

SEQ ID NO: 498683 - DNA, 606 bp, Stenotrophomonas maltophilia
atgggaggcaacggaatggaactggcgctgttcgacttcgaccacaccgtgaccacctgcgatacctatggccgtttcctgcgccgcgtggccaccgccgaacagctggcgcaggcgtggtggaaggtcggcccgtggctgctcgcgtacaagctgaagctgatctcggccgaacgcatccgcgcgcgcgtcacccgcctgaccttcagcgaccgccacagtgacgacatcgccaccctggccgccggcttctcgcgtgagttcctgcccgacgtggtgcgcccggaaatgctggagcagatccgctggcacaaggaacagcagcacaccgtggtgatcgtgtccggctcgctggacctgtacctgcggccgtggtgcgagcagctgggcctgcagttgatctgcaaccggctggaatgtcaggacggacgcctgaccggccgttacgccggtggcgactgtggcccgcgcaaggtcgagcacatccgtcgccagttcgatctgtcgcgttacgtgcgcatccatgcctacggtgacagttccgaagacaagccgatgctggcgctggcccacgagcgctggttccgcggcaaacccctgaagtaa

SEQ ID NO: 498684 - DNA, 2643 bp, Stenotrophomonas maltophilia
atgtactggctcagccgccaccggatgctgttgctgaccatcctggtgatggtcggtggcaccgtgctgtgcgcggtcgccgccggccactacgcctggcggcgcgccctcggcgaggaaagcagccaggtgcaacgccagctgcagctgtacggccagggcctgcagcagcgcatcgaccgcttcggcacgttgccgcaggtactggcgctggatccggatctgctgcacgccctgcgtgtgccgccctcgcccaccgaacagcagcggctgaacctcaagctgcaacgcgccaatgaagtcacccgtgcctcgaccctgaccctggtcggccacgacggggtggcagtggcggccagcaactgggaccagccgaccagcaacgtcggcgagaactacagctaccgcccctactaccggcaggcactggcgcagggccgcggccgcttctacggcatcggcatgaccaccggcgtacccggctactacctttcgcaggccatcgaggaagatggcaagcggctcggcgtggtggtgatcaaggtcgagctgtcggcgctggagcaggaatggttgagcagcccggacgtggtgctggccagcgacgaccatgacgtggtgttcctggccaaccgtgacagctggcgctaccgcctgctgcgcccgctgggcgccgatgagcgccgcgaaatgctggacgcccgccaatacgccgaccgcgcgttgcagccattgcgcgcgcgtactgaagacgtgcttgccgatggtggccgcatggtgcgcctgctcgatcccgcactgccgcagccgatgctgtggcaaagcctgccgctgcccgccgaaggctggaacctgcatctgctgcacgacgccagcgccgccaccgccgccggtcgcgcggccgccctcaccggcggtgccgcgtggctggcgctgggcttcctggtgctgttcgtgcagcagcgccgacgcctggccaagcatcgcctgcgcagccgccgcgaactggaaaccctgctcaagcagcacgcacaggaactgcgcaccgcacaggatggcctgctgcaggcggccaccgacgccgacagcggactcagccgcagcctcgaacacctgccgcagggcgtggtggtgatcgaccgcgaactgcgcctggtcgcgtggaactcgcgctacctggaactgttccgtttcccacaggacctggttcgcgtcggccggcccatcgaggaactgttccgcttcaacgcacgccgtggcctgctcggtccgggcccggtcgatgaagcaatcgagcgtcgcctgaaccacctgcgcagcggccgcccgcacatgcgcgagagcgagaaggacgacggcacggtgctggagatccgtggcaatccgctgcctgacggcggcttcgtcaccagctatgccgacatcaccagctacaagaacgccgcgcgcgaactgcgctcgctggccgatgcgctggagcaccgcatcgccgagcgcacccatgatctggaagaagcccgccgcgaagccgagcaggccaaccgctacaagacccgtttcgttgcctcggccgtgcacgacctgctgcagcccctcaacgcggcgcgcatgttcgtctcggtgctgcgcggcaagctgagtgacccggcgcagcaacagaccagcgaccacatcgatgctgcattggccgcgcaggatgcgatcctcaacagcctgctggatatcgcgcgcctggaatcgggcagcctgcccacgcgcgtacaggcgttccggctcgggcctttgctgcagacgctggcacgcgagttcggcatcgccgcgcagtcacgcgggctggcggtcgactgggtcgataccgctgcggtggtggtcagcgatgaagcgttgctgcgccgcatcctgcagaacttcctgtccaacgcactgcgctacagcgaacgtggccgcgtgctgctcggctgccgtcgccgcgaaggcctgctgtggatcgaagttcacgaccagggccccggcattcccgatgcgctgcagggcgagatcttcgaggagttccgccgcctgcacgacggccagcagcgcggcgccggccttggcctggcgatcgtcgaccgcatcggtcggctgctcggccacccgatccgcctgcgctcgcagctgggccagggaagcgtgttcgcggtgggcgtgccgttcggcgaagccagcgcgattcccgctactgctcctgtgccggtgctggtgcaggaaccggccgcggacaatccgctgcgcggtcgccgggtgtgggtgatcgacgacgatccgcacgtctgcgccgccagccgcgcgctgctggagcgctggggctgcgaggtggcgctggccgacggcccgcaggcggcgctgcagctggcggcaacaggcgcggtgccggagctggtgctgctggatgtgcgcatgggcgatcaccacgggccggtgctgtacgagacgctggccgagttgtggcaggcccgcccgccggtggtgctggtcaccgccgagcgcgatgcgggattgcgtgagatggccggcgagcgcggttggggaatgatggccaagccggtgaagccgccggcgctgcgggcgttgatgagccagttgttgatccgccatcgcgggtag

SEQ ID NO: 498685 - DNA, 621 bp, Stenotrophomonas maltophilia
atgcgtgcattgctgattgcgcttctcgtggtcgccactacgctgctggcgacaccgacccgcgcggagcccccgcctatgcgggtgatcacgggcctgggctgccccgactggctgatcccaggcgcgcccacgctcgacgcgcagatcaccggccatccggagtggaccttcgcctgggctcccgcgtcctataccaatcgcgatcccatccggatctacatccagtccttcgactgcgattcctccgacattgcaggctattacttccggatcgcagccattgcccatgaagtgggacacgcactgtatttcgaaggtatcgccttgagcacccgaggtgcgttcatccagcacttctgcaccatggaggggaaagcggtactcaacaacctcaccgcgcgcagtgagcttctggtgaccagcctggggtactacgacatcggcgtagctgcgtccaacggtcctggcctcatcgcacaggccgatgccggcggtgaagacctggaccggcaggtaggtaagctgttctgcgacaacaacgtaacttcaaccaccggcgagaactacaacgacttctacggaagaatctacgatgaagcgatcgcagcccgtccctga

SEQ ID NO: 498686 - DNA, 429 bp, Stenotrophomonas maltophilia
atgaagtacgacgacgccagctggcattccggcggtgatttccccacggatcttcctgcagaggctggggctactcacattggcatgtacctggcgtggctgctgctacagggaatggcaagcgcggaactcgcggaagacgcagaagaagacctgcaagcgctgctggaacgcaggacgacgccaggcctgttcctgctggagtgcagcgacggcaaattcgtcgacgatctgatcagtgatgaagccaacacgttcaccgctgcgtactacgacctcgagaatggccagtacctggacgactatgaggaacagctgggcgccaatgtcccggatctgtaccacgtcgccgatacctgggagaacttcgaccgcctggcgccggtgattgcccagcgcttcgccacttggcaggcaacgcaatcctga

SEQ ID NO: 498687 - DNA, 864 bp, Stenotrophomonas maltophilia
atgatgcgcatcaccctgcccctgctggtgcttgccgccagtctactctctgcccccgtggcgatggcgttgaacgagtacggcatcgaaggcatgggcgtggtctcgacccgcgccgacgagggccgcgccacgatcagtgccgatggccggcgcatcgtcttcgcccgccgcggcgaagccggctgggacctgtgggaggcgcgcgtggtcgatggccgctggcagcaggcgcaggccctggcggtgggcgtggccggtgaggcccgcgatccgtacttcagccgcgacggccgctggctgttgttcgccgccggccgcgaaggcgcgctggcgctgtaccgggctgcagtggaagccgatggccggctgggcaaggcgcaccccatggccggcgacggtggacgccacgaagagcgcgggccggccctgagcgcggacggcacgcggctgctgtttgcccgccaacagggccgtggcgccggctggaacctgttcgtggcgacgctggatgcgcagggcatgcgcggcccggccaccgcattgacagcgttgaacagcgccgatgacgagaccgacggcgactggctgggcaacgatggcgcagtggtgttcagccgcggcaacggcacgaccgcacaggtgtggagcagcggctgcgcgtggagtggcgcggccctgcaaccgttgggactgtcgttcaaccagaccggcggctggaccggcgcgccggtgatcgacaacgccaagccaggcgaaatgatggtggccagcagcgcggccagggcaccgcgtgccggtggcgtggacgtgtaccggttggcggtgccgaaggtggaggcggtggccgggtgcgtgcggtag

SEQ ID NO: 498688 - DNA, 1269 bp, Stenotrophomonas maltophilia
ttggttggcacggaacccacagcgccgaccaaggtcggcatctaccaacaacggttgccggccagcggccggcgctaccgatccgctactctgcgcggcatgacccaacgcccgccgcgccaacccctcatcgatgccctgcgcggattcgcgctgctcggcgtgttcctggtcaacctgcgcttcttttcgctcgatgcactgatgaccgaggccgcgcagcagaccctgccaagtgccccgtttgatcacgccatccgcaccggcatggaatggctggtggacatgaaggcgatcacccttttctcgctgctgttcggcatgggtgtggcgatgcagatggacggcaatgcgcagggcagcatggccgcgcacctgcggcgcatgggtgtgctgctggtgatcggcctgctgcattcggtactgctgtggtggggcgatatcctgctggtgtacgcactggtcggcttgctgttgccgctgttccggcacctgggtgatcgtgccctgctatgcagcggcgtgatcatcgccctgctgccaccgctgctgtcgccgtggatacgcgaatgggtggccctgctgactccgcgcgcgcagatgaatgccacagcgctcgatgcattggcgcacggcagcctggcccaggcgtggtggcgcaacctgcaattggcggcgtggctgaagctgagcaactgggcactgctgctgttcgtgctgggccgcttcctgctgggctactgggcgggccgccgcggcttgttgcagcaaccgcgcgcgcatctgcctctgctgcgcgtgatcgctctcggcggtctgctgctgggcatcgtgttcctctggatcgatgtcaatgcagatgcgctcaagcaggcgtggccggcgctgcgtgggggcgtgcccggctacctgctgcgcgtgtcgtaccgcgttgcgccgctggcattgggcatcgctgcggcggcgatcttcgccctgctctatctgcgcccgtgggccgaacgcgtgctgcgcgtattcgttccggccgggcgcatggcactgagcaactacctgctgcaaagcgcgatctgcgtaccgctgtttgccggcttcgggctgggcatcggcccgcggcatggattgtggccggtgctgctggtggctgcagtagtgttcccgctgcaactgctggcgagcgcatggtggctgcgcggccatcgtttcgggccggtcgaatggctgtggcgcagcgccagcgaagggcaatggctgccgttgcggcggtag

SEQ ID NO: 498689 - DNA, 1410 bp, Stenotrophomonas maltophilia
atgacgcagaccactgtaagcgtgtcgttgcgctaccgcgtgctgcgttggttggccagcctggcctggttgaagtcgatctaccaccttctgccggcgcgcctgcgcaatcggctgacagggcgtctggttgcgctgccggggccgatctactgccgtttcgagaacgaagcgcaatgggccgagcgcaggctgcctgtgaccgacgcgccggtgcacttcttcggccagcccgatccgtcctggcaggggcacggcgtcaacgtgttcgcctacctgcgtggccagttcggcctggccgagtgcgcgcgcatgtacgcacgtgcgctgctgggcacgcattacccggcggccctggtggatgtggacatcaacctgccgcatggttgggatgaccgcagcctggaccagtacatcggcgatgacgcgccgcatcgcgtgcatctggtgttcatcaatccggactttctggaagccgcgctggaacagatcggcaaggcgcgcctgcagggcggctacatcatcgcctgctggttctgggaactggagaacattcccaagacgtggctgtccgccctggacaaggtggacgagatcctggtggcctcgcgctacgtcggcgaagccttcgcgcgcgtcaccgacaagccgatcctgtgcgtgccgctgccgctgagcgaggtgggtgacagcggcctgcagcgccaggacttcggcatccccgatgatgccttcgtgttcctgacgtccttcgatttcaattcgtacgtgcaccgcaagaatcccttcgcggccattcacgcgttccagcaggcgttcccgcgcgagcgccaggacgtacagctgctgatcaagaccagcaatggctaccgccggcccgatcgcctgcagctgctgctggacgcggtgaaggatgatccgcgcatcgtggtccgtgaccaggtgctggaccgccccgacgtgcaggcacttcagcgttgctcggatgtctatgtgtctctgcatcatgcggaaggcttcggcatggggctggccgagtgcatggcccagggcaagcctgtgatgggcacggcctggtcgggcaacatggaattcatggatgccgacaacagcgcgctggtcaactacacgctggtcccggtggccgagggcgaatatgcccaccatgaaggccagcgctgggcggcggccgacgtggacgatgcggcgcgctggatgcgccgattcgccgatgagccggagcttgcccgtgccatgggcgagcgggcccgtacctcggtgctgcacacgctttcgcccgagcgggcggcggccgcgctgattgaacgtatcgaacagatccatcaacagcgcggcttcatctccggggcaggcgcgtccaccgtgtcccagcaggagggacagtactga

SEQ ID NO: 498690 - DNA, 789 bp, Stenotrophomonas maltophilia
atgcacagctattcctctaccctcaaggacctgcgcgaagggatccgcggcgccaaagtgtccttccatatcgccaagggtgacatcaaggcgcggtaccgccgcagcatcctggggccgttctggcagtcgctggccaccgcggtgggcgtggtcggcctgggcctgctctggagccagctgctcaacatcgagcgcgagaagttcattcccaccctgacggcgggcctgatcatctggcagatgctgtcgggcatcctgatcgaaagctgcggcctgttcgtccggcaggcctcgatcatccgcaacgtggtcatgccgctgtcggtgcacccgatgagtgtggtaacccgctacatcgtcaacttcgcccacagcctgctggtgttcgtgatcgtggcggtgttcatgcgcatcgaagtgaactggaacacgctgctgttcattcctggtctggcgctggtggtggtgaacatgctctggctggcgttcgtgtttggcgtgatgggcgcccgttaccgtgatctggagtacggtgtggcgtcggtgatgccgatgctgttcctggtcagcccggtgatgtaccgcctggaatatctgccgttctcctcgaagatcctcgaattcaatccctttacctacctgatcgaagtcatccgcgcgccgatgctgggccacgccccgtcgctgcagatctacctggtgctggtgggcatggccatagtcggctggtcgctggcgttctggttcctgcacaaggccaagctgcgactgcccttctggatttga

SEQ ID NO: 498691 - DNA, 759 bp, Stenotrophomonas maltophilia
atgactgccaagctgaacttcgagaacgtcaccctccgttacccgatctacaactcgcacagcctgtcgctgcgccgcaatctggtgggtatcgccaccggtggccgcctgcttgccggcagcggccagattacccaggtcaccgcgctggacggggtgtccttcagcctcaagcagggggatgcggtgggcatcgtcggccataacggcgcgggcaagagcaccctgctgcgcaccatggccggcatctatacgcccctgcagggtcggatcgagcgggtgggccgggtggcgaccatgctggaggtcggcgcgggcatggacccggagctctccggctatgagaacatccgccggatgggcctgatgctcgggttgtcgctgaaggagatcgactcgcgcattcccgagatcgaggaattcaccgatctgggcgacttcctgcacttggccgtgcgcacctattcggcgggcatggccatgcgcctgatgtttgccgtggccacctgcaccacaccggacatcctgcttgtggacgaagtgttcgatgtcggcgatgaggccttcaaggaacgcgccgcccagcgcatgcacaatttcatcaagtcctcgcagatcttctgcctggcgtcgcactcgatggatacgattgccgaatactgcaaccgtgtcttcgtgctcagccacggtactctgcgggaaatctcaatggaccagctcaggtcggaaggatatggcgttgaaaatcaagctgggtaa

SEQ ID NO: 498692 - DNA, 2541 bp, Stenotrophomonas maltophilia
atggcgttgaaaatcaagctgggtaatgctgtaagtagtgctgccgataaggccgcgcagtcgcgctcaagcgacggtttcctagctccgggggaggagctggtactgagcagttccccgtatgcctgcatggatcctgtcaccatgcggggattcgccttgcctgaaacggacggggtctggtccagcgctgcggtcagtacgatcgatgtgcgcctgcgcgaagtcgatgccagccgtcgttaccgggtggtgattggcgcgattgcgtttgaagggggcagccatcgggcgttggtttcgatccgggttaacggtgggcctgcccatcaggtgttggccggcggatcgggctggtcctcgatcatcgcggattgggagatacaggtcgtcgggaagattccgatggtccgtatcgagttccaggtcgccaatccaatgtcgcccaacgcgctgggtctcggtgatgacaatcgcctcctgggattcaaggttcgctcgttgcagttgctcgatctggggccggccagcacggcggtggcggcaacgcccgtgcccgtgcagaccgtggcagaggcagagatgccagaggccgccgatgcgggcgccgtcgggatctttacccagtcgccgacggagaccattcgcgcgcttgccaagcgcggcccgattctgcgcatgctgttgctggacaagaatcctgtcgttcgcctggtgcgttggatgcgacgggtcagccgcaacatggaggagatgcgtcgccagcttgacctgatccgcatcgattccgcgcggcagacgcgtgagcttggcgaacgcgtggacaacatcgagatcgatgcccgtgtgcaggagcgcgagcgtcggcgtgccggttccagcgttgatgcgatcatcgagcggctggagctgaatcatgctcgcctgcttgccatcgaagagtccgcgcaccaggcaggtcgcatgcatgagcagcatcgcgatgagcatgcagacagtctggagagcatcatcgccacgaccgacggtcttggccgtgatgtggccgctgtactggacactctcaacacgaccctgtccgagtcgatgcggatgttgcgtgagttcgagggcgtggacaacaagctggcgggcatggaccgggcgctgaagttggtgcagaagcagggcgaggatcatgcacgccatgcgatttccggtatacgcgaactgcgcgaacaactgcacctgtcagtgcagcagcagcaggtccgttcggaggcggcccaggccggcatcgagtcgagcttgcaggggatgatcgagcgccagtggtcggagtccgacgagcttcgccagcacatgcattctacactgcagcagctggaaaaccgccaccagcacgagcgcgaggaactcaagcgccaggtgcaggacgtattgaccgagggtgcgcgggtgctggatgtgcgcagcagcgtggacgccgaagtgctacgccatcacgtccttcgactgcacgaacggcttgaccggctgccggtcattgcaccaggtaccggtgcagcggtttacacgatgggcgatgcggccgcctcggaacagaccctccagctggttgcccagttgcaccagaagctggacaacagcgaaatcgagaccggccagattctagagctgctggtgggcatcaaggagcgggtcgaaacccagcagctggtgctgtccagtgccacagggcgcctcgcctccccgtcccagcgccgcgtgctgcggcggcatgacggctggctgatcgcggttgggttcggcacattctcctgtgccgaaagtgacgacctgctggcaatgtgcctgcttgaaagtggcgacgtcgagcttggcctgcggttgttcctcgagcatgcgctgaagccgggcgatgtcttccttgatgcaggagccaacatcggcctgcataccgtggccgcagcgaatgtggttggcccgtccggcaggattttcgctgccgaggcgatgccgcgcacccaggagcacctgcgtgcatccctgcgcctgagcggggtggaggaccgtgtacaggtcctgccggtcgcgctgggagcccacaacgaggatggccgggaattccacatcggtgccgttgccggccacagttcgctgtatccccttgacggtgagctggaggtcgttcgtgtggatgtcaggaccgtcgatggcctgttgggcgagcagtcggtcgcgctggccaagatcgacgtagagggcgccgagctggaggtgctggcgggcatgcgtcaactgcttgccgccaatccagccatgggaatcattgccgagtacgcggtatcgcacctcgggcggtcggggacaagtgaagctgaatgggacgccttccgcagcgggcacggcttcgatctgtaccggatcgatgatctgacgggcgcctgcctgcgcctggagggtttcgcggacctgcgtggatacgccagctcgaacattctgctgtgcccaccggccagcctgctaccggctgccgttgtggcgggtggtgcccaatga

SEQ ID NO: 498693 - DNA, 633 bp, Stenotrophomonas maltophilia
atgagcaaggttgctgtcatcggcgccggagggcacgccaaggtgatcatcgatctgctgcgtggcgggggccatgacgtggttgcctgcctggatgcggggcgcgtaggccagatcgtcaacggggttccggttctcggcgacgaacgcgtggaactgccccggctcaaggagcagggcgtggatgcggtcttcgtcgccctgggggacaatcggctgcgtcaaaaggtggtggcggcaatcgctgcagccggccttgagatgatcccggcagtgggacgctccgcggtgattgctcccagtgcccgcatcggtcggggctgcgccatcatggaaggcgccatactgaatgcggacgccgtagttcacgattttgctataattaacacaaatgtgtccgtcgaccacgactgcgtggttggcgccttcgctcacatcgccccgggcagtacgcttgccggtggtgtggaggtggggagcagcgtctttctcggtgcaggtacgagagtgattccgggcatcaagatcgcggacggcgccgttgttggcgctggtggcgtcgttgtcagggatgtcggctcagccgggacgtgggtcggcgtgccggcacggcaaatcaagataaaggactaa

SEQ ID NO: 498694 - DNA, 1125 bp, Stenotrophomonas maltophilia
atgttggcgtcaaagcggattccggtagcagtgcccagcctctccggaaatgaaaagaagtacgtgggccagtgcctggattcaacgtggatctcttcggcgggtgagttcattggtcgtttcgagcagagcttcgcggacttctgcggtgttcgccatgcggtggcgatcaataacggcacgaccgccattctcctggcgctggtggcgttgggggtcggcgaaggcgacgaagtgctgatcccgaccttgacttacatcgccacggcgaatgcggttgcctactgcaacgccaagccggtcctggtcgactccgagccgggcaccatgaacatggatccggccaagctggaagccctgatcacgccccgcaccaaggcgatcatcgtggtgcacctgtatggccatccgaccaacatggggccggtcatggagatcgcgcgccgccacaacctcaaggtcgtggaagacgccgctgaggcgcatggtgccgagtatcagggcacccgcgtgggtggcatcggtgattgcgccaccttcagcttcttcggcaacaagatcatcactaccggcgaaggtggcatggtgaccaccaatgatgatgagctggcctcccgcctgcgcctgtaccgcggccagggcatggacccgaagcgccgctactggttcccggtggtgggtttcaactaccgcatgaccaatgttgctgcagcgatcggcgtggcccagatggagcgtatcgacgaagccctgcaggtgcgccagcgcgttgccggctggtatgaggcggcctttgcgcagcatgcggatctggtcgagcgtccggctgtggccgagtacgcccaccatgtctactggatgtacaccgtgctgttgactggcctgagcgagcagcagcgcgatgaagtgatgcgcctgatggatgccgatgggatcgaaacgcgcccggtgttctacccgatgcatgtgctgccgccttacctcgaagacggggccgcctacccggtcgccaacgaccaggctgcgcgtggcatcaatctgccgacgcacgccggcctcactgtcgaggacgtcgagcgcgtcgtggaagccctggtttcggccatcggccgcgtgagcgcctga

SEQ ID NO: 498695 - DNA, 1038 bp, Stenotrophomonas maltophilia
ttgcgtattgccatctgttcgtcctttgtaccgttcgtcaatggtggagcacgcttcatcgttgactggcttggaagccgtctgcgcgagcatggccaccaggtggagatcatctacctgccgatggtcgagacgccgactgaactgctgcagcagatggcggcctatcggataatgaatctgtccgattcggttgaccgggtgatcaccacccggccgccggcccacctgatccagcatccgaagaaggtggcgtggttcatccatcatttccgcatgtactacgacatgtgggatacgccttatcgcggcttccctgatgatgcccgccaccgcgccctgcgcggcgcgctggcgagggctgataccacggcgctggcagagtcgcaccggcttttcaccaattcacaggtggttgccgatcgtgtcaagcgctacaacggcctagatgccgaggtgctgtatccccccctgttcgatgtgtcccatttccgggatgcaggccagggcgacgagatcgtgtacgtctgccgcatggagcagcacaagcgccagcacctgttgctggaagcgttcaagtacgtgaccaccccggtcaagctgcgcctgtgcggtaccagcagtgggcccggctacaccaatggtctgcgcgccttcatcgttgccgaaggccttcaggatcgggttgcctgcgttgaccgttggatcaccgaggaagagaaggctcagtggctgtccactgcgctggctgcggcgtacctgcccgaggatgaggattcctacggctatccgtcgctggaggcggcacaatcggcgaagccgatcatcaccaccaccgattccggcggcgtgctcgagtttgtccagcatggccacaacggcatgatcgccgagccggacccgcgggcacttgccgaggccatcgacgcattgtggatggaccgcgagcacacccgccgcatgggcgaagctgccaaagcgcgcgtgcaggaattgaagatcaactgggaccacgtcctggagcgtttgctgtcatga

SEQ ID NO: 498696 - DNA, 1038 bp, Stenotrophomonas maltophilia
atgaaggtccttgttgtcaacaacatggtgccgggactgcggggtggtgcggaagaactcgcggaccagctcgtcgttcacctgcgccaggcagggcaccagtccgagctgctgcgcatcccgttctcgtggcagccgccggaacggatcatcgatgagatgctgatgtgccgcagcatgcgcctgctcaatgtcgaccgggtcatcgccatgaagttcccggcgtacctgctgcccttcgacgagaaggtcttctggcttgcgcatcagtaccgccaggcctatgacatgtgggatgccggccacagcaacattcccgatactccggagggccggcagatccgtgccgcgatcaccgaagcggacaatgatgcattctcgttggcgcagagcatctatgccgtaggccgcactgtgcaggagcggttgatgcactacaacggcatcccgtccgaactgctgcgcgcccccttgaacgatgccgagctgtttaccggcggcgagtatggtgattacatcttcgctggcggccgcatcaatgccggcaagcgtcagcaccggctgatcgaggcgcttgcgcagacccggtcgccggtcaagctgatcatcgccgggccggccgataccccggcggacgagcagcgcctgcgtgcgctggtggagagccatggcctgcagagccgtgtaaaactggatattggattccacccacgtcaggtcatcgccgactacgtgaatggtgcattggcatgtgcctatctgccgatggcggaagattccttcggctacgtgaccatggaagcctgccagtcgcgcaaggcggtcatcaccgtggacgattccggcgatttgaccgagctgatcaagcaggggctcaacggctgggtgtgcgccgacgataccagtgagatcgctgctgccatgaccgaagcattcgccgcacgggcgcagacccgtgagcgcggcagcaacgcatacgactcatggacccgcctggacatcaactgggcatcgacagtggagaaactgacgcgatga

SEQ ID NO: 498697 - DNA, 1296 bp, Stenotrophomonas maltophilia
atgaagattgtctgggccggcccctactgcggaccatcggcgatcgctcgcttcagtgtccacgtcgttaacgccctgcgtgggctgggccacgatgtcgccatctatcgtactgaaaccggcgaggccgctgcctatccggccttgcctgatccggtcgtcctgcgttcgggcagcgcgatggaagaagagtggctgcgtaccgcggatctggtgttcgccaacatcggtgatcactacggtttccacggtggcatcttcgatctggcgcgcaagcgtccgttcatcggcatcatgcacgactggttcgttctgaacctgttctgggaccgattgaaggccgagggccgtcctcacgatgcgccacggatcatccaggggctgtatggccaggaggccggtgagctgtgtgctgcggcgacctccgagaccatcatgccggtggccgcagcgcatttccccatgacccaatgggccgtgtcggatctgctgggttgcatcatccactccgagttctaccggtcgaaagtgcaggcccgttgccctgggccggtgcataagctctcgctggcctatccggcgcctgacgtacggcaggacctgcgttcagcggtggacgatcacagtcgcctgcgcctgtgcacgctgggcgtagtgaatccgaacaagtgtgtcgacacagtcgtacgtgcgttgatgctggatcccgcgctggccgcccgcaccgaatatcacgtgcttggaggtatcagtgaccaggagcgcaggcgcctggaatcggtctgcgcggaagttggtttccggggcctggtgctcgaaggccgggtcagcgatgaacgccttgtggaaggcatggcagaggccgacgccatctgctgcctgcgcgatccagcgctggaaggggcctcggcctccgcgatcgagggcatgcagtcgggggtgccagtggtggtgtccaatgctggtttctacgcggaccttcccgatgagtatgtgctgaaaatcccgcagggcgattgcacggaagagcttctggcgcaattgcacttcgttgaccgcgaacgcggcgccgctcgtgagatgggcgcgcgtgcacgcgcctgggctcgtgacgaattctccgccgtgcgctatgccatggggcttgatgcactgatgccggagttcatagaaagcgaaccctacattgccactgccagggcgcttggccgcgagctggggcggctgggggtgcctggcaacagcccctcggcaggcaggctggctggcatgctcgacggcatgttcagtctctga

SEQ ID NO: 498698 - DNA, 1035 bp, Stenotrophomonas maltophilia
atgaaatctgcagtcatcaccggtatctctggccaggacggcgcttacttggcgcagctgctgcttgagaagggctacaaggtctacggcacttatcgtcgtaccagctcggtcaacttctggcgtatcgaagagctgggcatcgacaagcacccgaatctgcacctggtcgagcacgatctgcaggacatcggctcctcgatccgcctgctgcaggacagcggtgcgaccgaggtctacaacctggcagcgcagagttttgtgggcgtgtccttcgaccagccggtgctgaccgcgcagatcactgcgctgggtgcgctgaacctgctcgaggcgatccgcgcggtcaacccgaagatccgcttctaccaggcgtcgacctcggagatgttcggcctggtgcagcaggtgccgcagaccgagcagacccagttctacccgcgtagcccttacggtgtggccaagctgtacgctcactggatcactgtgaactaccgtgagtcctacggcatctttggtgccagcggcatcctgttcaaccatgaatcgccgctgcgtggccgtgagttcgtgacccgcaagatcaccgactcggttgccaagatcaagctgggcaagctggatgtgctggagctgggtaaccttgacgccaagcgcgactggggctttgccaaggaatacgttgaaggtatgtggcgcatgctgcaggtcgaggtgccggatacctacgtgctggccaccaaccgtaccgagaccgtgcgcgatttcgtcaccatggcgttcaaggcgatcggtgtcgaactggcctggaatggcacgggtctggacgaggtcggcacctgcacggccagtggcaaggtcctggtgaagatcaatcccaagttccaccgcccggcggaagttgatctgttgatcggcaatccggaaaaggccaagcgtgaactgggctgggagccgtcgaccacgctcgaggagctgtgcgagatgatggtcaaggccgacctgcgccgcaatgaggccggcgcttcgttctga

SEQ ID NO: 498699 - DNA, 885 bp, Stenotrophomonas maltophilia
atgaagcccattgcagcgataacgggaatcgaaggattcaccggcccctatatggccgcggaactggagcggcttggttaccaggtgaaggggatcagtcgcaaccctgttccagggcgcgacaatgaagtcgcggacattctcgaccccgatgcgatcggcgcggtgatgaagcggctgcagccgcaggtggttgtccatctggcgggggtttcacacgtaacccatcgtgatgtctccgcgatctaccaagccaacatcatgggcacgcgcaacctgctggaagcgctgacagagctgggtacggcgccgaaaagcgtgctgctgcccagcagtgcccacgtctacggggcctcttccagttgcctgctggatgagacttcgccgatggcgccattcaacgactacgccatcagcaaagtggcgagtgagcatgtcggcacgttgtacatggaccggttgcccatcatgctgacccgtccgttcaattacactggagtcgggcagtcgccttcgttcttcgttgccaaagtcatcgaccacgcgcgccgtggcagtaccgatttgcgcctgggcaatcttgatgtcgagcgtgacttcactgatgtgcgtgatctcgtccgctgctacggcatgctgatcgagcaggggtgccgtggcgatgtggtcaatatctgcagcggcattccgacctcgctgcgcagcgtcatcgaaactgtcagcgagatctccggactggagtttgcgattgaaagcgatgccgagttgatccgcagccatgatgtcgatcgccttgccggctcgaatgcccgattcaccacgctgacgggggggattaccttccggcccctgcgtgaaaccttgcagtggatgctgcacgcctga

SEQ ID NO: 498700 - DNA, 651 bp, Stenotrophomonas maltophilia
atggatccgaccacttcaatccaacagctcatcgagcatttcatgaatactaagtaccgtagacttgcactcccgctgattctggcttccacctttaccctggcagcctgttcttccggcgacagcgaaaccccggcttcagcgcagcaggcagcggcaccggcagacgcaccggcggccagcgccgcacagaacaagccgctgacccaggaagaagtgtccatcgcgatcgagcaggtcgggcaggccacctacaacgccgccgatgacaccctgaccgtcgccttcaaggtcaccaacaatggcaaagccaccctgcccgccaccggcggccagaacgtgtcggccggtgtgctgcagctggtaccggacccgggcaatgccgacggcaagcgtggccaggacatcggccgggccgtgttcaacggtgacctgcaggtcggccagtcgcaggaactgaaggcctccgttccggctgccctgctggtcggcaacaagctccaggttgagctggtgcaggaaggcgtggcgtggtttggcttcaacttcaagcagccggtgctgatcctcggcccgtttgcgcgctgcgccgacggcaagggcctgtgcgacgacaagggtgcgccgatcgcggcggccacctcgccgtaa

SEQ ID NO: 498701 - DNA, 2196 bp, Stenotrophomonas maltophilia
atgaacctccgcactcatttcactcaacccgccaccttcctgcagcgctgggggttcctggcaattccctgcgcgatcatgatcgtcctgctgtggttgccgttcgggttcagcatcaccggcctgatcgaggagtgggacgtgctcgccctgttcaccctgcacgagcccttcgtgtgggtgggcccggaaagtccactggccgcgcatcggcttcgcccgttgaccatcgcgccacacgcgatcggctacatgctggatcggaactccttcgcgtactggcatctgctgctgatggggtcgctgctgctcaagggcatcggtgccagcctggcaggctggtggcttacccactcgcgacgctgggccgtcgtgttcggcctgctggtggtgctctacccggcggacaccatgcagttgtcgttccgctcgttccacatcaactggtccatcgcgttgtcgctgcttggcgtggcggcatgcgcatatggctacaccctgcgcaagtcccggcagcagaccctggcaatgctgctggccgtaccctgcgcggtgcttgcaacctttgcctatgaggcggcgctcacattcgtggtggtcccgctgttgttgctgtatgcgcgcttcggtctccgtggcgcgttgggcctggtcaaacgccaccgctgggtgaccgcgtggtggatcctcggcgttgcgatcaacatcggctacgttctgtatgtcaagggcagtggcgccacctaccaggacaccctggtcggtccgactatcgatctgatggaccgcctgcaacgggtgatcggtgtcggcttcgggcgcaccgtgctgggtggttggctggatgcgattgccatctgctggtacgagtaccgcacccgcctgtacctgctgctttcagcggtgctgattggctacgccgtctggcgcagcagccgtcccctgccgcaggaagatggcgtggctgagatcgccgcgacttcggcctcggtggtgagaatggcgatcatcgcactggtgatgatcggtctgggctacctgcccttcgccgcctcgctaccgcacctgctgatctcacaacgcacgttcctcggcgcttcccccggtggtgcgctgctctgcgtggccgtgctgatcgcgatgacccgccgcagttggggcatcggcgtggtgctgaccactgtcgccctggtggtggcgtttggcgcacaaatgttccagttcgagcattaccgtcgtctgtcgaatgcccaacaggtcctgctcggcgatatcgtcgagaacgcgccgcccttccgtcccgaccagaccctggtcatcatcgacaagcgcgatcagctgaacgatgtgtggatggtccgggagggcatggtgatggccctcacctacctgtatgaccgtcagatcgagcggccggtgatctgcagccctgcggggggcatctggcagctccccaatgcggagggtcgcgtgggaacctgcgaggaatccgcagagggctggacgctgaccgaagcaccgatgacgggcacgcccggcgaagcaccaccgagccgcctgctgcgccgcgaccaggctgtcgtggtgacgctggaggccgatggaacgacaacctccagcgtccccgcggatgaacgggttcagtacaagcgcatgctggaaaccggacattcgagcctggccgagcgctatcgtcacatcctgcgccgccagccttggcctctggcattcgatcagttccggagccaccgcggcggcaacagcttccgctgggacttcggtcgctggtggagcatggaagaaccgacccgcggttccggctggaccggcagcggctgggtcatcgaccatcgcctgctgccgatctggcgttcagttgcgtggaagaccctgccggaagccacgctgcagttcgatctgcttcctgcgccccgtccctacaccctgaccgcgcgggtcctccagatcttccctccggcaaccccggagtcgatcaaggtgcgtgtgaacgaccagtggctcgccgtccactggcatgacgccacgaccttgagcgtggatgtgccggccgctgcgctgcggattggcaccaacgtgatcgccttcgacagcccggtgacagcggacccgaccccgttgagcatccaggtcgactgggtcgatctggccccggccccccccactcccacgaagtga

SEQ ID NO: 498702 - DNA, 432 bp, Stenotrophomonas maltophilia
atgccgcaggttgattcccgcggtacacgcccccccacgccaccggaaccggcgcgccctgcatttcatgtgctggtcctgcggttcctggtgggcggtgcactgaacacgggggcaacgttggtcctttactgggtgctgctgcgcttcatccattaccaagcggcctatcttgtcagctactgcgccggcatcgtgttgagctatgccctgaacacccgctatgtgttcagggcaaggcacagctggctcaagttcgcggtatttccgctgatctatgtcgtggtctatgcactgggggcgttgaccctgaaagtggccgtgggccatctgcaggtgccacccgcgcttggcccactgatctccatcatcgttacgcttcctgtctcattcctgctgacacgggcgctgctgcagcgtcccggtcgctaa

SEQ ID NO: 498703 - DNA, 930 bp, Stenotrophomonas maltophilia
gtgagccactatgtccatcccaatgccctctgcgagagcgatcagatcggtgagggcagccgcatctgggcattcgcacacgtgctgccgggtgcgcgtatcggacgcgagtgcaacatctgcgatggtgtcttcatcgaaggcgacgtggtggtcggtgaccgggtcacggtgaagtgcggcgtgcaactgtgggatggcgtgcgactggatgatgacgtgttcatcggccccaatgccaccttcaccaacgacctgttcccgcgcagcaaggtctatccggaaaagttcctcgggaccgtggtggaatcgggcgcctccatcggtgccaatgccaccattctggccggcaccaccatcggcagcggcgcgatgatcggcgcgggcgccgtggtgacccgttcggtgccaccgaacgcgatagtggtcggcaaccccgcgcgcatcgtgggttacgtgtcggacaaggaagggacggcagcggccaccgatgcgggcaagcagggtgtttccgacaccgtggtgccgggcgtgaagctctaccgcatgcccagcttcgtggacatgcgcggctcgctgtcggtaggcgacttcgacagcttcctgccgttccatgccaagcgctatttcctcgtgtacggcgttcccacccaggaaacccgtggtgagcacgcccacaagcgctgccaccagttcctggtctgtgtctcgggctcggtccgggtgctggccgatgacggcagccgtcgcatcgatgtggagctgaactcgcccgaccagggcatccatctgccaccgatgatctggggtacgcagtacaagtattccaaagacgcggtgctgcttgtgttcgcttccgagccctacgattcggacgaatacatccgcgactacaccgagttcaagtctctggccaatgccgcaggttga

SEQ ID NO: 498704 - DNA, 948 bp, Stenotrophomonas maltophilia
atggcgccttcgctcgcgctggtcgtccccatctacggcaacgagggatcgatcgacgacctgctgcatgccgtggagtacatcgcaagctcggtcgaaggcagcttcgaggccatcttcgtcgtcgacggcagccccgaccgcagctacgcactgctgcgcgaaaagctgcccggctgtacgttccgcgcgcagctggcgagcctgacccgcaatttcggtgcgttccccgcgatccgcgccgggctggagctcagccgcagcgacctgaccgccgtgatggcggcggatctgcaggagccgccggagctggtgatcaatttctggaagcagtacgtgcaggacacctacgacgtcgccttcggcgtgcgtgaggcccgcaacgacccgatgggttccaagctggcgtccaccctgttctgggaggtctatcgccgtctggtgatcaaggacattcccaaggggggcgtggacatcttcgcggtcagccgtgacttccgcgaacgcctgctgaggctcaacgaagcccattccagcctgctggcgcagctgttctggctgggcggcaagcgcgcgttcgtcagctaccagcggcgcgagcggcagcacggcaagagcggctggacgctgcgcaagaaactgcgctacctgtccgacagcgtcttcgccttcaccgacctgcccgtgcgcatgctgaccgcgctagggctggtggcgcttgtgttcacggccctgctcggtgtgctggtactggcagccaaactgtccgggctagtcgcggtgcccggttacgccggcaccatgctgaccatcctcttcttcggcgcgctcaactccctcgggctgggcatcgtcggcacctacgcctggcatgccttcgagaacaccaaggcgcgcccgctttccatcctgcaatccgtcgaccttttcgagaaggagctcccgtga

SEQ ID NO: 498705 - DNA, 1104 bp, Stenotrophomonas maltophilia
atggacgccctgattcccgtcaactccctttcccgtcacattgcaccgttgcaggacgcgctgtcgtcacttgccggcaccgtcatcgccagcggctactacgtgctgggcccgaacgtgaaggcgttcgagcaggaattcgcccgttactgcggtgcggcgcactgcatcagcgttgccaatggcaccgacgcgctcgagctctcgctcaaggccctggaggtgggcaccggcgatcgtgtggcagtggtcgccaacgcggcgatgtatggcaccagtgcggtccttgcctgcgatgccaccccggtattcgtcgatacgaatgccgatgatgggctgatgtccgttgccgcgctgaaggcggtgctggacagcgcgccgctgcccaaggtggtcatcgtgacccacctgtacggcaagttggcccagatcgaggagatcgtcgccctgtgccacgaccgcggcatcaaggtgctggaagactgcgcgcaggcccatggtgccgagcgcggcgggcaccgggccggcagtttcggtgacatcgcctcgttcagcttctatccgaccaagaacctgggcgcactgggcgacggtggcgccatcgtgacctccgacgaggcgctggcgctgcgcgccacccagttgcgccagtacggctggacggccaagtacaccaacagcctggcgggcgggcgcaacagccgcctggacgaactgcaggccgccctgctgcgccacatgctgccgctgctcgatggctggaaccagcgccggcgcgacatcgccaaccgctatgccgccggcctgcgttctgatcgggtgcgccacatcggcaccgtcggcaacgagcacgtcgcacatctgtacgtggtccgctgcgacaaccgtaatgcgctgcgggcccacctgcaggcggccggcgtgcagaccgaggtgcactacccgctgtgcgatcaccgccagccctgccaccagggccgcttcgacgccgtctcgctgccgcataccgaagccgatgcggcgcaggtgctgaccctgccctgcttcccggagctgaccgacgcggaagtcgacacggtcatcgccgcgtgcaaccggtactga

SEQ ID NO: 498706 - DNA, 558 bp, Stenotrophomonas maltophilia
gtgaaggtggttgagacaaggctgcaaggttgcaagatcctcgagccggcggtgtttggcgacgcgcgcgggtacttctttgaatcctggaatgcgggccgatttgccgagcatggcctgccggctgcattcgtgcagagcaacatatcttcctcctccaggggcgtgctgcgcgggctgcactaccaatggccgcgttcgcagggaaagctggtgaccgtactggagggtgaggtttacgacgtggccgtggacattcgccgcggttcgcccacgttcggccagtgggaagcgctggtgctgagcgcggagaaccgcaggcagttctggattccggagggcttcgcacatggtttcgcggtgctctccgagaccgcgctgttccattacctgtgcaccgatgtctacgtgaaggaagccgacgccgcggtgcgttggaacgacgctgacatcgccgtggactggccggtcagtgcaccgaccctgtctgccaaggacgagaacgcgcctttcctgaaggacatcgatgaagaccgcctgccggtctacagtccgtga

SEQ ID NO: 498707 - DNA, 2799 bp, Stenotrophomonas maltophilia
ttgctggaaccgcccgcctacctgacgcaggccgacctggccgcggtggcgcagctgtgggccctgcatcagtcggtaaaaccgccggagtggttcgacgtcggcacgatcctgcagtcgatcgtgtccagcgggcatggctgggtgtcatgtggcatgcatgatcgcgtgccggccaggcccggcgcaccacgtcgcggtacgttggggtggagcgcagagacgactcacggcaggttgctgctggcgccggcactgagcgtggaaggcgatgcggacggcctcgtactgggatctagtgccggttacctggatccggtctccggtgaagtcggccttctcctgctggacgtcaagccggaggacgcggacgcgttcctcgcccttccccacctgctccccgatgaggaaccgatcgtggcgcaactgctgcaacagatcgaccccgcgctgccgcgccccggtgcaggcgacacactgcctacgctgcagatcagcgccatgacccccgtgctgcgcctgcatacgatcaaattccggccgccgtggctcggcccccgcgacccttcgcaatgggccgatatcgcaaccgtggccttcgagtacgacgagcacgtgcggttcctggacgatccgagcctgttcgcccacgatccggagggccagctcgcaatgctgccccgcgacctgggtgaggaatcacggcgcgaggccgagctgcgcacggtgggcttgcatcgcgacacggctccgcgggcgccactggaaggcgccggcccgcagttccagctgcgtacccatgactggacacggttcctgctggacgacgtgcagcgcctggaagccttgggctggaaggtggaggcggacgaggatttccgccatcgcatcacccgggtggaggagatcgacctggacgtccagtcagacccggaagacgcgggctggttcaacctgggcctggacatccaggtggaaggccgcgatgtgtcgatggttccgctgctgcagcaggtgctgcaggccgaccctcgctggatgcgtggccagctggatgacatcggcgacgacgagaacatcctgttgacgacgggcgacaacacgcgcctggcactgcgggccgcacgactcaagccgatcattgccctgttggcggacctgtttgcccagcgtggcgcgccgctgcgcctgtctgcgcttgaccgtggccgcctgcaggcgctgcaggacactgcgcgcctgcagttccgtggccgcaaggatacccaggcgctcgtgcagcggctgatgcaggtacccgcaccgagcgaagtaccgccgccggcagggctggaggcaacgctccgcccctatcagctcgagggcctgtcgtggctgcagtacctgcgccagcagggcttgggcggcgtactggccgatgacatggggctgggcaagactctgcagaccctggcgcatctgctggtcgagaaggaaagtggccgcctggaccagccggcgctgctggtggtgccgacctcgctgctgcacaactggcagagcgaagcggcacgcttcacccctgccctgcgtgtgctgaccctgcatggaccggcacgtgaagcgctgttcgaggccatccccgaacacgatcttgtactgaccacgtaccccctgctgtggcgcgacgagcaggcgctgcaggcctatgcctaccatctgctgattctggatgaagcccagcaggtgaagaatccgaaatcacgcgctgccgtcaccctgcgcacgttgcaggcccgccatcgcctgtgtctgaccggcacgccgctggaaaaccacctgggcgaactgtggacgcagttcgatttcctgctgcccggcctgctcggcaccgagaagcagttcaaccagcattggcgccaccccatcgaacgcggcagcgaccatcgccgtgcccagctgctggcgcagcggttgcgcccgttcatcctgcgccgacgcaaggaccaggtcgcgtcggagcttccgcccaagaccctcattacccgtacggtcgaaatggagggcggccagcgtgatctctatgaaaccgtgcgtgcggcaatggaaaagcaggtgcgcgaggccatcagcggcagcgggctggcgcgcagccatatcgtggtgctggatgcattgctgaaactgcgccaggtctgctgcgatccgcgcctgctgccgggcaacgcaccggcacgggctgcaggctcggccaaactggatctgttgcgcgagatgctgccgccgatggtcgaggaaggtcgtcgcatcctggtgttctcgcagttcaccggcatgctgtcgctgatcgcgcaggcgctggacgatctgggactggcctatgtgaccctgaccggtgatacccaggaccgggccacgccggtgcagcgtttcatgcagggtgaaatcccggtgttcctgatcagcctcaaggcaggtggcgtggggttgaacctgaccgcggccgacaccgtcatccatttcgatccctggtggaatcccgccgccgaaaaccaggccagtgaccgcgctcaccggatcggccagcagcagccggtgttcgtctaccggttgatcgctgcaggcagcatcgaagagcggattgccgagctgcaggagcgcaaggccctgctggccgaatcgattctcgaaggcggtggcagcgccgggccgcgcttcagcgaagaagacgtgcaggcactgctggcgccactgccgggcctgccggccagacgtacccgcaggccgggccggccgtccaacacccgcagaggaacgtag

SEQ ID NO: 498708 - DNA, 1122 bp, Stenotrophomonas maltophilia
atggcccaagtgaccccgaaccacgccccccagctcgaacaggatgcccatgacccgggcctgatccgcctgtccggcacctggaccttgaagaccgcgctggccgcggccgaagtcctgcgcggcgttcccgacacgctgaccggcatcgatgccaccggcatcgagaagatggattcggccggcgtgctgcaggtgctgcgcgtggcgcatcgcgccgacctcggcgaggatgcactgcagttccggccggaccaccaggcgctggtctgcaccatcgaggaagtggctgacgaccggccccggcccaagcgcgatttcggcgtgctggcggcgctggaacggctcggtgtcagcgtccatgccactggccacaacatcaaggcgctgtgcagtttcctcggcgagaacctggtcaaggcagcacgcctggtcaaggagccccgccgtttccgcctgaccgccaccgtccaccagatggagcaggtcgggctggacgcggtaccgctggtggcgctgctgtcctacctggttggcgcggtgatcgccttcctcggctcgaccatcctgcgcgacttcggcgccgagatctacgtggtcgagctggtcaacatcgccttcctgcgcgagttcgccgtgctgctgaccgcgatcgtgctggccggccgcaccgccagtgcgttcaccgcgcagatcggcgcgatgaaggcgcgcgaggaaatcgacgcgatgcgcacgctgggtctggatccgatcgacctgctggtgctgccacgcctgctggcgctgctggtcaccctgcccctgctgaccttcatcgcgatgatcgcgggcctggccggcggcatcactgtcggcgcgttcgacctcgacatcccgccgcagatgtacatcgcgcgcatgcacgagacgatggaagtgcggcacatgctggtcggcctgtcgaaggcgccggtgtttgcgctggtgatcggcctgatcggctgcctggaagggctgaaggtggaaggcacggcgcagtcggtcggtgaacgcaccacctccagcgtggtgcagacgatctcgctggtgatcatcatcgacgccttcgcggcgttgtggttcatgcacatggactggtga

SEQ ID NO: 498709 - DNA, 162 bp, Stenotrophomonas maltophilia
atgaaccacatctatcgtcgtatctggagtgccgccaagcgttgttgggtggtgggcagtgagttgacccgtcgcaccaagggacgcgcgcgtggcggcacgcagctccccggggccgctcgcattgctttgcctgtcgacgacgagcgtggcagccactga

SEQ ID NO: 498710 - DNA, 4563 bp, Stenotrophomonas maltophilia
gtggcagccactgaacacggcgcggcgctggagccagaggaactgcagcagcgctgggcagattccgaactgttccacaacgcctggcaaatgatgctgccgatggggagcccagcccgctccaatgtcgcgtcgtctggcggaatggcgccccaaggcatcatctatcagctcgccatggtgagtgacaccgtatacagcgacctgcgcatgacgggtaaccggaccattggcctgggctcccgaaccatcgtcgaaggcaaccagtcggcagcctatggcaacggtatccgcctgtatggcaacaacagcgttgcgatgggggacgctgtgaccgtggacacttcacacggcactgccgttggcgcgctctcgcgggcatcgggtggttatggcgccaccgcgtttggcaacgatgcgcatgccaacggcggcaacaacatcgcggttggcagtggttcacgggcaggcagcggtggtggcggcatgggggcgattgcggtgggggccgatgccttcgccggaacatcaggctattcgggtgccattgcgatgggtaaccaggcgcgtgcgtcctacaacgcgttggccctcggctatcaggccagtgcaaccagttcaggtgcggtggcgatcggtgcaggttcggtcggcaatgagtccaacgcggtctcggtgggtagcagcagtatcaagcgacgcgtggtgaacgtacaggatgctcgattgaccggctccagtgccgatgccgtaaccggcagtcagctgtactggaccaagcaggacgtcaacagggcccagttgtctgcagacgcggcaaggtcagacgcaagcaaggcgcaaattgcagcaaacaatgccagaactgcggccgacaacgcgatgtctaccgccaccgcggcaggctacctgaccgccagcggctcgactgtgacgtcctcgcagcgtgcccaggcatcgggaacgggtgcgcttgcctcaggcctgaacgcgcttgccagtggctcgggcgcgagcgcgcatggatacaacgccaaggccaatgcgatcggctcgattgccatcggctccggcgcgaagatcgaggcgagttcctccaactacggcatcgccatcggcgcctcggcgagcaccggcccgaccgcgtaccaggttgcgatcggctatcaggcatctgctgcagggggtgcgagctccatggcgctgggtgcatccaccaaggccaatcattcgcgttcggtggctctgggtgtgctttcggttactaccgcgaatgatcaggtatcgatcggtagtgactctgtgaagcggacgatcagcgggatgaaggatggggtgctgagcgccaccagtaccgagggcgtcactggcaagcagctgtttgaaaccaatgcccaggtgggcgaggtggaccgcacggcgaaggcggcgcagacggcggcctctacggcaaaggatgaagccggcaaggcgttgacagcaacgacggtgctgggtggccttgtcgggcaggtgtctgccacaggcaatgtccgcctgggtgagaagaacagcggcacggtgctggacgtgcgcaacagcgcgaatgcgaaccggacgatcagaggcttgaaggatgggctgttgagcgccaccagcaccgagggcgtcaccggcaagcagctgtttgacaccaacgtcaaggtgggcgaggtggagcgcacggcgaaggcggcgcagacggcggcctctacggcaaaggatgaagccagcaaggcgttgaccgctacgacggtgctgggtggccttgtggggcaggtgtctgccacaggcaatgtccgcctgggggagaagaacagtggcacggtgctggatgtgcgcaatagcgcgaatgcgaaccggaagctgaccggcgtggctgatggcgtggtcagcgccagcagctacgaggccgtcaacggtaggcagctcaatgccaccaatgacaaggtgacgacggtggagggggtggccaggtctgcggggccagacgctgccgtagcgaagacggacgcaggcaaggcgttggccgaaacagcggcgctgggcggattggtggcacaggtttccgcagctggcaatgtacgccttggtgagaagaacagtggtacgacgttggacgtgcgcaacagcgccaatgccaaccggaagatcagcggtgtggcggatggactgttgagcgccagcagtgccgaagctgtgtctgggaagcagctgtattcaaccaattcgcgcgtctcagaacttgagggtgtcgcgcagttcgtaagtatcggatcagcccccttcagtgagcgcgcacaagccggtgtggcaggtgtcgcggtcggaaattctgccaagacggggctggatggaggaaccgcgataggcacgtttgcggaggcgatggcgaagaactccacctcaattggtcgtggggcagccgtttctgaggattcggagaatggattcgcaatgggggcaggtgcgcaggtcggcggaggcgctggcggtgcgtatggaggcgtggcgattggtgctagtgcaagcgttgaaggcggagctcacggctcgctggcacttggaaatggctcactagcagacgaagaaggagttgcatcatttgggggtgtcggcatccagcgtcgtcttgtaaacgtcgagcgtggcacagctgaccacaatgtctccaccgtctcccagctcaaggattccctctccaccctcgggggaggagcaggcatggatgccaacggcaacatcatcgctcctacttattcagtgcagagcgggacgcagaacaccgtcgaggatgcgctgatggcactcgatggcgccgtcatcaccgcaggccgccgcgcggacaaggtggaagaccagctgggttcgatcttccaggattcaccttcgacccgcgccgacggcatgaaccagatcgcgctgaatggcgtgaatggcatggtgctgaccaacctggctgacggccgagtggcgccaggaagccgcgatgctgtaaccggcagtcagttgtacgccgcagagcagaagatctcgcagaatcggaacgatctggaggcgatgcgcaaggagcgggagatgggtgagcaggccatgcgtggattggatgcgagcgtcatcgactacggcggtgcgcgtttgactggcgtggctgaggcagggctgtcggctgatagctcggacgttgtgcgcggaagtcagctattccgaactaatgaggcagtagccagtttggctgatcggttcaacaacgtgatagtggatcacgatgacctaagtactccggctgaggcagcgttcctgtctgtggcggttggtggggacactcgggctttgggagaaggatcgacttctgttggtagttatgcagcgtcacttggtaagcaatccaccgcaattggatacggtgcgcacatagctgccgatgcacttaccggagtatcgcttggccaagctgcaggcgtgttcgcagattggggtgttgctctggggagttacagtagggtggaggtgggggcaagatttgccgttgctgtgggtgctcagtcgatcgctgagtccgagatggaggcatcattcggtcacatgtcgttgaagcgacgcctcaccaatgttgccaacggcaccgccaaccacaacgccgccaccgtcggccagttgcgcggcgcactctccgccctcggcggcgaagtcgatgccaacggcaacatcgttggccccagcttcaacgtgcagggccagtcccaatccacggtcaatgctgcattggaagcgctcgatggcgcagtcgtcagcaccacctcgcgcgtgaaccaggtcgaatcccaactccgctccgtgttccaggaaaccccctcggtccgcgcagacggcacccaccagctcaccctggccggcgccaacggcatggtcatctccaacgtggccaacggcctgatcgcggccggcagccgcgatgcggtcaacggcggccagctgcattcgatgcagcagcagctcaatgggcgcatggacgggctggagcagcgcatcgacgatcagccgcaggcccgcgccatggcggcagcgtccacgccttcgccatccaccgaagagatcgcgccggcgccggagaccggcggctcgccgcagatcgcttcggccgatgaaggcgacaagccggccccgcagccaaagtcgaagcaggacgatacgcccaagccgcaggtcgacaccgccgacctggaaaagatgctggcccgtgccaacgagtacaccgacggtgcgatcagcactttcgagcgtcgcctggacaagatggacaagcgcttcaatcgcatggcggcgatgagcagcgcgcagagcgcgatggcgatgaacaccgccggcctggccacctacaaccgcctgggtgcgggcgtgggctacagcgagggtgagtcggcgatggccgtgggctaccagcgtgtgctgaacgagaagggttcggccaccttcagcctcaatggggcgttcaccaacagcggtgagcgcagcatgggtgtcggcgtgggcatcggctggtaa

SEQ ID NO: 498711 - DNA, 507 bp, Stenotrophomonas maltophilia
atggcaaccaagaaagctgcgaagaaaaagcccgccgccaagaaggcggtgaagaaggtcgcgaagaaggccgctgccaagaaggcagtgaagaaggtcgcgaagaaggcgaccgccaagaaggcagtgaagaaggctgcgaagaaggtcgccaagaaggccactgcgaagaaggcagtgaagaagacggcgaagaaggtagccaagaagtctcctgccaagaagaccgcgaagaaggccgtcaagaaggtagccaagaaggccaccaagaagactgccaagaaggcaacggcccgcaagccggccaagaaggtcgcgaagaaggcgactgccaagaaggccgtcaagaagaccgccaagaaggcagtgaagaagaccgcgaagaaggccaccaagaaggctgccccgaagaaggcagcgaagaaggttgccaagcgcaagccggccgcccgcaagaagaaggccgctccggtcgctctgccggcaaccccggcgccgctgatctaa

SEQ ID NO: 498712 - DNA, 678 bp, Stenotrophomonas maltophilia
atgccgcctgccgttcccgctctgcccctcgatcggccccgccgcctggcaatgctggcgccgcatcccgtgctgcgcctgggggtggaggtggtgctttgccagcacggtggcgtgcaggtctgtggcagcttcacccgcgaagatgatctgctcgatctgctgcagcgccagccggatggcatcgacctgttgctgatcgacctgttggcgccgtgcggacccgaacagggcctggccctgttgcggctgttgtcgcggcgctggccgctgctgccggtgctggtgctgtctgcgcactgcaatgccagcacggtgaccatggcgatgcaggccggcgcgcgcggctttctgtccaaggggaccacgccggagatgctgcggcgcgcagttgacgtactggcgcgtggcggtcgcttcgtgcccccggagttgcgcacgcagttgagccgatcgcgcatgcggcgcacaccggcgccggtgctcacgcccttgagccgacgcgagcgcgaggtgctgcggctggtcctgcagggctgcaccaccggggaggtggcgcggcgcttcgggcgcacggccagtacggtcagcacgcagaagcggaccgcctacgagaagctgggcatccacagcgacggtgagctgttccgcatccggcacctgctcgaatgcggatga

SEQ ID NO: 498713 - DNA, 1374 bp, Stenotrophomonas maltophilia
atggatgctcaggcagattcaatgtaccacgccgaccagcgcgaccaccatgccgacgccgtgcttgaggccttcttcgctaagcaccgaaccccggccctggtgctgcagcgtttctacccgccggcggcattccccagggttcgcagccgtctaggcggtctgccgcaattgcccgatgggatggattggccggttggcgagagttacggcgaagcggcgccgatgcacttcctggcgcagatcgattgcgccgagctgccacgcgtggatcccgatatgccctcgcaaggcatgctgttcttcttcgccatgaacgacgaagagcagatatgggacacggacgaaccacagcaacgcgtgcgagtgctgtacgcggctgaggtcgcggtcgatcagcacgtgcgtgcgctgccggacggtatgcgtccgattctgggtgaaggcccctcagaccatgcgcaccgcaatcccgcatggctgctacctgaggaggatgggccgtgcgtgcatgttcaatggcccttggtggcgcggcgcatggatacctggccggacgagctggagctgccgccgggtgaggaggatcggccgcattacgagatttacccctcgcgccgggacgaaatgcggctgggtgcggtggtggcggccacgggcctgtttccgcgcgcggatgcagccacggaatgggagcgcccgcagtcgcctgcgtggaccttcccggtgcaatggctgcgttaccagaccgatttcccccaggtaggcatcatcattgaccgcctttcgcgggtgatcggcaatgagcggcgtgcaggcaagcgcgggaaaatcgattacgccgacgtacgcgcatgggtgacgcgcgccgccgccattggcctggacgaagccccggatgatgcaacgcgggaggcattccgtgagtggattatcggacagatcagcgacgactttgagtgtatgacgctgaccgatctgggcatggggcgggcgttcacaaagggattgctggcggcagttgcgtacgcggcgggctcgccggctgcggccgcgcgcatacctgcactgatgtaccgccacctgcaggacgaacatctgccgtttgatgaaagcctgggcacgttgcctgatgggcgcaagcgctgcgccgagacgcgcgtgcaccagatgctggggcacgtaccgcgcttgcacggcatcgtgcccgacgtggaaggcgagggcgacgcggtttgcctgctgcagttggcgtgtgatccggcgattgatctggtgtttagtgactgtggtcaggccacgttctggttgagtcgcgaggatctgcgcagctgcaggtttgaccgcgtcgttggtgtggtggagtcgcactga

SEQ ID NO: 498714 - DNA, 1170 bp, Stenotrophomonas maltophilia
atgacaaaggacaacgcacatgctgcttatgcgtccgcaactggctacttgtatcaagcacggctagcgcttcttctagccattcgagcgatagactcaacgcccgaccatgagctgcgcatcgaaaaatttgacgatataagcttcgaaaagaacggcgatcccgttgagctaattcagaccaagcaccatgctaccggaggtaatctcacggatgcatctgtcgacctctggaagacgctacgcatctgggctgacattgctagcacctccgctacgctcccagccttcgttctaatgaccaccagcaaggcgcctagtgaatccgcagcctccctcttaatgcaaactgagcgcgatgagagtgccgccgacgcgatccttctcaaggtctgcgacacgtccagcaatgagacaaataaaaaagcgtacaacgcatataccaagctcaaccaatctcagcgaatgagattgcttcaatgtataacaatcatagacgaaacctcgaacatcgtggacgtccatgaggagatcaccaaagctgttcggcatgcggctccgcgcacccatatcgaagaatttgtagaaaggcttgagggctggtggttcacccttgttatcgatgcgctggcaaacaatggtaagtcgattcgagtaatttctgtagatatcagaatcgacgaattgagggagagctttcagcgcacgcgcctccccgtcgatcatgctgcgaccctgccgcccagcgacgtcgtgcaaagtttgcaatcgcacccctttgttgatcagctcagacttatcaagttgggcgacgctcgagttgaatatgcaattcgcgactattacagggcttatgaacaaagagctcgctgggccagagaggacctgttggttgacggggagatcaacaattatgatcgcgaactggaagaggcatgggagccaagatttgctgcaatgctagatgagctcccccttggttgcgatgaagcatccagatccgcagccggtgcaaacgcgtacaaatgggtagagcagaatgcagctttcccatttcgctccatcacccaagctttcctaacaaaaggaagctatcacattcttgccaacagatattccatcggctggcatccggattacaaaatgcatgcaccaaaggaagaggaatga

SEQ ID NO: 498715 - DNA, 1890 bp, Stenotrophomonas maltophilia
atgttcgcgaattatcattcaatatcggaggcctcagcgtacttaccggcgcgtccaaaagtggaaagtcggcaattattgatatcatcgattactgcacaggccgaagctacatgcaatgtagcggatggagtcataagaaagcatgtgggatggtattccctgcttttgcggaggggcgaagagaaaatattcttagcacggaagaatcccaatcagggcgaaaagactagcccggaaatgtatctagagcggggagttgatataacacccccaccctctagcgccctgcgaaaaaatattacctcagatgcagtaaataagctacttggatctctcgttgggataaatgagaatgagcatcgaccgataggcggcacacgggatccgctcgaagcaaatattaggcacgccattctattttgctttcaagaccagaacgatatcgacagcaaacgacggctcttccatcgtcaagatgaagacttcattccccaagcaattaaggacactctcccctacttcctgggtgccgttgacgaagacgcattacttaagaaatctgaattggaccaagccaagcgacagctgaggcagctggaacgtcgcctgagtgacggccagagtgcggccatcaacgagttccctcgcgggagaattctgcttgatgaagcaatgcaggtcggcctcgttccggaccgctcttacgtgcttgatgaagaactccaggatgcactgaaagctgctacctctgatgacagggtcaatacgacattcgtcggcaccaacggcgaggaggtactcgctacgcttcgactcgagcgccaagcactccgtgatcgattgacgtcgatcagcgaagagattcgagcagcgaagagcttcgctttcgatgccaatggatacctacgtgaggcagaggagcaaagggcgcgcctgagctccgtgggattaattaagaagaagggacacgacgcgcatcattgcccgatttgccagagttcactagagaatccaaccccggtcactgaacagctggagagatctctagcagcacttcattctcagcttgaagcagttcaagcggagaaccctagactccagatgaagatatcccgactaatggagaacaaggcggaggtggagaacggacttcgcgaaaatcaggaccgcctcactgcccagatcagggagaatgaatccctttttgcgcagcaggagctatttttgcagcaagccagagttattgggaaaatcacgcagtatttggaatcccagggcacctccataagcaagacgggcacacagacggcgatcgatgaacttcgtgcacgaatagaagctctggagaatgagctcgatcacgagaacacccaggaacgactcaagacgttcttgaatattatcggaagatacatgaccgagtattcgggcagcttggaacttgagcacgccaatagccagctaagactcgacataaagaatctaactgtaatcgcagacaccatggacgggcccgtccccctctacaatatgggcagcggtgaaaactggatcggctatcacgttattgcacaccttgccctacacaagtggttccgtcaaaaaggcagaccggtaccaggatttatagtgttcgatcagccatctcaggcccattatccctctgatcgggacaacgaggggtcgttagaaggacttcgcgacgaagatcagaaggcagtcttaaacctgttcgaacttatttctaaagtcgccaaggaactcgaaccggaccttcagattatcgtcttggatcatgcagatctaaaacgcccttggtttgaagacgccgtggtagagcgttggcgcaatggacgcaagctgataccagacaattggattaagtag

SEQ ID NO: 498716 - DNA, 561 bp, Stenotrophomonas maltophilia
atgtccgtgcgtcctgcccctctttttgccccgctgaccccgcgcgccctggtgctggcggtactggcgatgggcgcggtggtgctgttgtccaacgtactggtgcagtacccgatcaacgattggctgacctggggtgccttcagctatccagtcgcgttcctggtcagcaacctgatcaaccgccgcttcggcccgggcccggcgcgccgcgtggcgtggatcggcttcctggtggcggtggtgttgtcggtgtgggtggccacgccgcgcatcgccattgcctcgtgctcggccttcatcgtggcgcagctgctggacatcaccgtgttcgaccgcctgcgtcgtggcagctggtggcgcgcaccgatggtggccaccacctgcagcgcgacggtggataccaccattttctggtcgatcgcgtttgccggttccgccctgccgtgggtgagctgggcagcgggcgacctggcggtgaagctggcgatcggcgtctgcctgctggccccgttccgcgcgttgttgtggaagatggcgccgctgcgggccaccagctga

SEQ ID NO: 498717 - DNA, 1437 bp, Stenotrophomonas maltophilia
atggacgcagcattgacaaagttcgagattaccggcttgcacggaaaattcgatgttagcattcccattagggataataggctaatacttgtcggtgttaatggtctcggtaagacgaccgtggttaattgcctgtacttccttcttacatcgcaatggcaaagactacttgatatcgagtttgatgaaatcgcggtcgagatagattctgagtatgttcgcctcggtcgggccgatattcagcaaaaaatagattcggtagacaggcattacgatagccttatgaggttgtcctccaaatctgtgcttccagcgcggatggttagaaggttaatagatagtagaaacttcgcgcaagctcagttctcgacgggagctgcgctggatcgccatgtccagtctatttccaaagaaacagatatacctgttccttatgttagaaagctaattactgaatttgagggtgctagagatctctttggaggagctgcgcaggattcgcagaatatggccgaatttcttcacaggatgcaggggttcggtgactaccaagttctatatcttcctacgtatcgaaggattgagcaggatatcaagtccatattcccagcgcttgatgagtctgatctaaagaagtttcatgtgcggtcggatcaggtgaattcgaacagtggcaggggctatatcgaacttgtccagtttggaatgcaggatgttgaatcaaaaattcgagaagggttggaggagattcgtgagaccgctcggagtcaaatgacgaatctcacggctacatacttgaaggatattatttcgaatagagcggatgaggtgcggtcagagttcttccatggtgttgacgatggtgtggttgaatacgttcttggaagagtcgaggaaaatactctaagtgagaacgataagatcgaagtccgtctttctatcgccaagatgagggaggggcgctctggatatactgctcgagataaatatcttgcctatttcttccaccggcttttgaatatttacgttggcctggatagggtggagcaaaatatcagggcgctgatggatacatgcaataggtacttggttggcaagcgcatgatatacgacgatgttagtttctcgtcgtctatcgttggcggggacggtggcgcgcttacttggaaaatgctctcctctggagagaagcaaattgcttcacttttctcgcatctaattctttcaaggaatgaatctcagatagtaatcattgacgagccagagttgtcgctgtcggttccctggcagaaaagccttttgccagatgtggtggctacagagcgctgccgtcttttggttgcagttacccactctccatttatttattccaataagttggacgggtatgccatcgatctttcgcgctgcattactcgatacggtaaggcagggtga

SEQ ID NO: 498718 - DNA, 993 bp, Stenotrophomonas maltophilia
atgccatcgatctttcgcgctgcattactcgatacggtaaggcagggtgaggctatggattacgttcagcagttaaaggatgaagctgcgtctgggcatgcggcgttccacgagtatgttctccttcttgataattcaggctctagctcgctttttctattttttgagggagaagacgatcctgcattctatgtgccctatgttttgactacagttccttccgcggagtattacgaattcgtatgtcttgggcgcgatgaggtgctaaaggctgccgaattagctgcgcgagatggtcgaagccaaggtagggccaggttttttattgataaggatcattcggatatcgttggtggcaagcagcccgagcttgaatcaatttatcaaacagatttttactctttcgaaaattttgttgtttgcagtagcgtgtttaggcgctactgggttgaaaggcttaggctccgtataacggataagcgctacccggagtggctagaaaggtttgaacggtcgcacaggcaattttgcaagaggtcgaaagtcctcatgtcatgtgttctcatcggtcgcgggtatttgggtgataactccgttaagttgaatctgaacaacgcagatttgtctgaagtgttcgtgctcgatgcattgtcggctacagtgaagtggaaaggtgatgggctttcatacttcctaaggtctgtgaatatgcagaattccaattgtgctccaggtcggattcgtaaggctgcgagcaaggcactttctggcgacccaaagggatatgttcgcgggaaatatgaagtctggtacttcgtaaaatttcttcagctgatgacttccatcctttcaaataaggcggcggctaagagtagcggctgtgatagggcaaaaccctctgattcaatctcaatgagcaattttctatcggtaattggatcactaactccattccccgagagtctaaaagaattcatggcggacatggcataa

SEQ ID NO: 498719 - DNA, 903 bp, Stenotrophomonas maltophilia
atggcgtactggtgggtgaaccagaagcgaacatttgatagggctgttaaggcgggttacctgtggtccccgaagaccaatgtgaagggcgatgcgaatcccttctatgagcacatgactcaagtacagccaggtgatgtggtctttgcttttgccaattcccgcatccaggccatcgctatcgtcaacggcgcgcattatgcgaaggatcgccccgagaacttcaaagcgacggacaacaattggcgtaacgatggttgggccgtcccggtcgactatcgcctagtggatgagccactgaaggtgagcgaccacatggagcggattgggttgtaccttcccgggaagtactcaccgctaaaggccgacggcaaggccaatcaggcttaccttttccccgtgcccgacgcgatggctgccgaactacttgtgctgctcaatgtcgatcaggaagatttgggtgagtggcgagacgaaggtccggtcaaggagctcgcggaggacaagcgcattagcgagaccgagaggtctcagctcaccaaggcaagaaagggccagggcatctaccgaaagaacgtgagcgctattgaaaaagcttgccgtgttacgggtacaagcgatgctgattttctgatcgctagccacatcaagccatgggcgaagagcgataatcgcgagcgcctagatggaagtaatgggctgctgctggcgccccatatcgaccggttgttcgaccgggggtacatctcttttgaggatgacggtggtctgattctgagcaaggagctgccggaggcagtacggttgcagtgggaagtgtctcagaagaccccgcccgttccgttctcggcagcgcaggtccagtacctgaattatcatcggaccgtgctgctgcgtaagtag

SEQ ID NO: 498720 - DNA, 351 bp, Stenotrophomonas maltophilia
atgaagcttctgatctatggcgctgtgctgctggcggcgctatctgcggcgatcgccagccggcgtgtacccaaggccgacttggaactgcggacgtttcggaaggtgtccgacgctgaattttctgtcatgcgcgaggaagcggttcgacttgtgcgcgagggccgggtacagcacgcgcggtacgcgggggataggtacttcgaggtcagctgcgacggcaaacccgtgatgctggcagataactcgctagagcagcttgtaattgtgctgtatgcggataaggaaactgatgttgcctgcgttgtgccggtgctgtcgcattggagcgggcggcttgtgccggagtag

SEQ ID NO: 498721 - DNA, 369 bp, Stenotrophomonas maltophilia
atgaacacatcggacttccgttccctgcacgcgcagtacgatccggacaacgccgaacccaagcgcgaaccgtccgtcgatcccaacgccttcgtcgccacactgcaccgcatcgaaactggtgcggctgcggatggccagccttggccagagcggcatcaactgcctgggcgatgtctacagctggctgatgcggattgcgcgctggcgggtctgcgtgtggtggcggagctgatgttggctgcggagcggactcggcagaacggctcgcccgaggaatacctgggggatcgggtgatggaagggttgaagatggcgtgtgtggcgttgactgcgcaggtggctgaacgattgcacgtgcgggagtag

SEQ ID NO: 498722 - DNA, 477 bp, Stenotrophomonas maltophilia
atgccaagggatggccgctatgctggcagcgcgccggaatggaaaccacgcatgccccgcttcaacaccgccctggcactgaacctcgttctgatgctgctgggtgctacacctgccatggccatggccgcagaccctcaggtttccactgaagtgttcgtggagcgcggtgacaatcccaccgtcgagttgcagcaggcacctgccattgagtattcaacggcccctgccacgccgcccgataccctcctgcaggctcccatgcaggtggtgctggttgctcaattggatgagctgggccacgtttccaacgttatggtggcgcggtccagcggactgcgggagattgatcgtgcggcccttaccgctgtgcgcaagtggagctttgatccagtcgtggttgagggcgtcgcgctgcatgcgcgggtacggatccgtctgaccttcgtgtccacggccgaggcgccgccgggctga

SEQ ID NO: 498723 - DNA, 768 bp, Stenotrophomonas maltophilia
atggcccggggcggtctcaaagcatgggaccagtcccgcatgcgctctggcggacagctccctccgctggatatgctccccccgtcgataccaggagtcatcgtcatcgaagacttgctcaaccgatccgcgctgcttcgccaggcaatcctctccacggtggattatccgctggcggatgactcgcccagattgttggcgtcaatggacgcagcgttgctgagccttgaacacgcagacgcccttcgtacgctgctgcaggcccgcatggcgtcctctgcgatggcattgatgcgctgccagtacgaggccttcacgcggtccgtctggatcctgcattgcgcagccgacgagcaggtcgagttgctgtgcctgccgccggaggctggaacgagcgagcaaaagttgccgatgctttcgaagatgctggaagcattcgcaaaagtagcggaattgggcaatctgctcccgcacctcatcgaactgaaggtccacgcttgggctccgctgaactcattcgtacacgcaggggtacacgcaatgggccggagtcgcgatggcttccccatgcccttggcgatcaacgtcatccggatgagcaacaacctttcaatgatggcggggcagcacctcgccacccttaccgacgtcccggatctgcagaaggaagtgctgcggatcgatgaaacctttgccgagtgtcttctcttcgatgaagaaaagcgccgggccatcgaggcgagggcaccggtggaacagtcgagctag

SEQ ID NO: 498724 - DNA, 3825 bp, Stenotrophomonas maltophilia
atgagcaaattcatcttcgatgattttgtgaagaccacactcggcggcgcaacccaggccgggagtggagaagccctgactgcacagcagatttccgatgtcatcacctatctgaaatcaccgggatcgggccctaccaccagcgtcagcttcgaacagtatgtaaccggcaacatgcaggctcaccctccgcgacttccggatgggatggattacctcgcgttctcgggcaaggacgccgcaaaaatctccaactacaccaatgcagaggtgtattcgaaggatatcaacgggaagtcaggaataattggcgataccccatggggaaagttcgtcgatcagctagccaagaacccagctcacatccccgatctccagtcgatggaagctggcctcagaaacgtgatggagtcaaaggggatcgttcccttcgacaagaactatgtgggtgcgctccaagacataatgtggaacgccggcagcccaaagttcttcgagaacgccattgctacgggcaagccactgatcgctttcgtggatggggcgcctcccgatcgcggtttcagtaggttcgaactagccaccgccctcgaccaccccactgtccgcatcaacggctaccccataagcgccttcggcccagagccgctcgccttcgcaagccagtcagccgccgagtaccaggcacttgagcgcagcctcgcgcagcatgccaccaccaacagcgcgcatcccgtcgacgtcgcgcaggtgcgcctgcatctcaagcccatcgatggctatgacgctgtcagcaagacgctcttcgaacgaccgctgcacgattacagcgcgttgaacctgagcgagatgtcgaccacgcgcgcgaactgggtcgccgcgcatgccaacctgggcacagggccacgtctgttcgctgatctgcccgaaccaccatcgcacgcgcccctgccgccaggagctccacgcggccctccccatgcggcgacggttgccgaagcagtggccgacgtttcaccgcatggcatgcacgccggaatcaaccccgccatcaaggttgccggcgttgcgggcgtcgcactgcttgcgcacgacttcgccacctccgggcacaagtggatcgagctcaactcgcagggcaatgccgcaggtgcagattccaccgctgcacacttcgtgggccgcaacgtcggtggcgcagtgggtggctttcttggcggcgctggtgtcggcctcgcttcgggttcatggacggggcccggcgccattgcaacgggtatcggtggcggcgtcctgggtgcgtatctcggcgaacgctgggccgggcagaaagacattgaacgcgtctactcccaggtcgatccgatggggcgcacctggacacgcgacccggccgatcccaatgggcgatggctacgagccggcgaacagcagcaggtccagagcagcgacctcggcaccggcgtggaagtccgcccggtgcagacggcacagggtgacgacgtaaccttccgcaccagctatgttgccactggcacactagagcgccagttgaactggcaggcggctcgggcctcctatgagctgggcctgtcgaacccaccaccaccgctggatccctaccgactgagcgcacatggctcggccgagcccgcgcgaggtgccttcgaaaccgatcgcgcctttgtacgcgatgccagctcggggcaatgggaacttgaaatcaaggaaatggtggatggtcgagtgcccaacagccgccacctgccagtctcggcggagcaggcacaggcgctggatgaacagtcgcgcacggtcattgcacagaacgcgtcaaacaccaaagccgcgatggctgcgcgctatatggttgctcacgagcaagggcgttggagcgacttcggcgacgcgaacaatccatccattcctcgcgccgttcaggacgcgcaagccagcgccgacacgttgaaggcgagtgatggcaatgcctatacacggcaggcggacggccaatgggtcagcaagggtgtgatctttgacagcgccgccaaccggaacctgagcgacgagctggagatcacctggcaaagccagaatgacggtatcgccgggctgcacgacatcgccaggcagctcaaggacaccgcacaggttgcacacgaaggtattcgcggccaggtggatgcgctctacgcgcgccatggcatcgagcgcaccgagcagcagctggcagctacagccgtcgcggtggagcagacgctgaacctgcagggcagaaccggcgacgtggttctggaactgatgccagaccctcgtacccatgcacccagcgcagaaagtgccatcgccacgttcggtgacgccggcggaaaccggatggtgctcaccggcactaccaccattgaagatatagcgcgcgctcaatcgcagcttcggcctgaggcttcactggctgcccaaggcgctgcgcctgcagatcaggcgacgacgcccgacgtacccgagctacgcattgctgcgctgactgcaaaggagcaggacgcgcaccggcaagccctgcaggaggccaatcgccaaggcagcgcggcagtggatgcgcagcaggcagcgtctgcggccgtgctggaggcgcgcggggtacaggttgacccgggtgagacactgaaggtcgacagtgacctgcaacgagatgccgcaaccagcgctgccgttgagcccgctcgccagcccgctccgacgcccgctcctgtcgtcgcggcgccctcggtgtcgattgttgagtcagggcgcacgcgcccgtcgcgtgagagtgagcagccagtagagagtcgccctgaaagacgagccgactcggcgcagcgtgcagaggatgctgcccggcaggacgttcggagggaggaaccggcaccgactgcaccagcaatgcccgcccaaagtgcctcacagcatgaaccgactgtagagccagcccgtgaggagcggaatgcctcgttcgtaagcactgtggccagcgcaggctcaacccagccagttcacatgcaggagcacaagactgaggatcccgtgcgtgagggtagcgctgagccgcagaagcttgcgaatgtggtgcaggcgcagcccgccgtcgctacaactcaggacaaagcagagaagccactgccgcaatcttctgagaacgagcaggccccaaggaccgcgcaggaggtcccgttggatctcccggtcccgccatcaccggcccggaacaatccagggctggaacctgcaggcccccgagccgctgacgttggcggagacgctacccatcagacagcgcttccctcttccgcttcagatgaggagcgcgacctccctgagcatgtagcgccgccgtcggccgctctggcggaaagcaatccaatgcagcccggccatcccgatcatccgctctatcagcaaatccgcgagggcgtagcggagctggatgccaagcacggccgaagcttcgatgcgacaagcgagagaatgaccgccagcctgctggttctggccaaggacaatgatctgtcccacgttgaccacgtgctcgtgagcaacaccactgcaacgcatcccgccggccacaccctctttgtggtgcagggcgaggcgaacgatcctgcccatctgcgcgcctccatgccaacggcagaagccgcgcagacacctgtggaggaatcactgctgcagttcgattcggtcagcagggaagcgcagcagcgcgcactggccaatcagcaggaacagctgttgcaggatgagcgagcgcagcaggacatccaggtgcgagcagtaaacgcgtggtag

SEQ ID NO: 498725 - DNA, 501 bp, Stenotrophomonas maltophilia
atgcccttccaattccaggccaagccttactcctcgctcgatccgatcagtgaaacggagatccctcgcccaagaattggaccgactgttctggcagacggtcggcacgggaccgagtatcagttcgccatctatcgcggagattcgcgcgtaggcggagtcggcttcgacgggtgggatgaaaccacgcaggacgaaggatgccctttccactgcttcgtctttgacctcaggcatgctcaggtcatccacgccatgctggcatacaagcagacgcttcgtagcggcgatgacgacttcacctatctcaaagggctcgcgcaagggttcgtactttcattcgcaggccgaactgacagcgatgaacccctacgctatctcgcggtgaccagtccgcaggcactgatggaatcgcagattccggcacccgcagacgtcgtcacgttggccgacggctccatcgtgctggccagcgttgaagtcccggcattcggcgcctga

SEQ ID NO: 498726 - DNA, 309 bp, Stenotrophomonas maltophilia
atgagcactgtcgaactgggtgaggatctcggcatcgagagcagcaccgagctcaagaaccgcctcgccccgctggtggcgcaggcaggcgagctgaccctggatgcaagccaggtcgcccgcatccacacggccgccgtgcaggtgctgtgtgcattcgtgcaggcccgccgcgaggcaggcctgggcaccggcttccacggttgcaccgcaaccttccgtgacgccgcacgcctgctgggcgtcacccaggccctgggcctggacgtaacccatgacaacctgaaatctgtggagaacgctgcatga

SEQ ID NO: 498727 - DNA, 1215 bp, Stenotrophomonas maltophilia
atgaacagcaccggcgtactggacgactacctggacgaactgctgggcgaagcgatcgccccggcggccgtcgtgctgccaacgccggacagcgccgccccggctccggacagcacatcggaaccggaacgcgagccgacctgggatgacctgccggccgaggtgatctacgaaaccgacaccgtcgccgcggagcctgccgtggacaacgccacgctcgaagccgccttcgaggcggccacaacggccgagcgcgagcccacctgggacgatctgcccgctgaagtgatctatgagacggacgctgttgccgttgcccctgcacaggacgacgcagcactggaagccgccttcgaggccgccgcaatgccggtcgccgctcccgagcgcgaaccgacctgggatgacctgcctgacgaggtgatccacgagacggccccggccaaggccggcccggagcccacctgggacgacctgcccgacgaagtgatctacgagaccgacgcggccgacagccatcagctcgcccacactgacagccccggtctgcaggctgcgttcgaagccgctgctggtggcgaggatgtccccacgccgccaccggccgtggttgcgcccccggcaccgcgccctgcacccgcgcccgccccggccgcgcgtgctgccgccgcgccgccgccccgcgtcgccctggatgccccggccaccaaccgtcccggtacctggcaggagctgcaggcgcaggcgcaccagcccgccagcagtccgcacccgcagaaccgccgcgccggcgagcgcacctcgcgctggctgcgcctgcgctgcgggacccaggcctatgcgctggaactgttgaaagtgcaggaagtggtgttgccggtgccactgctgccgttgcgtggcacggcaccggcgatgctcgggatcatgaacctgcgtggccaggtggtgccggtgatggacctcggcctgcacctcggcgccgcagcggcagaagacgatgccctgacccgcatcgtggtgctggaagaggacggcgagaccatcggcctgcgcgtgtcggcagtggaagatgtcgccaacctcaccgattcacagatcgaacccccggataccgcccgcatctgccagatctccaatgatctgttccgcggcgtcgcccgggtcagccagcgcccgatgatcctgctggacgccacacggctgttgagttga

SEQ ID NO: 498728 - DNA, 1017 bp, Stenotrophomonas maltophilia
atggcccgccgcaagcaccacgaagagcacgccaaccatgaagcatgggcgatcccctatgccgacctgatgacgttgctgctcgccttcttcgtggtcatgtacgcgatctcctcggtcaacgagggcaagtaccggatcatggccgacgcgctcaccgatgccttcggcggcgcaccgcgcaccatcaacccggtgcaggtgggtaacaagcaggtgcagggtggcggctgggacagcccctcggtgatcaagtccggcaccaagatcggcccctccgcgcccgcgccgtcgcacgacccgaccctgctgccgtcgatggcctcgcagatgcgcatgccggtctccgtgcacaaccaggaacagatcgcccgtgccgagcgccagctcaacagcatcgccgaccgcctcaccgccgcactggcgccgctgatcgaccgcggcatgatcagcgtgcgccgcaccgagttgtggatcgaagtggagatcaacagcgacatcctgttccccaccggctcggccgcgctggacgtgcatgcacggcagacgctggccagcctggccgaggtgctgcgtgacgtgcccaacagcgtgcgcgtggaaggccataccgacaacgtgccgatcgccaccgccaccttcccttcgaactgggaactgtcggccggacgcgccgccagcgtggtgcacctgttcgccgaccagggcgtgcagccatcacggctggcgatggttggctatggccagttccgtccgcgcgaagagaacgacagcgcgcaggggcgcaaccgcaaccgccgggtgatggtcatcatcctggccgacacctcgcattcggtggatccgcttggccagcgcctcaatgcggccaccggcgccgtcgacgacagcaccaccgaacaggccgccgcaactccggccaccgcccccacctcccccatcgcaccggtgaagttgccgccggtgccggctggcagccgcgtcggcgccgccgttcccccggcaatgaaggagtaa

SEQ ID NO: 498729 - DNA, 1581 bp, Stenotrophomonas maltophilia
atgctggccgggatactgaccctcgtcgccagccagggccaatggctgtggcggcaggacgaggccacctacgacgcgatggtcggcaactgggactatcgacccgacccgagcgtgctgatcgtggccatcgacgaaggcagcctgcaacgcatcggccaatggccgtggccacgctcggtccacgcccggttgctggatcgcctgaccgatgccggtgccgaacgggtcgcgctggatctgatgctgtccgagccggaccgccgcgacagccgccaggacgacgcgctggccgcggccatccgtcgcaatggccgggtggtgctgccggtgctggccgcaccggcagccggtgatcgcatggccgaggaaatgctgccggttccgcagatcgcggccagtgccgccgccatcggccacaccgacgttgaggtggacagcgacggcgtcgcccgcggcatctacctgcatgcgggcatcggcaaggcgcattggccggcgctcgggctggccctgaccggcctgcccgcgggcgcggtgcgcggactgcccgaccctgatcccgaggtgggctcgccctatcaatggcggcgcaacgactacgtgcgggtgcgctatgccggacctcccgagcagttgccgcaggtttcctacgcagacgtgctcgatggccacgtggacatggcgatgctgcatggccgccgcatcatcgtcggcatgaccgccagcggcatcgcgccgcgcctgctgaccccgaccacccgcgagttctggatgagcggcagcgagtaccaggccaacatcgcctcgatgctgctgcagcacaagcagatcgaggtgctgccccgcttctggcagcacaccatcagcgctgtgctggtggcgctgtgcgtgatcctgctcggcctgcgcctgccgtggctggcggcgctgagttcgctgccgcttgcccctctgctgagctggttgctgttgcgcaccagcaacctctggtgggcgccagccaccgccctgctgggcgtcctgctggtactgctggcctgggcgatctggcggatttcggcctggcaccggcaggccaaccgcgacgcactgaccggccttggcaatcgcctgcgtttcgaacaggcgctgcagcaggaatgcgacgccgcacgacgcaacggcaagccactgagcctggcgctgattgatgtcgaccacttcaagcgccacaacgaccgccatggccaccaggtcggcgaccgcgtgctgcgggacgtcgcccggttgatcggcgcgcatgcgcggcgtccgcgcgacatggccgcgcgttacggtggcgatgaattcgcgctggtattgcccgataccccggccgaaggcgcgcggcttgtcatccaggacctgatcgactgcgtacgtgcattgccggtacacggtgacggcagcgacgaccgggtgacgctcaccatcggcgtgttcacccgggtaccggaaggcgggctgcatccgcatcatttcgtcgaaggggccgacaccgcgctgtaccaggccaaagccaacgggcgcgacgggtatgtgatcgacggcggcgcgtga

SEQ ID NO: 498730 - DNA, 1071 bp, Stenotrophomonas maltophilia
atgcgccctgccgtcgccctgttcgccgccgtgctgggcctgctgcctctggcgggcgccggcgcaccggtgctgaccccaccggatgccggtatcgacggcctgatgcaggcctacgatggccaggtgcccggcgccgcagtgctggtgctgcatgacgggcagccggtgttccgccgtggctacggccttgcggtggtcgaagacggcaccccggtcacagccgccagcaacttccggctggcctcggtcagcaagcagttcaccgctgcgacggtgctgctgctggtggaagacggccggctcgggctggaccagccggcgcggcagtggctgcccgagctgccaccggctgcagcgggcatcaccctccgccacctgctctcgcataccagcggcctgctcgactacgaagacctgatggacccggcagacacgcggcaggtacacgatgccgatgtgctggccctgctgtcgcgccaggaccggctgaacttcgcgccgggcacgcagtaccgctacagcaacagcggctatgcactgctggcactgatcgtgggccgcgcatccggccaggatttcgccgccttcctgcaacaacgcatcttccgcccgctgggcatgacgcataccgtggcccaccaggacggcgtggacacggtcgccgcacgcgcctatggctacagccggatcgatggccgctggcagcgcaccgaccagagcactaccagcgccgtactgggagacggcgggatctactcctcgctggacgatctcgcccgctgggatgccgcgctgtacgacgaccgcctgctgtcgaaggcctcgcgctgggcgatgttcagccccgcgacatcgacgcccgaaccggatgtgccgcactacggcttcggctggcggctgaatggtccggtgcaatggcacagcggcgagagcatcggcttccgcaacgtgatcgtgcgccacccggagaagcacctgaccgtgatcgtgctgaccaaccgcaacgcccccgaaccctatccgctggcgcagaagatcgcccagcgctggctggacaccctgcaatga

SEQ ID NO: 498731 - DNA, 942 bp, Stenotrophomonas maltophilia
atgcgcatcggaatcgtcgtcgactcggcctgcgacctgccgcaggacttcattgccgagcacaacatcgtgctgctgccgatcaccgtccgcatcggcgaagccgtgctggccgatcaccgcgatgagcaggccaccctgagcttcctgcacgcgcacgtggccgaacacggcgccgaggcggaaaccattcccttcagtgtcaaccagatccgcgacctgttcctgcagcagctggtgatcgattacgaccacgtgttctgcatgaccatcaccaagacccgcagcccgatccatgacaacgcgctgcaggccagcttcgccatcctcaacgactacaagccggtgcgccaggcggcaggctacaactcaccgttcgcgctgcgcgtgctcgatacccagaacctgttcgctgcccaggcagtgaccgcggtggaagccgtgcgcctgcgcgagagcaacgccagcgtgcagcagatccgcgagcggctggaggaactggccggcaacgtgcacggctacatggtcacccgtgacctgtactacatgcgtgcgcgcgcacggcacaagggcgaccgcagtgtcggcctgctcagcgccgcactgggcagcgcgctggacatcaagcctgtgctgcatggctaccgcggcgagaccgggccggtggccaagatcaagggattcgacaatgccgtgcagaagctgttcgcggtggtcggccagcgcgtacgtgccggactgatgacgccgacggtgtgcgtcagctacggcggagaactggacgagctgcgtgccctgcccggctacgcacagctgaaagaggtctgcgccacccatggcgtgaccgtgtacgaatcggtgatgagcctgaccggcatggtcaacgtcggcaagggcgcggtcaccgtaggcttcgccgatgggccgcatcggttcgaatga

SEQ ID NO: 498732 - DNA, 201 bp, Stenotrophomonas maltophilia
atgagctgctcttggtgggtgtcgaccttggtcgacacgatgaacttggcaacgaccgaaaccggtttttgtagagtcgagccgtgctcgactgctctgctcgactgcgctgcctggaacatgctggacgcgagcgccgacaacggcgaggatggaggctggttcttctggctggccctgcatggcgcaacgcatccttga

SEQ ID NO: 498733 - DNA, 1068 bp, Stenotrophomonas maltophilia
atggcgcccgttactgacaccggcatcggcctgctgtgcctgtgccggcagggcttcgagcccgagctggccggcgagctgcagttccgcgccggcgaagccggtttcgcaggttatgcgcgtacccagcgcaatgacggctacgtgcttttcatgtgcgacgaagccgccgcgctggcgccgcgcctgcgctggcgcgagctgatcttcgcgcggcagaagctggtggtgctggccgagctgccgcagctggacccggccgaccgcattaccccgatgctcgacgtgctggctgatgcgccgcgcttcggcgacctgtgggtggaacacccggactcggacgccggcaagccgctgtccgggttggcccgtgccttcggcaatgcgctgcgcccggcgctgcgcaaggccggcaagctcactgacaagccgaacaaccgcctgccgcgcctgcacgtggtgttcgtcgacggcacccacgccttcgtctgcgtggccgacccggccgacagcgcgccgtgggcactgggcatcccgcgcctgaagctgctgcccgaagcaccctcgcgttcggcgctgaagctggacgaagcactgctgaccctgctgacgccggaagaacgcgaagcactggcccagcccggcatgcgtgcggccgacctgggtgccgcccccggcggctggacctgggtgctgacccgccagcacatgcacgtgttgagcatcgacaacggcccgctgcgccagcacgtgctggacaccggcctggtcgagcacctgcgcgccgatggcttccactggcatccggaacagccgctggactggatggtctgcgacatggtcgagcagccgcgccgcgtagccgaacgcatggccacctggttccgcgaaggctggtgccggcacgcgatcttcaacctgaagctgccgatgaagaagcgctgggacgaaacccgcctgtgcctggacctgttccaggaccaggccggcaagccgctggtggtgcgtgccaagcagctctatcacgaccgtgaggagatcacggtactggcctcgccgctgcgctga

SEQ ID NO: 498734 - DNA, 801 bp, Stenotrophomonas maltophilia
atgcgcctggccactgcgctcctggccctgctgctgtggctgccgctggcttcgcatgcacagcagctcgctccgattccggcgctggattcgccggtggtcgataccaccggcacgctggacgccacgcagaagcaggcgctggtgcagcaggcgattgagctgcagcagcgcaagggcagccagctgcaggtgctggtggtgcccaccacccagccggaagacatcgcgcagtacaccacgcgggtcttcgaccagtggcagatcggccgcaagggcgtggacgacggggtgctgctggtggtggccaaggacgaccggcgcgtgcgcattgaacccggttatggtctggagggagcgattcccgatgccatcgccaaccgggtcatccaggagtacctggtgccgcgcttccgcagcggcgactacgccggtggcatcaccgacgccacggcggtgctggtcaagctgatcgacggggaagcgctgccggcaccggtcagcggccatcgcgggcgtgagcccagcggtggtggcgatacctggttcctggcgctgttcatcggtgtgttcgccggcagcatcctgcgcgggatcttctcgcgcgtgccgcgtccgctgcgtggcctgctcggcggtgccggtgcggcgctggcggcattcctgttcacctctacgctgctcgccagtggcctagctggcgtcgtgggcctgattgttgccatgctctccggtcacccgggccgctttgccggtggcggtggccgctccggcggtggtggtgcttcggggggctggtga

SEQ ID NO: 498735 - DNA, 1788 bp, Stenotrophomonas maltophilia
atgcagtcttcaacgcccctgaccctgccggcacgcagcgccatcgtcgtgcttgccctgctgcagggcctgatgctgtatgccgcgcaggaactgtccgacgcgtggccgttccgcgatatcggctggcgctactgctggtacgcctgggtgctggccattcccagcgcggtggcgctgagcctggtggagctgggccagcgccgcctgtggctgcaggccgtgctcggctcgacggtggtgctggcgctggccgcctggatcggctggaacctcaatggcgagaccgcactggaatcgggcgcgttgcagcttccattgaccctgggcatcgccgtggcggtgttcgtggtcctgccctggtggcagttccagctgcagcacgggcactggcgtgccagctaccccgagctgttcgagcgcgcctggcagaatggtctgaccctggccctggcggcactgttcaccgggctgacctggctgctgttgtggctgtggtcggcgctgttccagctgctcgacgtgatcgtcttccgcgacctgttccggcaggacgcgttcatcgcactggccaccggcagcctggccgggttcggcgtactgatcgggcgcacccagcaccgcgccatccagatcacccgccaggtgctgttcgcgatctgccgtgggctgttgccgctgctctcgttcatcgccgtattgttcgtgctgagcctgccgcttaccgggctggaaccgttgtggaagacccgctcggccgccggcctgctgctggtgctgtcgctgctgctggtgacgttcaccaacgcggtctaccagcagggggaagacagcgccccctacccgctgctgctgcgccggctggttgaagccagcctgctggcgctgccggtctacgccgcactggccctgtacgcactggggctgcgcgtggtgcagtacggctggaccgtggaccggttctgggcggtactcgtcgcagtggccgtggccggctatgccgcgggctacgcgctggcggtgctgcgccggcaggggcgctggttgcagatgctggagccggtcaaccgctggatgtgctgggcggtgctggcactggcgttgctgggcaactcgccgctgctggacccggtacggctgaccctgtccagccagctggcgcgcctgcgtgcggacccgcctgcaatcaccagcagtgacgtcaacgtgctgcgcttcgatcttggccaccgcggcgtgcaggcgctgcgcgagctgcagcgtgacccagccatcaccgccgatgccaacgcgccacaggtgatcgctgccgcgctggcacgtacctcgcgctgggatgacggccaccgcctcgacaaggggccgcaggacgtcgtcgccctgcagcgcgcgttgaagctggccaagggatccagctcgccaccggacgattggtggcaggcactggccacgcgcgcgatcgatggcgaatcctgcgcccagagcgagcgcgactgcctgatcgtgcatcgcgacctggacggcgatggcactggcgaagtgctgctgtgcgagctgtacacccaccgtgggccggactgcgtgctgtacgcacgtggcagggatgcccactggcgccgggccggttcgctgttcggcaccgccagcggccaggccgaggcgatcaaccaggcgctgcgtgatggcaaactcacgctcgaaccgccacgctggccgatgctgtccatcgatgggcgccccgcagtggccatcgatcccgaacccgaatccaccgagtcttccccatga

SEQ ID NO: 498736 - DNA, 900 bp, Stenotrophomonas maltophilia
atgccccgcgaaaacctcaacgacctgcaggccttcgtgcacgttgcccgcgagggcagcttcaccaaggccgccgcccagctgggcgtgtcccagtccgcgctcagccatgccatgcgcggcctggaacagcgcctgggcgtgcgcctgctgacccgcaccacccgcagcgtgtccaccaccgaagccggtgcccgcctgctcgacaccctgggcccgcgcctggccgagatcgaggacggactggccgcgctggccgaataccgtgaacgcccggccggcaccacccgcatcaatgccaccggccatgccgccgagtacatcgcgtggccacggctggcgccgctgctgcagcagtatccggacctcaaggtggaactgaccgccgactatgggctggccgacatcgtggccgagcgctacgacatcggcatccgcctcggcgaacgcctggcgcgcgacatggtcgccgtgccgatcagcccgccgctgcgcatgcgcgtggtcggtgcacccggctacttccgccagcacgtggtcccacgccatccggacgagctggcagaccacaactgcgtgaccctgcgcctgcccacgcatggcgggctgatgccgtgggatttcggccaggacggcaacgaactgagcgtacgcgtgagcggccagtggaccttcaacaccatgggcatgacccgcgccgctgcgctggccggcagcggattggcctggctgccggaagaccaggtgcagccgatgctggacgacggccgcctgcagtcggtgctggacgactggtgcccgcacttcgatggctactacgcgtactacccgtcgcgccgccacgtcacggtggcgatgcgcacggtgctggatgcgctgcgcgggccgatggctggatga

SEQ ID NO: 498737 - DNA, 984 bp, Stenotrophomonas maltophilia
atgcagacacgtgaactcggccgcagcggcctgaaggtttccgccttgggcctgggttgcatgggcctgacccatgcctatggccagccggtcgagcgcagccagggcatcgccctgctgcacgctgccgttgaacgcggcgtgaccttcttcgacaccgccgaagtgtacggcccgtacaccaatgaagacctgctcggcgaggccctgccgccttaccgcgacaagctggtgatcgccaccaagttcggcttcaaggatgcgcgcaccgataccggcctggacagccgccccgagaacatccgcgccgtggccgaagccagtctcaaacgcctgcgcaccgaccatatcgacctgttctaccagcaccgtgtcgatccgaacgtgcccatcgaggatgtggccggcaccgtgcgcgacctgatcgccgaaggcaaggtcggccacttcggcctgtccgaggccagcgccgccaccgtgcgccgcgcgcacgcggtgcagccggtcaccgccgtgcagagcgagtactcgctgtggtggcgcgaaccggagcgcgaactgctgccgaccctgcaggagctgggcatcggcttcgtgccattcagcccgcttggccgcggcttcctcaccggcacgatcaacgccgacaccaccttcgacgccaacgatttccgcaacagcgtgccgcgcttcgaagtggaagcccgccgcgccaaccaggcgctggtggatcgcatcagtacgattgctgcagcacgcggcgcgaccccggcgcaggtggcgctggcttggctgctggcgcaggcgccgtggatcgtgccgattccgggcaccaccaagatccaccgcctggaagagaacctgggcgcggctgacctgcagctggcgccggaggagctgcagcgcatcgcgcaggcgctggatgaagtgtcgatcgtcggtgagcgctacaacgcccagcgtgcggcccaggccaagggctga

SEQ ID NO: 498738 - DNA, 2739 bp, Stenotrophomonas maltophilia
atgcgtagaaaggcgatggcgtggtcgatccagctggcgttgatgggcgtggctgcttccgcggcggcccaggcaccggcttcctcctcggttcaacaactggatgcggtgcaggtcaccggttcgcgcattccgcgcgcccaggtggaaggccccgccccgatcacggtgatcaacgccgaacagatccgctccagcggcttcaccagcgtgccggacgtgttgcgtgcaatgacccagaacggcggtgagacccagagccagcagtcttccagcggcgccgacttctcgccgggcgcccagcaggtggacctgcgcggcctgggcccgaaccacacgctggtgctggtcaatggccgccgcatcgccgacttcccgatgccgttcaagggccgcagcaacttcaccgatgtctccaacatcccgctgggaatgatcgagcgcatcgaagtgctgaccggcagcgcctcggccatctacggctcggacgcgatcgccggcgtggtcaacttcatcctgaagaagaaggccgacggcaccacgatcgacatgcgcatgggcaccaccagcgaaggcggtggcgagtcgttcgacatgagcctggccagcggcttcagccgcggcaacttcaacgccgtgtacagcgtcgagctgcagtcgcagactccgctgtgggcctatgagcgcgacatccaggattcgacccaggacggccccaccgagggctcgcgcatcgcccgccgcgcttacctgcgtacggactacaacgacgactacctggatccgggcgcggccacctgcgaagcgctggccgggcagaaccagggcagcacctaccgcgcctaccgcccgcgctacggttactactgcggcagcgacagctcgatcggctacggcaccatcctcagcaagcgccgcggcgccaatggctacgcctcgctgagctacgacttcgacaacggccagcaatggttcgccgatgtgcagctgggctaccacacgatgtcgctgatgcgcgacgtcaccaagtggggccgcatggacgccaatggcgatgagtcgggctacttcaacaaccaggccaccggcgagatcgagttctggcagcgccagttctcacccgaggaaatggggggcctgcgcaatgcgatggtacgcagcacgcagaagaccttcagcgtgaccaccggcttcaagggcaatctggccggcaactgggactacgaagcggcgctgagccattcgcagtaccagtcgcggatcagctgggcgcagatcatcgccgccaaggccaatgacctgttcctgggcccgcagctgggcgtggacgacgacggtttcccgatctacaacgcggacccgtcgcggctgtaccggccgctgacccgcgccgagtacgattcgattgccgcacgcactacctattcgccgaagtcgcgcaccgagacggctgcattcacgctgaccaattccgcgctgttcggcctgccgggcggtgatgccgggttcgccgcgaccgtggaagtgggccagcaggcctatgcgctgaatcccgatccgctggccacccagtactactactacagctggaaggattcggacggccagggctcgcgcaaccgctgggcgaccgccgccgagctgcgcatgccgctgcacgagacgatcaacctgagcgtggccggccgctacgaccagtaccgctattccggccacaccatcggcaaggcgacctggagcggcggtctggaatggcgcccgatcgacacgctgctggtgcgcggttcgtatggcaccgcgttccgcgcgccggacctgcactacgtgttcgccggaccgggcaacgacgagaccaccgccgaagacctgtacagctgccgcgccgatggcgccagcgactgttccgactacgagcgcaacctgatccgcagccgcaccggcaaccgccagctcgacccggaaaccagcacctcgtggagtgcaggcttggtctggtcgccggcgatcggcctggacctgtcggtggactggttcgacatcgacatgcgcaagcaggtgcaggacatggatgtgcgcaccctcctggccaacgaagcgaactgccggctcggcagtgccgacatcaattcgccgacctgcgtggacgcgctcgaccgcatcacccgtaccagcgacggccgcctgtacggcgtgcgcgtggcgccgatcaacgtcgcccgcgagtcgacctccggcatcgacgtcggcctgcgctaccgcctgcagaccggtatcggcgacttcatcctcaatggcacccacacctgggtgaagaagcacgatttccagcgctaccccggcgatccgaccctggaccagttcgcggtcaacagcggattcgacatcccgcgcaccaagaccagcctgagcgtgacctgggagaaggacgcgtggtcggccacgatctacggttcgcgcctgggcaagctgccgacctcggacaactacgaccagtcgttcgactgggaaagcggtgacagcccctacgtgaaggcgacctaccgctacaacgcctcggtgcagtatcgcttcgacgaccattcgcgcctgtcgctgtcggtggtcaacgtgttcaacaagatgccgccgaaggatgccacctacaccgcgtatccgtactacgacgtgtcctggttcgacagcgtcggccgcaccatcaacctgcagtacacccacaagttcggtggcagcgcgctgtaa

SEQ ID NO: 498739 - DNA, 843 bp, Stenotrophomonas maltophilia
atggacagtaccgccaccaccgccctcgatgcccgcgtcgaacgggtctgccgccaccttcaggcgagcctcgacgaaccttcgctgcaggagctggccgacatcgccggctgcagcccaacgcgcctgcatcgtcttttcaagcaggccaccgggctgaccccaaagcagtacgccgccgcgctgcgcgccgaccgcctgcgcaccggactggaacaacaggagcgcatcaccgatgccttccacgatgccggcttcggttccagtgggcgcttctacgagaacgcaccgaagttgctgggcatgacgcccaagcaatggcgcgcaggtggtcgcggcgaagtcatccacttcgcgcttgccgaaagctcactgggcagcgtgctggtggccagcagtgccaccggcgtggttgcgatcctgctcggcgacgatccggagacgctgctgcagtcattgcagcaacgcttccgccaggccgaactggtcggtgccgaccagggctatgagcaactggtggcacaggtggtaggcctggtcgaggatccttcgcgaggcgccacgctgccgctggatatccgcggcaccgcgttccagcaacgggtgtggcaggcactgcagcagattccgcgcgggcagaccgcgtcgtatgcggatgtcgccgcgcgcatcggcgccccgcgctcgagccgtgcggttgcccgcgcatgcgcgagcaacccgctggcggtggcagtcccctgccaccgcgtggtgcgccgcgatggggacctgtccggatatgcgtggggcgtagcgcgcaagcgcgaactgctgcgccgggaaaaggcctcgactgcctga

SEQ ID NO: 498740 - DNA, 447 bp, Stenotrophomonas maltophilia
atgatcattgatgcgaccgacggcagcatccagctcggcaatctgccgactctgatcggccccaccctgtcacgggatgaggcacgtgtcgcctttgccatgctgatgcgaggagagcgcgacgtcggcaccggctacgtctggctcagactgcaccggctcagcctgggcggcgcgcccgctggcatcagcctgtgcttccacgggcaacagctcgacatggtgacgatgggcgtcgatctacccggtgcaacgttggaagacggctggccgacccaggccgcgatcgatgccgaagtcaccttcatgcgccgcacgctgggtgcggcgctggggcgcaaactggccggcgggcacgcccgcttcgactggggcgaagcctgggcccgtttcgatccgaagggcttcatggccagcagcggtatccgctaccggccacgtcggtga

SEQ ID NO: 498741 - DNA, 171 bp, Stenotrophomonas maltophilia
atgaacgagcgagacaaggatcaggacccgaagcagggcgttcaggaaagccgccaggacaggaagcaggacgatgtggccaagcagcggccggggcagcgcgatcaacaggtgcgcgatgcgcactcacgcggcccgcggcgcaaggacggcgaccaggagccggcctga

SEQ ID NO: 498742 - DNA, 2073 bp, Stenotrophomonas maltophilia
atgacaaacggatttgcaaaagacgggctttcccccgaagaccttgcctggcgcgtgcaggcgcgcactgcgctgcaggaacggcgctatgccgaactggatgcgttgcttgctccacatgagctggcctggctgcagggagagaatgcgctgcccggcatccgctggcggctgcgcaacctgcacgacgccacgctgacgctggaagcccgcctgcaacaggcccagcagtgggcctcggccgcccccggcagctactacgcctggctttgcctgggcgcctgctggcaggacgctgccggcgaactgcgcagcgccgatgttgcagcactggtcgaagacagccagtggctggcggcgcagctggcccgcgaccatgccgtgcacgcctacctgctggcgatgccgctgtcgccacgacctgcgttggcgctggatggcatcaagcgcatcaccagctacctgcgcgaaccgaactggctgcgtgcgctgcaggccggggaacccgccgcatccgatgacgccacgctggccgagcactaccctcaagcctggccaaaggcattgcagctgctgtcgcgcttcggcacgccgttgcagacgctgccggatacgctgcccccgttgctgcgcgagcgcagccaggacgatttcgacgcaccactggcgtactggatgcgcctggtactggagcagcgcccggacgatctggccacgctggaagacaccctgtacttcctgtacccgcgctggggcggcagccgtgaggcgatggagaacttcatcgagggtagctggtgccgtggcctggaactggcgcagagcaacgcgctgcggtggcacaaggagcaggactggatgggcgatctgccccaccgcgaggatgccgaggccgtggccgcgcacgagcgcgcctacacgcagatcctcgactggcacctggaccgccacctgcgcgcgcaggtgctggcccagcgcgccgggctgcgctaccgtcttggccgcgttgaagacagcgaaggcgtcgtgcagtgggatccggaccacatgcaggcggtgcttgaagatctgcagcaggcatggacattggaccgcgatgtggtcctgcacgaggggctcggcaacctcgaggcctgcacctggttcgcccatgtcgacggtgccgaagcactgttcgcacaggtggtggactatgccgcgcgcgaaggcgattcggcgatcggcctgctctgggccgccaccgccatcgagcatggcctgctcggccaggccagcgacccgacacgcgccagtgtcctgctgcagcgcgcgttgaagcttgcgcagcaggacgacacctcggcggtgacgttcgccgccaatctgttctgtgatgtttcgcaagccgcaggcctgtcgctgctgcagcgcatggcggacgatggcgacgccggcgcgatgtcggcgctgtgcgacctgtacaagggccgcctcggtggccgcgaccaaccgcagttcgccgatgcggaaaaggccgcctactggcaggagcgtgcggtggaaggcggcgacctgatcgccacctacaacctggccgtacgcctcgtcgccgcaggcggcgcggagaatgaagcgcgtgcgcgcgagctgtacctgcgctgcctggatgaggccgaggccggcgagcgcgtgtggggcccaacctgccgcaacctggcctgcctggcattcgatggccggaacgacgcgcacaagcgcgaagcggtcgaacgcgccttgattccgctgtggtggcgcggcgacgacgacgacaagctgtgggctgccggctatctggccgacatctaccacttcggtaacggcgtcccggccaatgcattcctcgccctgacctggctgcagcgtgccagcgagatcgatccggagtatgtggacgtggtacgcatggcaccgctgatcaacggcgaaggccgctggttcggtgccagccgcgcacgcaagcagcaggaacaggaccggcagcaggtggacagcgccacctgggccctgaccttcggccagcgcagccaggacagcaacctcactgcagtctga

SEQ ID NO: 498743 - DNA, 510 bp, Stenotrophomonas maltophilia
gtgagccaggaactgcccgtgctgtggtcaccggcccagcaggcctggctgcaggccatgggctacaccgtctatcacgacggccagttggctgcggagctggatgccgcgctgcagttgagcgtggccgaagccgatgcggctgccgcgccagcggtggagcaggtgcgggcaccaatcgcacccgcgcgcgagcctccggttgaagccaaaccgggttcccgccaggaacgcccggtgccgccgcgtcgcgagaccccggtcagcgcaccggacaccgcgcccgccgctgcccgcccgctgccgggtggcaatgcgcggcagccggtagtgcggctcccggatcgcctgcagatcgcattgctgcgtgcctccggctgtaatcccaacgaccctgccacgcaggcgctgatggacagctggccgctggaccagctgcgtcaggacccggccgccaagcgcgcgttgtggccgcaactgcgcgccctgcgcaagcggggcgcaccatga

SEQ ID NO: 498744 - DNA, 159 bp, Stenotrophomonas maltophilia
atgcctgccgtcctggccggcacctttcaggccgtcgccagcgacgttggcagcggctcctgccgctaccttcggctctacaacaacgaggatcagcccgacttgcgccggaacagcaatcccgatatcgccagcatcacgatcggcggcaacgcatag

SEQ ID NO: 498745 - DNA, 2082 bp, Stenotrophomonas maltophilia
atggcacggtggcaatggatggcggcaggcgtagcattggcgacggtagtggcattggccgcaacctggtgggagacaccgctgcatacgctggctgaaccggcgggtccggttccaacgccgctggcgtggaccgcgcagatcgaaccgctggccggcgatggccacccgggtgaccgcgatggcgcgtccgcgcaggcacgtttcgccgatccgtacgcgttgctgcgcggtgccgatggcagcgtctatttcacggatgccggtgacaacaaccggatccgccgccgcttgcccgatggccgcgttgaaacggtggccgggcagggcgagggacgcgttgatggcccggcactgcaggccagtttcaatacgccttcgggcattgccgccgacgcgcagggcaacctgtatgtggccgacaccggcaaccatgccatccgccgcatcggcaccgatggccaggtgaccacgctggccggtggcgaacagggccacgccgatggccctgccgcgcaggcacgcttcgatgcgccgatgggcattgcagtggatgcgcagggccaggtctatgcggccgataccttcaatgaccgcatccgggtgatcggtaccgatggcaacgtgcgcaccttggccggcggcgatcggccgggcctggccgatggcaccggcgccgctgcgcgcttcgacacgccggtggcgttggccttcgatgcgcagggcgcgctgctggtggccgaccttttcaacaacgcggtgcgccgcgtaggcgccgacggcacggtgagcaccgtggtcgccgccggtggcgtgatcaatgggccgctgtcgctggccaccacgcacgacggtgtgctgtacgtgggcgatcttgatggccgcatcgtgcaggtgacgccgcagggccaccagatcgcgctggtcggcaatggccgcctgccgcgcctggcccgcccgagcgggctggcgctggatgccgatggcagcgtgctggtggccgacgccgccagctaccgcctgcatcgcctgcgcccgctgccggtgggcgaactgccggcaccggcactggtcggcccggctgccgatgcggcgttgccggagacgggcggtcgctggccgctggcaccgcaggacggttggcatgaagtggtcggtacgctgggtgaggtgcgcggcaacttcaccggcgagagccgccaccacctgcatggcggtttcgacgtgcgcggtgatgtgggccagaccgtactggcgattgccgagggcaagatcagcagcccggtggccgcctggaacctgggtgagcaggccgagggcctggcggtggaccgcctcaagtacatccacatgcgggtcggccgcaccccgcgcgatgagccctacgatgcgcgctggcaggcgttgtatgacgagcagggcaagctggagcggatgcgcgtgcgccgcggcatgcgcatccacgtcggcgaccgcctgggcagcatcaacaaccaggcgcacgtgcacctggccgtgggcaccggtggtttcgagaccaatgccgtggcgctgggcttccacaactacgccgaccacttcgcaccgcgcatcaccgatgtggcgctgctggacgacaacgaccagccgatggccgccggcagcgatggcgtggtgatggtggcgcgccagggccgcggcgcgcagatcgtgatcgaggcctgggaccaggtcgacaacaacctgccgcgtcgtcgcctgggcatgtaccaggtgggctaccagatcctcgatgccggcggaaagccgctgcagggttacgagcagccgcgctggaacatcgtgttcaaccgcatgccgccgcagaaggaagcggtgcgcgtggcctacgcaccggacagcggtatcacggtgcatggcagtgcggtgacccggttccgttacctggccaccaacaccgtgcgtgatggcctgatggaaaccgggcgctggcaaccggcggcgctgccgccgggcgagtacatcgtgcgcgccagcgtgcgcgattacagcggcaacgaaggcgtcggcccgcgcgagatcagggtacggctgctgccatag

SEQ ID NO: 498746 - DNA, 1251 bp, Stenotrophomonas maltophilia
atgccgaccgaacccgctactgccctgatcagcaacgacatcgttggcctgggcctgattgccgccaccctggccctgatcttctgggctgccagtggcccgaccccgttattgaagaagatcttcgcctgggtgccggcgctgctgctgtgctacttcgtccccgccatctacaacaccgccggtgtcatcgacggccacaacacctcgctgtacaacccggtcgcgcgtgacgtgctgctgccggccgcgctggtcctgctgaccctgtcgatcgacctcaagggtattgccaagctcggcccgaaactgctgatcgtgttctgcgccggtaccgccggcatcatgctcggcgccatcgtctcgttccagctgatgaagttgatccaccccgaaaccgtggccggtgatacctgggccggcatggcggcgctggccggcagctggatcggcggcggcgccaacatggttgccatgcgcgaagtgttcggcaccgatgccaccaccttcggccagttcgcggtggtcgacgtggcctgcgccagcctgtggatggccatcctgctgttcctggccaaccgcgcgcagcagatcgatacccgcaacggtgccgatacccgtgccatcgacgagatgaaggcgcgcatcagtgcctacgaggcgcagaacgcgcgcattcccagcatgaccgacctgatggtgatcgtcggcgtggcactgggcggcgtcggcctggcccatgccatcgccgcgccgctggcgggctggttcaagaccaatgtcagctgggccagccagttcagcctggacagccagttcgtgtgggtgatcctgctgtcgacagcgatgggcctgggcctgagcttcactcgtgcgcgccggctggaagccgcaggcgcttcgcggctgggcacggtgttcctgtacttcctgatcgcctgcatcggcatgcagatgaacctgctgtcgctgctggaccggccgtggctgttcctgctcggcgcgatctggatggccacgcatgtgctggtgctgtgggtggtggccaagctgctgcgcgcgccgctgttcttcttcgcgatcggttcgcagggcaacatcggcgcagccgcttcggcccccgtggtggccgcagcgttccatccgacgctggctccggtgggcgtgctgctgggcacggtgggctacgccaccggcaccgggctggcctatgtcactggcctgatcctgaagtggatggccaacggctga

SEQ ID NO: 498747 - DNA, 390 bp, Stenotrophomonas maltophilia
atgcagctcggcgccttctccgtcagcctctcggtcagggacctggcggcctcccgcagcttctacgaagcactgggcttctcggtgaccggtggcgagccggcgcagaactggctggtgatgcgcaacaacggcgttgtcatcggcctgttccagggcatgttcgagggcaacctgctcaccttcaacccgggctgggaccagcacaagcaggaactgacccacttccaggatgtgcgtgaactgcaggcggaactggatgcgaagggcattgaactggcggtgcgtaccgaccctcatgggcggggcaccggctaccttcagttggccgatcccgacggcaatgtgatcctgatcgaccagcatgtggcgcggccgaacggccgctaa

SEQ ID NO: 498748 - DNA, 1413 bp, Stenotrophomonas maltophilia
atgtcttttgaatcgctgggcctggcgcccttcctgctgcgtgcgcttgccgagcagggctacgaaaacccgaccccgatccagcagcaggcgatcccgctggcactggccggtcgtgacctgcttgccggcgcacagaccggcaccggcaagaccgccgccttcggcctgccgctgctgcagcacctgggcaccgcctcgcaggaagtgcgcagcggcccgcgcaagccgcgcgcgctgatcctggcaccgacccgcgaactggccacccaggtgcacgacagcctgcgcggctacagcaagtacctgcgcattcccagcgcctgcatctacggcggtgtcggcatgggcaaccagctggacatcctgcgccgtggcgtggacctgctggtggcatgcccgggccgcctgatcgaccacctggagcgtcgcagcatcgacctgtcaggcattgaactgctggtgctggacgaagccgaccgcatgctcgacatgggcttcctgccgtcgatcaagcgcatcctggccaagctgccgaagcagaaccggcagaccctgctgttctcggccaccttcgaggacaacatccgccagctggcgctggagttcatgcgcaacccggaacagatccaggtgacgccgaagaacaccgtggccgaaaccatcacccaccgcgtgcacccggtcgatgccggtcgcaagcgcgacctgctgctgcacctgctggcgcaggacagccgcgagcagaccctggtgttcgcccgcaccaagcacggcagcgacaagctggcctcgttcctggaaaagtcgggcatcaagaccgcggcgatccacggcaacaagagccaggggcagcgcctgcgtgcactgggtgacttcaaggccggccgcgtgaccgttctggtggcgaccgatatcgctgcgcgcggcatcgacatcaacgagctgccgaaggtgatcaacttcgacctgccgatggtagccgaggactacgtgcaccgcatcggccgtaccggccgcaacggcgcgaccggccaggcgatttcgctggtggcacaggatgaagtgaagctgctgcgtgcgatcgtgcgcctgctgggccgcgacatggacatccgcgatgtaccgggcttcgagctgcaggtgccgatccgctggggcaacagtgcgccgggcaaggccgagcacgataccggcgagcgcgcaccgcgcaagagccatgcgcgccgtccgcacggtgatgcgccgcgccacgcgcacgcaggcccgaagaaggccggcggtggccgccgcgaaggcggtggcaatggccagcagcgtgcaggtgccggccagggccagcgccgtggcggtggtggcaatggtggcggccgtggtcgtggccagggtggcggcggtggtcgcgctggctga

SEQ ID NO: 498749 - DNA, 918 bp, Stenotrophomonas maltophilia
atgatcaccggtgccgcccagatggacggcgcgatcctggtgtgctcggccgctgacggcccgatgccgcagacccgcgagcacatcctgctgtcgcgtcaggtcggcgtgccgtacatcgtcgtgttcctgaacaaggccgacatggtggacgacgccgagctgctcgagctggtcgagatggaagtgcgcgagctgctgagcaagtacgacttcccgggcgacgacaccccgatcatcgctggttcggcccgtctggcgctggaaggtgaccagagcgacatcggcgtgccggccatcctgaagctggtcgacgccctggacagctggattccggagccggagcgcgcgatcgacaagccgttcctgatgccggtggaagacgtgttctcgatctcgggccgcggcaccgtggtgaccggtcgtatcgagcgcggcgtgatcaaggttggcgacgaaatcgaaatcgtcggcatccgtccggtgcagaagaccaccgtgaccggcgttgaaatgttccgcaagctgctggaccagggtcaggcaggcgacaacgccggcctgctgctgcgcggcaccaagcgtgacgacgtcgagcgtggccaggtcctggccaagccgggttcgatcaagccgcacaccaagttcgaaggcgaagtgtacgtcctgtcgaaggacgagggcggccgtcacaccccgttcttcaacggctaccgtccgcagttctacttccgcaccaccgacatcaccggcgcagctgctctgccggaaggcgtcgaaatggtgatgccgggtgacaacgtcaagatggtcgtcaccctgatcaacccggtggcaatggacgaaggcctgcgcttcgccatccgcgaaggcggccgtaccgtcggcgccggcgtggtctcgaagatcatcgagtaa

SEQ ID NO: 498750 - DNA, 486 bp, Stenotrophomonas maltophilia
atgccgccgttccttggcggcggcgagatgatcaaggaagtcagcttcgacggcaccgtgttcaacgatgccccgcacaagttcgaagccggcaccccgaacatcgccggcttcatcggcctgggcgtggccgccgactacctgcagcagcttggccaggagaacgtggaagcacgcgaggctgaactgctggcgcatttcaccgaagagctgcgccgcgtcgatggcctgcgcatcatcggcgaagcaccggagaaggccgccgtggtctcgttcctgatcgacggcgcgcatgcgcacgacctggcgaccctgcttgacctggaaggcgtggcggtgcgctccggccagcactgcgcacacccgctgctgcagtactttggtgtggcggccacctgccgtgcctcgctggcgttctacaacacgcacgccgagatcgagcggttcatgaccgcgctgaccaaggtacggaagctgttggggtaa

SEQ ID NO: 498751 - DNA, 885 bp, Stenotrophomonas maltophilia
atggccgagctctcgccgtatgcgctgcggctggcgctgtacctggtgctgatgctgctgttcgggcggatgctgttcgtccgccccggactgccgcgcagcatctcgctgacgctcgccgtggttgcgctcatcctggtcgtcatcgatgcagtgaaccggttgtccggcgtgcttggcatcccggcagccgacatcgacccagcaacggcgcactggttccttaccggcacgccggtgggtaaggccggcctgctgcgcaccgtggcagtgctggcgatgctgcccctgctggcatccgttacgccgctgcggggcctgcgccgcctggcgctgctcgcgttgtccgccaccgccctggccagcctgtcctggaacgggcatgccgccgccggtgatggattcggcggcaccttgcggctgacggccggcatcgtgcatctgctcgccgccggcgcctgggtcggcgcgatcgccgccatcctgcagctggcgctgcgtccacagggcctgcgcctgcgcgaacgtacccgcgaactgtggcaggccgcgcactgcttcgccgtgcctggcacgatcatcgtcgccctgttggcgatgaccggcacctatacctatgtcgatctcggcggttccatacagaccctgaccggcgccgcgcacggacgctggctgctgctcaagctggcactggtgggtggcatgctggggctggcggccctgcatcgctggcggctggtgccggcgctggcagtctccatccgtggcggctggcaacccaggccgctgcgctcactccgccacagcctggcctgcgaatcggtgctggcgctgctggtgctggcctgcgtggcggtgctcggtacgctggatccgctgtcatga

SEQ ID NO: 498752 - DNA, 1305 bp, Stenotrophomonas maltophilia
atggggtcacgcttcctgctgcttgctgtactggcgctatgtgcgcaaccaaccgtgatggccaacgaacgggagctctccgacgcggcggcccgggaggtcttcctgcacgcagaacaactctgcaacggagaccggggccgactgtgggggcactccctgtgcgggccgatgatgctggttgatccagggagccgtcaggtcatcgcctcgcacgcagacgtacagggggcgctgaaggcaagcggtaacgtgttcgcaggccagcttccggccgatgcgatcgtcgccaataccgccgtggactggtccggcacacgctggacgcagctgctctggccattgccgcaggacgcgtcccggcgcagtaccctgctggctcacgaaatgttccatcgcctgcaaccggcgttgcccatcatcgcgccgaccgagggcggaaacgaacacctcgacacgcttgaaggacgctactggctgcaactggaatggcgcgcactggcggatgcgcttgcggccaccgatgcagtggcgcagcacactgcgatgatggatgcgcttgcattccgcgccgaacgccaccaccagttccctgcggccgcgcaggacgaagccgcgctggaattgaacgagggcctggctgaatacaccggcgtggtcgtcggcaacccgtcacccgcgacacgcgtccaggcggcgctgcatgacctccgggcgcacgttgctgatcgcagcttcgtccgctctttcgcctacgccaccggcccggcctatggcctgctgctggaccaggcggcccccggttggcgcagcgatctcgcccaccacgcccgggatctcggcacgcgcctggccgaagcgaccggtgcacctccacagacggacgttaccgcactgcgggcagctgccgcgcgctacgacgggccagcactgcgcgaagctgaaacgctgcgcgaacagcagcgcctggcgcagctggaacacaatcgtgcgcgcttcgtaacaggcccggtcgtgcgcctggacctgcgcagcatgcgcatccagttcaaccccaacacgatgcagccgttgcctggccgtggcacggtatatccaacgatgcggctgaccgacgtctggggcagcctggaagtcaccgacggtgcgttgatgcagagcgactggaaggcggtgttcgtgcaggcgcccgcaaatactgagccgccgctgcaggggccgggatggtcgctggacctgaagccggagtggtcgctggtgccgggaacacgcaatggcgactacgtgttgaaggcgaacccctga

SEQ ID NO: 498753 - DNA, 1188 bp, Stenotrophomonas maltophilia
atgcagcgctggacactcctgttttcattgacgctttgctccgccatgacggcgcccgccgtgtgggccgcacccgtgtgggtcactgcctggacggccgcgcccgcgcccgaccgcaaggacggaacgtccgatgcgccggtacagttcgccgcacagaccgtgcgccaggacatgcgtatcggcagccgtggcgatgcgctgcggctgcgcatcagcaacgagctcggcacggcgcccttgcgggtcgaggacctgcgtgtgggagtgaagaacggcaaggccgcaccgctgcgggtaacggtggatggccgcgcggtcatcgaggtgccggtcggagccgcgctgctgagcgacccggtgcggatgccggtggcggcgctgcaggagatcagcgtgagtgcctatttcccgcagcccacccgccccgcggtgcgccgcaccgagctgcgggtcgcagatggcaagcagacagccgtcgccgacagcgtgcggctgagctaccagcagaacgtgttctcggcagtgatggtgcagcgtgatgatcgtccccaggtaatcgtggcgctgggcgattccatcacggaaggcgccaccgcacgccgcggcagcttcaaccagtggccggagcgattggcgcagcgcctgcagcaggcctgcccgaaccggttcgtggtgctcaaccagggcatcagcggcaacaagctgcttgaccacggccgcagccacagtgcgctgtcacgattggatcgcgatgtgatcgcggtggccgacgccgatcaggtgatcctgttcgaaggcatcaatgacatccgccacggtggtggcgcgcagccgctgcctggacgcagtgcggcggacatgctgctgggctatcagcaggttgcggcgcggctgcatgcgcacggcatccgcgcctggctgggtacgttgaccccgttcggcggttccgagcgctacgagcccgtgtccgccgccacccgcaccacgatcaaccagtgggcacgcggcggcaacagcggcttcgatggcatcatcgatttcgatgccgcgctgcgtgacccgaaggcagccgaatcgttgcccaacgagatcacccgcgaccatctgcatcccaacgacgaaggctaccggcgcatggccgatgccatcgatctgcgcatgctgggctgcaccacccccgagtga

SEQ ID NO: 498754 - DNA, 369 bp, Stenotrophomonas maltophilia
atgaaggctttcattacgctcatcgccgcatttgctgcgggcccggcgcttgccgattccccgctgccgccgccagaaaggttcacggcatgctcctccacgcgaaatctctgtaccgattcggatccagccgtcaattcaacgcgggtagcgccacaggcatcgggtcaggatgcctggctgatatgcggatggcatcgcgggttgttcccgtcggacgatggggagccggtcgtggtcggctacgaaggcatgaacctggttccggctgacgtgacgttgagtgagccggtgctgcatttctacaatcgcggccgcctggttcgcaccgttacgctcgatcagtcgtatcggcgcaccatggtgtga

SEQ ID NO: 498755 - DNA, 357 bp, Stenotrophomonas maltophilia
gtgacccagccccactcccctgccccgcacccgatccacgacgcgcccaccaacggccccgcgttggatccgaataccctcatcgccgtgctgcacagcatcggctccggcgccgcctccgatggccagccgtggccggagcgccatcagatgcctggtcgacgcatcgccctggcggataccgattgctcgctggccggccttcgcgtggtactggagatcctgctggccgcgcagcgcgcccgcgagaatggcgagctggaacagtacgtcggcccgcgggtgatggagggcctgatcatggcaggactcggcctcgccgcacacgccagtacgcggctgcatccggagggctga

SEQ ID NO: 498756 - DNA, 141 bp, Stenotrophomonas maltophilia
atgacctggtggtcggtggctacggcgaaatccagcgtgatctacctggccgaagcactcagaattcgtcgagaacgacggttcggcgtgcgtgaccccacccccgacgccgaggcgtccaacaaggatggcaatagataa

SEQ ID NO: 498757 - DNA, 723 bp, Stenotrophomonas maltophilia
atgagcattaaggtgaggatggccctgagccagggttcgataaccttcctcttctttttcgggttcgtacttggagtggcgatagctgccgttgcactcctgggtagccagattccactgaaatgcttcgacgctggaaacgctgcggattgggttgctgcgtttggtacttgggctattggtattggtgcaatcaggttttccgcaagcgagctcaagttgaaggtccatgagcggcgcgagaagaggtacggggaagtgttggctgaactcaacaagtacggagagcttgcctatcgcgcgcagttgatggaaacgaaccttgacgcgttcgttcgacaagtcgagcgctacatctctacgacgtccccgctcatcgtctctgccaatgagctcattccgttgaaggagcacctgaaggagttcaaggcgcataggcatggtgcgaacctcgccggagagagcgcattgctgatggcccgggcaacggttcacgcgaatgggcttatcgaggttattgaaagtcttgaacgtcaaggcgcgttcgcgaacattgcttcttccttcatgtcgcgagtgcttcagaagagcgccagtgccatgcagaaggtcttggctgatgtcccggctgccatcgctcgcgacactgaggggccgcgcgggctcgcaaggtcgctggaatcgcgcatcggtgctgaagatgcaaaattgatggagagctga

SEQ ID NO: 498758 - DNA, 282 bp, Stenotrophomonas maltophilia
atgaccgagccccttctcgcatttgccctgtttgcaggaattgctatcacgtcgatcggctgcgctcgcatcgtctcgtggctgcttgatcgacgtgatcacaccgcctcgcagcagtcgcgcgaagccgccttcgtcgcccaagcacgcgtcgacctggccgcaaccggctggaccccggatgacgaaaccctctatcaggccgaaatcgcagctacaaagcgccgcgacttgctggccgcagcaacttacgccgatcagcgggaggccgctcatggataa

SEQ ID NO: 498759 - DNA, 606 bp, Stenotrophomonas maltophilia
atggataagcccatgcgagccttggtcgcctgtgagtactccgggcgtgtgcgtgacgcactccgccggcgtggagttgatgccatgtcctgcgatctgttgccgactgaggtgcaggggcctcactaccagggcgacgtgcgagacgtgctgtatgacggctgggatctccttatcgctcacccgccgtgcacccacctagccgtatccggcgctcggtggttcaagcacaagcagaaggagcaggccgaagcgctggacttcgtgcgtctgctgctcaacgccccaatcccgcgcatcgccctggaacaacctatttccgtcgttgcgagccggattgcgccgacttctcaggtcatccatccgtggcagttcgggcacggggagcgaaagaccacctgcctgtggctgatcaacctccctcacttggtgcccaccaacatcgttgagggtcgcgaagagcgcgtccatcgcatggcacccggcccgaataggtggaaagagcggtcccgcaccttccagggcgtcgcagatgccatggccgagcagtggacgaatgtggagcagctgccgttgatgctgccgttggcggtggccaatggctga

SEQ ID NO: 498760 - DNA, 639 bp, Stenotrophomonas maltophilia
atggccgcagcgcgctgcgccaatggccttgcatccatcgcccgtgagttctatgcgaacggtgtaggtgccgtccgcgcggcggcagtgctccccgcccaattcgatcatgcccacgaactctttggccgcattgatgatcttgattcgccactggtagaagcggcctgggctcgccgtctcatccagttcaaggccaagcccggcgaagaaccagcagaacacctggagcgccacgacgcgggcgttgtcgccggtcaggtcaatccactgccggatatcctcatacgagtcgccatcaaggaagccgacctgtcgaagggtttccagcatgtcgatggaagcggaaaaccagtcaatgccgaccgtcagggttccgtcggcgttcctgaattcactgactcccctgttagacgaggggagtcctgccgtcgctggcgcgccgtcagccattggccaccgccaacggcagcatcaacggcagctgctccacattcgtccactgctcggccatggcatctgcgacgccctggaaggtgcgggaccgctctttccacctattcgggccgggtgccatgcgatggacgcgctcttcgcgaccctcaacgatgttggtgggcaccaagtgagggaggttga

SEQ ID NO: 498761 - DNA, 669 bp, Stenotrophomonas maltophilia
atgacactgattagcaatcaagacagtttggaagaagggttcattcggtcggccctagagatcattgccaaccctggcaaaagatcgtccgttgtagcgcgatcggaccatcaaacagtgcgtcagcttttggatgaggcgccaagcaccacacgcttcacgcaatcaatggcagagttctacttggccatcccgcgacggcaattcgaagctctaaagtgcacgcatctcaaccccttcgcccagagtgttggtcgtccgaagatgatcagcaagggcgagcttttgacttggttcgtccgaatgaataagtccgtgcacgccattgcaggcgaactggaaggacgtcttggcagagcggctaacggaacgccctttattgtcatgcgggacgccagcaaaaagatcaatcgcatcatctcgcatgtcggcatcacaaccctggacatagacgcgattgaagaggcctttgcccgcggcgcaaggatcgcggcgcttggcgttgatcaagcgttgatgctgccttgggctgaccttgccgagaagcgcctatggcgacaggcgtatcggatccatatcgaccgatctcatgcagaaatggtagcgctcttggataggcaggagctcgatgaagccacggtcacagcgcctgaatcgatcgtcagctag

SEQ ID NO: 498762 - DNA, 846 bp, Stenotrophomonas maltophilia
atgggtttgaccgccagtgctacacccgatgtcaccaacagtcccgccaggaacagggcagctaatgagcgatctccacctgccgaaaggccgagggtattagcaatcagaccggagatgccggcaattcggccggtgaacaccaggtatgcgcctgcggctgtgccaatcatcaggccgccgatgagcggccagtaccacgctaaaggggtcagcatcatggcgagtctaccggtagctttagaaagcaaactctggtgtcgtcccgtacgaaccgatgacgcgcaagtcggtcggcgggtgcctcgcgcccgctgccaagagccctatttaaagcagaatccaaagcgacaggggtgttcacggttagctcttaacgaggaaggggagagcttaaggtttcataattgcggaaactatgcaactatcggcacatctcttcccttggtcaggccgccatgcgacgttcgggctaggatctacggcttcctatggtctctacttgtgaaaaactcctcccttaccgccgctgacctcgctgacatgaaggaacgggtcccagaagttgccgagctgcttcgcttcatggccacgccgtcgcgcctgctgttgctctgccagctctctcaaggggagtcgactgtgggtggtttggaggaggcaactggtatccggcagccggcgctttcccaacaactggcggagctacggcagcgggacctagtcaccacccggcgtgagtcccggtcgatcttctaccggttggcggacccacgtgtggccgccctgttgaccgccatgcatgagatattctgcaccgatacctcggtgcctgagagccggtag

SEQ ID NO: 498763 - DNA, 426 bp, Stenotrophomonas maltophilia
atgatccgactgatggcctttctgtgcggctcgttgtttggcctcggccttatcgtctcagacatggcgaaccccgcgcgcgtgatcgcctttcttgacgtcacgggcgcgtgggatccttcgctggcgcttgtcatgatcggcgcactgatcccctctgtcatcgcatatcgttgggcgcgtgcgcgcaatgcccccctgtttgctgctgcgctacatgtcccgcagcgccgagacatcgatcgcaacctggtgctcggtgcggcagtgttcggcattggttggggattggccggcgtatgtcctggcccggccgtcgccctgttggggtcgggtcaaccgttcgcactcgtgttcgcagctgcgatggttgccggcatgcttatccatgggactctgcaccacccccgctcagcgaaggaatga

SEQ ID NO: 498764 - DNA, 984 bp, Stenotrophomonas maltophilia
atgatcaaccgttgcgcgacagaaccagttcaccgccctattgaggtggtagtcgttgcccctcgggggatcagcgcctttcacctgtccgtgccgctgatgatcttcgacatccactcggaggatcgcgccttgttcaatgtccgcattgctgctgaggagcccttggtaaccctgagcggggggcaggtgggagtgagcgccagcgggggcttggaactgctggacgaagcagaggtggtcatcattccaggatgggcggatctgggaaatgcgcccagcaacgagttgaaaagcaagctcatcgcggcgaatcgtcgtggggcgcatgtggtcgggctctgctacggcgcctacgcattggcctatgccgggctactggatggacgtctagcttcgacccactggcttgccgaggacgactttcatagacgctttcccggcgtgaagctcgacatgaacgcgctttatgttgacgaagagcgcgtggtgacctctgctgggaccggtgcggcgctggattgctgcatgtatctggtcaggaaactctgcggtgcgcgggaggccaataaaatcgcgcgcctgatggtcctgccaccccatcgtgagggaggtcagtcccaatacattgagcagccggttcccgcctcgccgcaggatgctctgttgagcgcgttgctcgaccacatgcgtgagaatctgcaagcggatcattcgctcgatgaactggccagccgggtagccatgagcaggcggtcgttcacccggagattccacaaggccactggcatgacagtgggcgcttggctggatgtcgagcgcttgcgacgtgcgaaagagttgcttgaatctaccgatctgtcggttgaaaaggtggcagaacaatccgggtatcgcacggctgtggcgtttcgccagagcttcaaccgggcatttcatatcagcccgcgcgggtggaggcggacgttctcactggagaattaa

SEQ ID NO: 498765 - DNA, 870 bp, Stenotrophomonas maltophilia
atgaaaatgatgtcactcgccgtcgcaaccctgctggccctgggcctccagaccaatgcacacgccgcaggcaacccgccgagcaccacgtctatccaacagatccgaaacgccacggcaaagatcgcctatggcgacacggtgctcttggttgatccgatgctggccaccaaaggggcctaccccggcttcccggacacctatcgcagcgaactgcgcaacccgactgtcgagctcccgttcgatgtggctcaggtgctcaaggacgtggatgcagtgctgttgacgcacacccacttggatcactgggacccggccgcagagacgctgataccgcgtcagatgaccatgttcgttcagaacgaggccgacgctgcccagcttcgcggtaaggggtttgaagatgtccggattcttccagcccacgaaatgtttggtggcgtgaagatctcgcgtgttgctgcccaacatggctcggatgcaatgttcaaggtggagccgcttgcgacgctgctgggcagtgtgaccggctttgtctttgagaaagccggtgaaccgaccatttatctggctggtgacaccgtctggaccggcgacgtgcaggatgcgatcaagcgctataccccggatgtcatcgtgttgaacacgggcgacgcgcgggtcaaaggtttcgacactggcatcatcatgggcgttgatgacacctctcgtgtccatgcattggcccccaaggcaaagatcgtcgccgtgcatatggatgcggtgaatcacatgaccgtttcccgcgctgatcttcgccgttacaccgtcgagaagtccatccaggacagcgtgctgatcccggaggacggcgaaaccatcactttttaa

SEQ ID NO: 498766 - DNA, 489 bp, Stenotrophomonas maltophilia
atgaagactgcactgattgtcgtggatatccagaacgactacttccccggcggccgcctcacgcttgagaacagcgagcaggctttgtcggcagcgttggacgccatcgcgcaagccaagcaggccggtgaggtggtgataggtatccagcacttcacgcccagcgacggtccttttttggctaaaggcacggtcggtgccgagttgcacccggccatcgctgaggcactgaacggctgcgtagtgatcgagaaacagcaagccgacagctttcttggcacaccactgggccaaaccctggccgcccagaatgtctccgacattcgtctagtcggcatgatgacccaacactgcatcacgcacacggcgctgtcgcccgaggcagctgggcttgatgtgacaatcctcggcgcaggctgcgctgcgccaacggcgctgatcagcgatatcgcgttgtctggcctggcgggacgctgcaaagtcgtctaa

SEQ ID NO: 498767 - DNA, 903 bp, Stenotrophomonas maltophilia
atggctaaaaggagggaacagcgcggcatggatatcgggcagctgccttatcatccccaagccggctatgggctggacttggagatccttgccttctccgagctacgtcgtcgtgcgggcgctgaaatgctcgagttggcgcaccgttatgagttctacaccctcgtcggtgttaccgaaggggcctgtactcaccgtattgatttcgaatttgtgcaatgtgcacccaatacggtgctcgcgttgacgccggggatggcgcacagttttggcccgccaaccgattgggagggctggattgttgcgtttcgtccagagtttgcctggcccacggcctgcccaggtgcggaaaagagttgccgcatacttgaaggactggggagcgtgatacgactgacggcgaaagagatgcgggtcgtcaccggatgcatcatgcagatgcaggacgacgcaggcctcgatgactcaccggaaagcgtgcatgcgttgctacgccatcaactccatactgcactgacgcggatccgcatggcagatgagcgcggcgatgggcgggtgaagctccctcgtccagctggaagtagattcagagagttcgagcgactggttgaagagaagcacagggattggcatcaggtctccagctacgcaaaggccatgggatgtgctgaaaggacgctgacgagagcgacgctcgatgctgcagggctgaaccccaaggctttcatcgccgcgcggctggcactcgaagccaagcgcttgctgacgcatacggagttgaaggtgcttgaagtcgctgaacaactgcgtttcagcgacacccccaatttcatcaagttcttccagcgcgaggtgggctgtacacctgcaacgttccgtcaacgtcagacgcaggccgcgtag

SEQ ID NO: 498768 - DNA, 858 bp, Stenotrophomonas maltophilia
atgacctatatcattcatggtgcctccggcgctcaaggcggaccgctactcaagcgcctctcggcggccggaaaaaacgccgtcggtgcagtgcgcgcatccgaggcactggctgcaacacagaccgttcgcattgacaatgcatccgtggaatctctggttgaggcttaccgtggtgcggatggggtgttcattcacctgcctcagacagacgagggcagccgtgtaacctacgcacgcaacattgcccgagcggttgacctggccaagcccgggcgggtggtaatctccaccagcggtatcattgtcgatgagcctgactcgccattgcaggccccggctgattcggcgatggcaatcttgattgagggtgttcgcagcaccggcgtttcgtatgccgtcgtcgcaccgcgcctttacttggaaaacctactgctgccgatggtcttcgggccaacacagactgagggggtgctgcggtacccactgcggtcggatcaaccggtgtcctggagctcacacttggacgtagccgaggttgctgagcgcctcttcgagcagacgtcgatcagtggcattgtgggggttggccagctgccagggctgatcgggaaagatgtcgcaacaggcttccagcgccacctggggcgcgatgtcgcctttgagagcatcacgccccaagcattcggggcgatgattgaaccgctgatcggtcctgcgtccgctgccattgccgccttctacggcgcgctgcaaagcagtccgaccaatacgatacctcacgacaccagtgcgcagacgttgtttggtatcgcgccgaggagcgtggaacagtggcttggtgaaactctcggctga

SEQ ID NO: 498769 - DNA, 1443 bp, Stenotrophomonas maltophilia
atgactcgtatcaaggttgatgtcgccatcattggcgccggcagtgccggaatgacagcctaccgcgcggccaaagcgcataccgacagcatcgtggtgattgaaggtggcgtctacggaaccacctgtgcgagggttggctgcatgccgagcaagctgctcatcagtgccgcagatgctgctcatatgctggcgttggcgccgagctttggcgtcatgcctggagcaatcaaggtcgacggacgggaagtaatggctcgggtgcgccgcgagcgcgatcgcttcgtcggcttcgttgtggagtcggtagaagcgtggccggaggaacaccggctgcgcggcaaggcgacgttcctctccgctcatgagcttctggtcggatcatctaccatcgtcgaagctgatcgcatcgttgtagcgacagggtccagccccttcgttctggagggatggcgtgaggcgctgggcgacaggcttcttgtgaacgatgacgtttttgagtggactgatctgcccagctcagtggccgttgttggcagcggggtcatcggccttgagttggcacaggccctgcatcgccttggagtgacggttcgcctttacggtcgcagtcgcttcatcggaccgctgagcgacccagtggttgcggcggaggccacgcgcatcttctctgaagaagttcctgtgagcctgggcgcaaaggtcacaccctcgctcacggaggatggtcgcgtattagtggtctccgagaattctgagggtgttcgcagcaccgagacattcgacttcttgattgccgcgacaggtcgtaagcccaacatgctcggaatcggcttggacaaagccggtatcggtttggacagctacgggctgcccatcgtcgaccgcgctaccggtcagagcacctgcccgcacatcttcgttgccggggatgccaatgggatggccgatatccttcatgaggccgcagacgacggccgcatcgcaggcgacaacgcgggccgctatccaaacgtgcgcccacgcccgcgcagggcgcctctggggatcgtattttccaacccccagatcacgatggcaggcgctaccttccggcagttgaccgagagtggcgccacgtttgaggttggagaggcatcgttcgttgatcaggggcgcagccgggtcatgctggagaaccacggagtaatccgtgtctacgccgacagcgccacaggaaccttcttgggtgcagagatggtcggcccatcggccgaacacattggccacctgctgtcgtggagggttcagccgcgagataccgtccagcagatgatcgacagtccgttctaccacccggttgtcgaggacggtgtgcggacggcgttgcgtcaaatacagcgcaagctcgtcatcccaccgccgccgccggaaagttgcttggactgcttgccaggcgcgtag

SEQ ID NO: 498770 - DNA, 366 bp, Stenotrophomonas maltophilia
atgaacacgtccgtgccttcatgggttgggaaggtggaagaagtgaacgccatgggattcaaccgcattgcgcgctctacagccgatcctcttctgctctacataggggcaccatggtgtcctccctgcaagacgatggagcctgctttcgctaccgccgccgaggcaatgggcacaaaggcccggttcctcaaggtgaatgcagcgacggatccgcagctgttggactcgttgaaggtcgctgctgtgccgatgctcctgatgtatgacgagcaaggtcaagaagtaggcaggctcctgggctcgttgtccgcaccgcgtatcgcgcagtgggctcagaagcgactcgatagcgcacgccaatag

SEQ ID NO: 498771 - DNA, 330 bp, Stenotrophomonas maltophilia
atggcaacccgtagcacaacgactttcgacttcgagtccgacgtccttgaaagcaagacgccggtgctggtggacttctgggccccgtggtgcccaccttgccgagccatcgcgcctttcttggaagagatatccgatgagcttgaaggcaagctccaggtggtcaaggtcgatatcgatcagaacccggagttggctcagcgatttggggtgcggtccatccctaccttgaaagtgttcgtggatggcaaggtcgccaaggagatcgtcggcgcgatgcctaagcaggctttgcacgagcagatcgctccgttcgtaaagggcgagtaa

SEQ ID NO: 498772 - DNA, 1122 bp, Stenotrophomonas maltophilia
atgagcaagctgttcactacctacgacctttccggcttgccgctggcaaaccgcgtcgtcatggccccgatgacccggacccgcacgccggagaacatcccgagcgagctgacggcgctctactacggccaacgcgcctcggccggtctgatcatcacggagggccttccggtttccgacgagggccgtggttacctgtataccccaggtctctacaccgacgaacagaccgaaggctggcgtaaagtcaccgatgcggtgcatgccaacggcggcaagatttttgcccagctctggcacgtcggtaggctatcgcacgtctcgctgcagccgggcaacgtcgcgccggtgtcgtcgggcgacgtgccggcgaccaccacgatggtctatgcgtgggtcgagcccggcaaggaaggcccagtgttgccgagcaagccgcgcgccctgaccaccgatgaggtcaagcgtgtcattcaggacttcgcctcgtctgcgcgtcgtgcgatggatgcgggcttcgatggcgtcgaactgatggccgccaacgcgttcctgtttgaccagttcctgagcagcaagctcaatacccgcaccgaccagtatggtgggtcgatcgagaaccgtcagcgtctgctgctggaaaccatcgacgcggtcgcggctgaaattggcggcgacaaggtaggtgttcgcgtgtccccgtttggtcgcatctacgatatggaggccttcgaaggcgaggctgaagcgtgggcaagcatggcctcggcgctgaacgagcggaccctggcgttcgtgcatctgaactaccagaccacgatctcggcagcgggcacgcctgccggctttggcgccgcgttccggaaagcttaccagggcacgctgatcggtgcaggcgggttcacccaggagctggccgaggcggaactggccaagggcgagctcgacctgattgcgttcggcaccaactttatctccaaccccgacctggtggagcggatgaagaacggctggccgctggcaaagcctgatccgtcgaccttctacggcgtgatcggggcaaagggctacaccgactatccgacctacgatggcgctcgcgccgacgcagcagtcgtctga

SEQ ID NO: 498773 - DNA, 561 bp, Stenotrophomonas maltophilia
atgaccaccaacctcaacggcattgacgtctctgctcttcaggctgtcgcacaagaagtcgccgcaaccactgagcctgcaaagcgtagtgcccgtttcaacgtgaagacgaagtgggagaaccagacccgcagcgttgcgaccgtgagccggtattcgatccgcggtgaagagtacaagcgccacttcgagattgccgcggatgaaccgctggagttcctgggtcagaacacggcgccgaatccgcaggaactgctcatggccgccctcaatgcgtgcttgtcggtgggctatgcggtcaatgctgctgccatgggcatcacgatccacagcttggaaatcgaaaccgatggcgagctcgatctgcgcggcgtgctgggcctggatgagagcgtcaatcctggctacgacgaggtgagctacgtggttcggctgcacaccgatggatcgcgtgagcaagtggaagagctgcacaaaaccgtgactaaaacctcggtgaactacgccaacttctccaaggcaatccgcatggttccgaagctggaagtcgtcgagggctga

SEQ ID NO: 498774 - DNA, 681 bp, Stenotrophomonas maltophilia
atgaaaacggtcaaggtggacatctggtcggactacgtctgcccgtggtgttggattgcaaaaaagcgctttgaaaaggcggtggatgcgctggcaggacaggtccaggttgaggtgactcacaaggcctatcgccttgcgcgaggtgtcaagccgatggactacaagaccgcgttgtatcagaagctgggcggtccggcgggcgcagatcggatgatggcggccgtcagcacgaatggcatcctggaaggcttggtctacaacttcgacaccatgcgtttcggtgatacgacggttgcgcatgcgctggtcaagagtatccgctccccggtggtgtcccagctgctgagcgagcgcatctacaaagcagcgaccaccgatggcatcgacatctttgaccaggacgtcctggcatcgcttgccaaagaggtcggcgtgacggacaccttgttcgagttcgactctgagcgcatcgccgctgagatcggacgcgatgaaatggatgcaaaccaggtcgccaatggcgttccgttgttcttgttcaacaacaaggtgtttgtctccggtgctcgagaagtggatgtgttcgaacgcgccatccttgaagcagcccgtgagatgccagcgccaatgagtgtcgccggcgaaggcgaaagctgcggcatcgacggctgccattga

SEQ ID NO: 498775 - DNA, 564 bp, Stenotrophomonas maltophilia
atgcctgttggcacacgcgacgccttggttcagaccgctgaaaacttgatgcgaacccgcggctacagcgctttcagttacgcggacctggccgaggtggtgggcattcgcaaggcaagcatccaccaccatttcccgaccaaggaagacttgggcggggcaatcgtggaggactacattgaacgtgtccgcaccgagttcgatcgtgttgaggttcagcacagcgatgtggttgcccgccttgaggcgttcttccagatcttcaaatctggtgacgacggccgcttgctccccctatgcggggcgttggcggcagaaatgtccgccttgccgccgagtatgcagcagttgacgcagcggttctttgagatgcagttgacctggcttacccggatgcttgagcaaggcatcaagctcaagcaaatccccaaaggcagtggggccaggcagaaggcgtttctgcttctcagtgtcttggagggatccagcttcatcaactgggccaccaaagacgccgacacgttgaagcccagcgttatccggctgatcgtcgaaaacgcctga

SEQ ID NO: 498776 - DNA, 342 bp, Stenotrophomonas maltophilia
atggaaaagaaatggaccgaagagctgaagtcgctcatcaagcgggtcagcagcttcaacaaggccaatgctcctgtggccagcgccttccataagctggaactggccacccgtgagggcaacgtgctggacgccaagacgcatgagctgatctcgctggcggtggccgtgaccacccggtgcgatggctgcatcgccgcacacgccggcgcggccaagaaggccggtgcgaccaaggaagagattgccgctgcgttgggcaccgccatatcgctcaacgccggcgctgcttacgtctactcttcccgcgccctcgaagcgtatggagagcttggcgcctaa

SEQ ID NO: 498777 - DNA, 795 bp, Stenotrophomonas maltophilia
atggacatcaaacagttcgacggtcgcaagttgttggtcgtgggtggcagcagtgggatcggcctggaggtcgcccaaatggtggccgagcagggcggcgcggtcgttgtggtcggcaatcgcccggaaaaggcagaggttgcgcgccagcagttggcggccgtagcgggggagggcaaggcagctgctttcgccgcagatctctcgaacccggaaagcgtgcagacgttgcttgcaaagctggcggcggaacacagcgacattgacctcctcgtcaacacggcaggcatcttctatccgaaggcattcttggagcactcgattgaggactacaacaacttcctcgacctgaatcgctcgctgttcttcatcacccagcaggtggccgcttcgctggtcgcgcagaagaagccgggttcgatcgtcaacgtcaccgctgttgcggcccgccaggccatcgaaacggtgaaggcgcccgcctactcgatggccaagatgggcttggatgccatgaccaggcatgtcgctgcggaactggcggagcacggcattcgcgtgaacgcagtcagccccggcatggtggagaccaagatttttgagcggtttattcctggcgagcagcttgcgggcgcgttggatggcttcaagaacttccatccgctcggccgaaatggcacgccgcgcgatgtcgcggaaaccgtcatcttcctgctgtccgacaaggcctcttgggtcaccggtgcggtctgggacgtggacggcggcgtcatggctgcacgcaagctcggcaactaa

SEQ ID NO: 498778 - DNA, 168 bp, Stenotrophomonas maltophilia
atgctctttttcgttatctatcagccggttaagataatttctcttccagaatccgacatagacacccaagaggatctgaagaccaccggcgaatgtgagaatgagctgcgcatcctgtatcgtccgcggggaatggacatactttccgtacacaacgacagcaattga

SEQ ID NO: 498779 - DNA, 423 bp, Stenotrophomonas maltophilia
atgaacgcacgcattgcagccgccatgggcttcgacgacctgtacagcggaaatgaggccttccgtgagcgcttcgatgagatgctggatgcggtaaaggcgctgccagaaagcctccaggagcgtgggcggtcactgatgtatccccaactgcacaatgcctgcgcgatgggggatgccgaactggtgacggcgctcttagctactggcctggaccccgatgcctatacctacacagacgacgatgaggatcagcctccattggtctggctggcccgtgacaccgagcttggtttcgaggtgaagcgtcagatcgccgaggcactctttgctgcaggggcggacgttcaagaaggaggggcggctgaggccgctcgctcggcgggcgactatgatttagcagattacctacaatccagatga

SEQ ID NO: 498780 - DNA, 1758 bp, Stenotrophomonas maltophilia
atgcggcgtacggttctagcgttgttgctggtgtgtggcgtggccgatgcacaggaattcgtaagcagcgagcgtacctacgacgaacgcctgcggggtgcgcgggtcgcggcgctcggcgatgatctgtttggtgattccctaaacaggaaggatggcacgctgcagttctcgcagaccgatgtcgtggtgccgaccagcagtggaatgcgggtcgcattcacccgcacaacgccgaagcagaaacagggactggatcgcgctgccgccccgctgggggcgtcctgggagatcgatgccccctacatgatgggctcctacgatcaacgccggggctggaatgcggcgggcggcggccgctgcagcggcagcaacctgtccccgaccgagtgggtgggcccgtcaccggacttcaacacccgggtcatcccgaagcacacctattggagcggcatcttcatcaacctccctgcggtcggttatgaatcccttttgctgaaggaagcaggggcaagcctgccccaggatggggcaacctacattggcacctcggccagccagtggcgcgtcagctgcctgccagccatcaggaatggaaccggcgaaggttttgtggtgcggaccaccgatggcacccgttacttcttcgattggatggcggtccgcgaccagcacgacgtgctggccaacgagtactatcgtgatggcaatggcaatggcacatcgcagccctacctgctggttccggtcgtcgatgtcttcctctacgcgacacgtgtcgaggaccgccacggcaactgggtcagttacagctacgacggtgccaacccgacccgcctgctggcgatcatttccaatgacggagcccggatcgatatcgactatgacgcgcagggcaagatcggcgccgtccgggccggggatcgcacctggcgttactactacgtcgacagctactgggggcgcacgctcaacgaagtcgtacttcccgaccagtcgcgctggaccttctccaccgaccgccatgtgggcgccatgccgtggacgatggtgccccccgtcctgaatccaggcttctacatgaattcctgcgcgcagaatgcaacgggattccgctcggaagatgccggcgacccggccttcaacgatgtgatcaccatgcgccatcccagcggcgcacaaggggtgttctcgcttcgccagttgatccacggatcggacaacacgcctggcagctgcggcatcatcggcactagttcctccaacttcgggtttggctcattcggcattcccaatgcctacatggccaagtcgctggtatccaagaccctgtccgggcccggcatccagcccgcctcctggacgtacacatactcaccacactggtcattcaccggtggctgcacctccaactgcgtttcagcaacctgggaaaaccggcccgacggcgtgcaggccgagtatgtcttcggcaacgactacaccgccaacatcggcgacctgcagatcgagcgccttcgccgtgccggcctggtggtacaggaaacccgttatgtgaaggcagccgcatcggggccctaccccgcacgctatggaacgcaactggcgccacgcgggaatccgctgaccacccagatccggccgatgcaggacacccagctgcgccgggacgggatgcttcatcgtcgttatgtggatgcattcgacggcctagcgcgcccggtgcgcatcgtcgaattgagcactgctggcccatga

SEQ ID NO: 498781 - DNA, 399 bp, Stenotrophomonas maltophilia
atggagattggatggagcaaaaaggggacggaggggattaagtcgctttcgacccgacttctccatggcccgggctcgacaactcctgactaccaagcgatgcattccgaacgcttggctgccctggtggtatcaggtcgcagtgaggccctcctgtcgcagcaaggcaaggtaccttccaccttcatcgtcagcgtcgaatatgtcctcgccatccaatgcatacgccctgagcaggtactcaagggcccgatcccgctgccccagaagttcgttgcattggccaacgcgatacaggatgaagggattggtatgcccgtccggaccattcaatgcatccatgaagtacttcagggcggtcactacgtcaccagaaagaaagctcgcgtctccaagtga

SEQ ID NO: 498782 - DNA, 2208 bp, Stenotrophomonas maltophilia
atgtccctgatcctccgtaaccgcctgccccgccgcgcgttgctgccggctgccctgctttcgtcgctgaccctgctggccgcgcccagcgcgttcgccgccgccgatggcactgccgatgccaagaccctggaccgggtcagcgtccgcgccgaacagtccgcaccaccgtcgagcaccacgcgcctgccgatcaccctgcaggagaccccgcagtccgccaccgccatcagcctgcagcgcctgcaggacgaatcactgttcagcatcaacgatgtgatgcgcaatgtaaccggcgtgagcgtgtccttctatgacacgcagcgcccgctgtactacgcgcgcggcttcgccatcaccgacttccaggtcgatggcattcccacctacagcggctccaccaaccaggagtacgacaccgccttctacgaccgtatcgaagtgatccgcggcgccaacggcctgctcagcggcgccggcgtgccgtcggccacggtcaacctgctgcgcaagcgcccgggcaaggaattcgatgcgtcgttcgcggtcagcgccggcagctgggactaccgtcgcatggaagccgacgtgaccgcgccgctgaccgccgacggccgcttccgcagccgcgtggtcgccgcctacaccgatcgtggcctgtattacgaccgctacgacgagaacaagatggccggcatggcggtgctggaaggcgacgtcaccgacagcaccacgatcaccctcggttaccagagccaggacaacaaccccaccggctcgacctggggcaccgtgccgttcttcgacaaccagggccatttcgcgcacttgccgcgctcgaccaacctgtcgccgaaatggagctactggaagcgcgagagcaacaccgccttcgccaacctggaacagcgtttcggcgacaactggctgttgaagatcaacaccgcctatacccgtggcaacgtgcagaacgtgcgcctgtacggcaccggggagccggacccggtgaccggctcgggcatcttcctgcgtgcagccgccggtgattcgaaggacacccgccgcaacgtcgatgcctacctgaccggcagtttcgatctgttcggccgcgaccacgacgtgacgctcggcgcacagtggtcggacctggaaggcacgacgaataccctggcactgaacttcccgagcgactgggcaacgtgtgtcagcgccacgggtgcacgcgagcgctgctactacattcccaacgtgtacaactggaacggcgacatctccgaggtgacctaccgccgcaccggcgcgcgccgcgtggccaagaccacgcagagtggcgtctacctggccacccgcctgcgcctggccgatccgctgtcgctgattgccggcgcacgcctgagccgctgggaaaccctcacccgctcctacaacgccgctggcgcctacaccggcaccagcggcgcgtacaaggtgagcgatgaagtcactccctacgtgggcctggtctacgacatcaccccgaacgtgtcggcctatgccagttacaccgagatcttcaacccgcagaacttcaaggaccgcaacgagaacctgctggcaccggtgcagggttcgaacctggaagcgggcatcaagacccagtggctggacggccgcctgaccgccaacgccgccgtgttcgaggccaagcaggacaactacgccgtgcgcgacatgggcgtgccggaaggttcgctgagcgatggcacctccgcctacatcggcgtcaacggcaccaaggcacgcggctgggaagtagacgtcaacggcgagatcctgccgggctggacggtcaatgccggctacacccacgtcaaggtcacccgcgcggctaccgacctgctgtacgccaacccgccgaaggatctgttgcagctcaacacgcagctgcagctgcgcggtgcgctggaacgcctgagcgttggcggtggcgtgcagtggcagagcaaggtgcagggctacaacatcgcctatccgctgggcggcacggtgacggtgaaccagccggcctacatgctggtgcagttcaatgccaactaccgcatcagcgacagctggaccgcaacgctgagcgtgcgcaacgcactggacaagacctactgggcgaatctggactacaacaactacggcgaaccgcgcttcgtgtcggccagcctgcgctggaagttctga

SEQ ID NO: 498783 - DNA, 1059 bp, Stenotrophomonas maltophilia
gtgaccaacaccccgtcttccgccccctcccccctcacctaccgtgacgcgggggtcgacatcgacgccggcaatgcgctggtcgagcggatcaagcccctggtcaagcgcagcttccgcccggaagtgatgggcggcctgggtggcttcggtgccctgttcgacctgtccaacaagtaccgagagccggtgctggtgtcgggtaccgacggcgtgggcaccaagctgaagctggcccaccagctgaaccgccacgatacgatcggcatcgacctggtcgccatgtgcgtgaacgacgtgctggtgcagggcgccgaaccgctgttcttcctggactacttcgccaccggcaagctggacatcgacaccgccgcagcggtcgtgggcggcatcgccaacggctgcaccgaggccggctgtgcgctgatcggcggcgaaaccgctgaaatgcccgacatgtacgcccccggcgaatacgatctggccggcttcacggtcgccgcggtggagaagagcgagctgaaggacggcgccagcgtggccgccggcgacgtgctgatcggcatcgcctcctccggcccgcactccaacggctactcgctggtgcgccgcatctacgaccgcgccggtcgcccggccgatctggagctggaaggcggcgtgaagctggtcgatgcgctgatggcaccgacccgcctctatgtgaagccgatcctgtcgctgctgaagtcgcacggcgaggccatccatggcatggcccacatcaccggcggcggcctgaccgagaacatcatccgcgtagtgcccgacggcctcggcctggacatccaggcgtcgtcatggaccctgccgccggtgttccagtggctgcagaaggaaggcgcggtggccgacagcgagatgtggcgcaccttcaactgcggcatcggcttcgtgctgatcgtcgcagcggaccaggtggctgccgtttccgatgcagtcaaggcgcagggcctggagcactggaccatcggccaggtggtcaccgccgaaggcgccgaacgcgtccacatcggctga

SEQ ID NO: 498784 - DNA, 1023 bp, Stenotrophomonas maltophilia
gtgacgagtcccaagatagatgactggatcaaaagtgagcttgatttgtttgggataccaactccgacaaaccgactaagcgcatcgttgcagatggctgttgtgcatttgctcgcatcgggtctatcgaatgaccttgatgaggaaagtttcaccggagcattgctcggttccttctgtcagacaagtcgattagcgacagctggcacaccgggcacgtctgagacttcactcacatggcgcaggcacaacaaaaacggcaaggactgcctctctgagcgatctacgggtgccgacttttctttaatcattaggcatgacgacgactttgctgtagccgcagtgttccaagctaagaacgggcaatccaacatagggagctttgacgccagtcatatgtcacctgcaataccagaaaaagggagaggaaaggagcttcagttctgccggataagagactattgctacgaaatcctcgccgggtttacgccacccaaaaataatccaaatggtctcaatggcctggactgggctcactacctgatatacgagcctttcgcaatctattgctcacctctcagctcactatcagtcatcgaacactacatcacaatgcaccttaaatgcggtgccgtcagatacaaggaacatggctacagtattttcaccgatttacttagagaaggttgcgctccgaggagtgccaagcattccggctggctccccctgaactctaaggatgagataagcagctttgtcgcgtcagcactagatctattcgatgtctatgagagccatgtagatccccagcctggttggacacctctgattgaaggccgcgcaaagatctcggtttcacagaggatcgatgaaatcagaaaagcattggtccgccccctagagagcgtcaaagtccaagcttcagattttcaaacactggaggggcgaagagcggacaagagaatggggcatcagacggccggccgcgacacgaagatgtccaaaggacccagcggcctatga

SEQ ID NO: 498785 - DNA, 738 bp, Stenotrophomonas maltophilia
atggtggcagtggtgggccatgaccgtgctgacgctgctgggcgctgctggagccatggccatcatcagcgggctgccgatgtttctgttcgtgatgtatgcgcaactgactcagtaacatctcacgcaatcaagatcagcaagggccgctcattgcggcctttttttctcaatccccacttgactaaatccttagtgcagctagctttcctaaaacccggaaagatggaaatgaaccatattcaagttttcagcctcctgcagagaatcggaatttcgctaaatcaggaaagaaagggaaagcatcgatggtccacaaaacctttgaacgctgccactccagtctatcgatttccctccctgcgaaaggtgatggacttttggagagcgcgctgccaatcgacgctttatgagatccatgtgatagatgagtcggtccgcctgcttggactacaccaccctgacatgacagaggctttattccttgccctacagcaaaaaggaccccactcatacgaagacacactatataaaatccggtcgaatctaatagagcgtccagcggcaaaccaatggcggaggcagatcacaagcgaggtggatcagcttggctatatttacgccgaggcggaactccggcgagccgcctactttcgcgcactgagcagactcggctactatcaggactcaaatactcaagcccatgaggtttgctgtgacgagtcccaagatagatga

SEQ ID NO: 498786 - DNA, 315 bp, Stenotrophomonas maltophilia
atgaaagcaccgaagcttgccttcgccggcttggcgaccgcttttgcactgaccgcctgcggcggcccgccctccaacgcggaagcccagaaagccctggtcaccctgctcgagcagagcggagccgggcagatctccgacgtccccgagttccagctcaacgggtgcgttgaagccaaggaagccgctggataccgctgcgataccagcggaaaggtgacgctcgacattgctggccggcgggttccggtccccatcggtaaaaatcttaggtatgccagggaagacggggtgtggcgggcctacgccaaatga

SEQ ID NO: 498787 - DNA, 774 bp, Stenotrophomonas maltophilia
atgaagaagaaccaaaggatggccaccgctctggcggccacgctgctgttgagtgcccatgccgtttccgcccaagaagccagccagtccaacccggagtcagggaagcccggcttcttccgccagctgggaaaaagcctcaaggacgcgggcggcaacatgattggggtgaagccggcaggtgctcttggaagccaagccgccgggtcccaagccatctaccttccgattgatggcgcggggaagctgcctgggctcttcaagtccgataaccatcagctggcccagcagggccgactggactggcctcgggtcgctctgacgttccaggaatggggtgtgtccctgccctgctggaccgtcgaagcccggatctggacgagccctacagcctcgaccacagaggtgttccggacctgcgctaacgcggcactgaccgaggtcgacgacctgggggacatggccgaaatcaacacggccgccctctggaaagggcgcgacagcctgatgggagttcgagtgccctcgaacaaggccaacacgggggccagtcggtctaccggccccaacccgcccagccagccgttcgtcctcaacgtgagccgaccaggtgtgtccgaccgggccgtcgacgtggcgcttcgcgtggcctgggtctctgggttcattcggaccgccgacctgcacccgggggcgtcggggatgctgactccgttcaaggacagccggatgtggatcgcggggttcaagctggaaggcaatcgagaccggtaa

SEQ ID NO: 498788 - DNA, 1779 bp, Stenotrophomonas maltophilia
atggctgttcacatctcagatttggaagttcttaactttcggttgtgtatctcgacgagcctgcaactgactagcttcacgccgctagtgggattgaacaactgcggaaagagcaactgcctgacagcattgcagtggttagttaggaagaccaagctaggtttggaagacttccatgaccccggccaacctgtccaagtcaccgggacgatggtcggtataacgggtgctgatctagatgtcctagaaggcaagcaccggaagaagatcgagccgcacatacaggatgggatcctgcgcattcgacgggtccaggaagtgcctggcggagaggtgacattgacggttttagacccggctaccaaccagtgggaccctaatcctgcgggaatcgataacgccatcactgctctgttcccggatcccatccgcattggggcgatggagaatgcggaggaggatgcgagcaaggccaagacgacgacgaccataggcaagctgcttgcatcaatgctgtctgccattcaagagcagcacgagcaaaccttgactcctcatttggcagccattttggggatgatttcagctgaaggtgacgaccgttttgacgagttgggtcgtatcgatgcgtccatcaacggcaagatctcggacctcttccccggaatcagtatcaaacttgattttcctgttccagctttcaacgacctgattaaggcggggaccgtcaaggtctacgagggtggagggcaggggcgttcctttggttcatatgggcatggagcgcagcgggccattcagatggccatggtccggcatttggctgacttgaagagaggggcggcagccgctggtggcgcgaccttgctcctagtggatgagccagagctgttcatgcaccccttcgccgtggaacaggtgcgggaagcgcttcgtgctttgtcggagctggggtatcaggtggtgttctcgacgcactccgcgcagatgatccttgccaaggatgcgaaaaacgcattgttgatgaccaagaagcatccccacgggacaaaagcaaggccgcgcctgctatccgtcatagagcagttggtggagaatcctacccaccagatgcaccaaatctttagtctgaccaactcttctcaggtgttgttcgctgacaaggtggtgttggcggaaggaaagacagagcttcgattgctcccatgtctcttccaggccattgcaggtaagacactgggccaatcgtcgctggcgattgtgccaatgagcggtgtggccgacaccaagaaatcgatagaggtcctcgcggctctgggtcttccagcgtgcgccatagtggatctcgattacgccttccggcacgcgcaggcgcatgggttcctcgccgacgatgaccctgacatcgctgcttgcagggaaatccttgcgagacttgctcagaatgatgccatcacactggacgcaagcggcctgccgaagaaagacgcgcgcggtccggcatctagggcatttgaggtcctggccggggaggcagatgccagtgctcacatcgattcgttggtgaccaagctccgaggtcaatccatctggctctggagtcgtggggctatagagcctcacgttgggctcgggcaaaaaaccgaacatgcttggctcacttgtcagattgatattgagaccaagggtgtggacgttacttgcgcggatgcagtaggaattcgtgcgatggtggattggctgtctcagcttccggttgaagtcgaggaagaactatga

SEQ ID NO: 498789 - DNA, 759 bp, Stenotrophomonas maltophilia
atgacctccaaaatgcgttctgctttcatgctggaagatccagttaggcatacgttgctcacagcacaccgcttctatgtccaacaggctaaagataggctgctttcgaggttcgggaacatctcggcggaggcagatgcggcagcagaagctcattgggaggagtccggccgcaacttcgaccccgacatccacgacgagggggagcaagctgaggatgcgcaaaatcatggaatcatgttctacgagctgctctcagaaatgcatgagaggactcgcctaagcgttgtagccggtatgttccatcactgggacaaagcttggcgacggctcttggtggatcagcttcggctacccgggtttgttataggtgtccactccagaagagcgatgtggacgatggatagctcgcagctagaatcgctagtagaggcgcttggatggaatgccgcaacgttcccaggatatgctcgcttggatgcgatgcgattggtcgtcaatgtgttcaagcacggtgaggggccctcgatggatgatcttcggcaggcctatccggagtttgtgcctttggtaaacgggtgggttagggcttttcctgacgacaccagcatgaaggtgaccgatacacatctggatgagtttgccgaggctatcgaatcgttctggttgaacgttccgcgcgagctgaacttcgaccccaccgtgccgccgaagttgccgaaggacttggagcgggcacgaaggaaggacttggcttaa

SEQ ID NO: 498790 - DNA, 762 bp, Stenotrophomonas maltophilia
atggaccgcgactccataaatacatcgttggctgactggcgggcatcgtataggccgccaacgcttcacgcgaaggtcaatctctttgctattcgctgcttccgggacactggcgacggcgactatgtcgctgctcgtctggcgatgagggcgaggctttaccagcagtatttggcttcggctgagcagtcggtggagaaatatctcaagtgtattctgatgctcaatcgttgcgacacaaggcgtctgggtcacagaatccaggacgctatggatctagttcggtcctacctgtcaatcaatctttcgctaacggaggttgaacaagacgttttcgataacttggtccgatgggattttgatcgctaccttattcgttcatatcaagttgaagatgttgagcttggtggcttggatttactggtgtggcggctgaggcagtattgtgagccacttgacgtagtccattacgcagacgcgccttctcccgaactgcttagaaaaaacctggctgctattgaagtccgaaaaatcactgatcctaaggcggggcacctgcctaacgggagtctggagaagctcctggcggacaaaaagcacccagctaggcagggtctggtatggcgcaacctaagattcaatagcgccaatcgaaagcggactagaatgtcttctggctggcgtgcggtgaattcaccactagacatcgcggaggacgaggctgttgtagaggaggcaaagcgttggatgaaacttgggtaa

SEQ ID NO: 498791 - DNA, 666 bp, Stenotrophomonas maltophilia
atggccctgctgccggtattcacacttatgtccaacaagtttgacgactacagcgtcgaactttcaaacttcctgtccgggaaggcaaaggtgatgtcgacagcagcggactttacgctatccgatgagtgtcttctcgagggtctactgtcacgttcttggcaagaatgggcgcacttttgcagatcggtcgtcgtcctgtcatgcacagggtctgtaacttctgcaggtgtcccgatagttgctcaccccgacgcacttagccctcaacatgttggtggggcagcggccaaagcaaagaaaaccccagcacatcctacttgggggaacgtagctaacgctcttagaaatgaagtgacttggggcgataccgatgtgctcgcaaccatccttccaaggatgaatgtgccgcgacatggacacctgttagcggccttctcgcaagcgcacgagagcgccaaagccatccagaccattagaaatgccgctgcacacttcaacgacgaaacgatggcagaagtggtggccttaagctcaagatacgctgcattccagattactcatcccacgcaagctttgttctggacagtacctgcatccggagactacctctttagatacgttctggatgacctaaaggagaacgcatcgatagctattagctag

SEQ ID NO: 498792 - DNA, 1053 bp, Stenotrophomonas maltophilia
atgaaggtagaagaagcaaaatattccatcgcagaactgcgagcatggtttgtggacagagttctgacggtcaacaaagactatcagcgctcgtcgggcttgtggccaacatccgccaagagttacttcatcgatagcatccttcgagactttcctttcccgaaggtttattttcacgagaagctcgataaggcccagaagcgcccacacagagaaatcgtggatggccaacaacgcctaacgacaatcgtcgagtttgcggaggacgggttcgcacttggaagcaacgcggcggagttcgctggaaagcgacttagcgatttgccacaggatgtgcaagattcgttctggacatatacagtttccgtggatgtcatccgcaacgcggaccgaacgaacatcctccaaatgttcagaaggatgaacgccttcaccctccccctgaatgccgccgaaaaacgtcacagcgagttctatggcgagtttaaagactgggtcaaccagatcttggacatctatggctcaatattggtcgactggaaagtatttaccaaccggcagattgtccgcatgggcgacgcagagtttgtaaccgatgtcgctttggcggctgacgaagggatagtaagcacgagcccaaagcgcctgactgatatatacgctcggaacgaaaggggcggaaatgatctcgcggacatagatgcaaaggtgcgcggcgctctagaggtggttcgccagcaactttcaggaattcaaggtagctacgctgtcaaaccccacatgcttcactctcttctgactgcacttatgcacaacaagttcgatctccctggagtgactgccgacaccggagttgcgtctactggagactggctcacggaccctcagcgagcaaccgcgcagatccgtgagcttgcggaggccttcgagactaaaagcctagacaggttcccggctttcgtaaacgcatcggctgaaggcgggaatcgggctccgcaacgccagatccgagtcaaatggctctgcatggcgcttcagggaaaccttccttaa

SEQ ID NO: 498793 - DNA, 1530 bp, Stenotrophomonas maltophilia
atggccatcttccacacatcagtcaaaaccttcagccgaggcaagggacagtccgccgtcgccgcagccgcctaccggggcggtctactgctgtccgatttcgcgaccgggcaacagcacgactaccgccgtaggagcggcgttgtcgaaaccttttgcctcgcgccgccagatgcacccgactgggcgctggtgcccggcgagctttgggccgtggccgaagccgccgagcgccgtaaggacgctacggtggctcgcgagttcgagctgtcgttgccccatgagctttcggacgaacagcgcgcacacttggcgttctccattgccgaggcgttggtagaccgctaccagttcgccatccaagccagcattcactctcctggaaccccggacgggctcaaccatcacgtgcacctgcttgccagcaccaggcgcattggtccggatgggtttggacagaaaacgcgcgagctcgatgggggcgtgtcggggaaagtgcaggttcaatgggtccgggaaatggtcgctgaaacgaccaacgcacatcttgaagccgctggcctgacggtcacgattgaccaccgcagcttggcagagcaggctcgggcggcgtcggaccggggagacgaactccaggcggtggcattgtctcgagagccgaccaagcacctgggcaaggcggctgccgcgctgtcccgaaagggcatggacagccggctggtagcagagaatgacgccattgaggccggcaacgccgaacatctggaccatctcaccattcaagctgggcgtgagggcagggccgtgcccatgcatccgtcagtcggtcatggccaaggtggccgtccgtcctccatgcggggcttagctcctggcttggagattcgaggcgtgtccggaatgcggctgcctcaggtcttgggccgccagcacgaagcgaacgaagatcagcggcccatcagcctcgccgagcgcgtggctcaggccctgcgagaccttcaggacatcgcgcgcgccagggcagacctagcgacccagcgcatccgtgctggtctcgaatgggctcaagccgaacttgggcgggctggggagaccgtcccgttacggcagtggatcaccaaggcggttctccaggtccgggcactgcgagcggcaatcctggggcgtgccttgcgattggtgtcgctgggcagggctgaacgcctacatcacctggctcagcacgaatgggagcgcttcaacaccgactaccccatgggaaccaacggctactcgcgccccgaatggacgcagcgccgggagcgccgcctgtctgcgctggagcaacggaccaaggagctggagaaggcgcggtcgcggggctccgccgaggcattggcggaggtcgatgcggatgttcttcgtagagcgaccgaactggaggccatgccttcgccgtcacagttcgtccttgagtgccagaccatggctccggttgtcgccgactccccggtgccagttttgaagccacggccgcccaccctccattga

SEQ ID NO: 498794 - DNA, 774 bp, Stenotrophomonas maltophilia
atggcaaacggatccgccgctcacgatagcaaagtggctgtgttggtcgattgcgacaatgtaaaccctgagatcgttgaccatgccctactgatgggagcgcagttcggccgggtggtggttcggaggggttacggcaaccactccacgctgaccaagcgttggcaggaaacactcgtccggcaagcgtttaccccatgcctgcaataccaatacgccgctggcaagaacacggcggacatcgcgttggcgctggacgccttagaagccatgttcgaccagcgcgcagacaccttctgtttggtcaccagtgactccgacttcgcctacctgtgtcgtaagcttcgagaacgaggagccacggtttgcatcgtgggtgaagctaagacgccagaggcgttgcgtaacgcctgcgaccagttttttgagtggcaaccaacggagtcgaatgcgacctgcgaagagtcgcctgctccgaccgctaaagtcgcgcccagcaaagccgaagtggccaagccgattcccaaacgccgccctcgcttccttgtcgacgcggttgccttactagccgatgggaccacggacggggaagtggtgctagggacactcggccactatctgaagcggactgacccatccttctcgccgaaggcctacggccactccggcctcctggacatgatccagacatatgacctgctgacagccacacaagcgcccggcgggcattggctagtcagactggcaccacaacccgaatcgacagccgcatga

SEQ ID NO: 498795 - DNA, 1629 bp, Stenotrophomonas maltophilia
atgggacggcgaagcggcttagaagggtttttgcgggcagccggccgggcagcggcggcggcagagcgggagaccaaacgccagcagagggtgcaagccactcaacagaggcagttggagcgccaagagcgcatggcggccgcacagctgttgcgagagattcgcgcctacgagctgtcggaacgtgaagccgctcgccaagccaaagcgggatacctagaagatcgacagggcgaggtcgacgatctcaacgccgagttgaaggaccgcctggaggagctcgaggggttgctggtgcacaccctgtcggtgaacgacaccatccgctttgacagcctacgtcacaccgccccccaccctgcctttgaggtgccgaaggagttggtgcccggcttcgcaccagccgctgcggagatcgtcccaccgacgggccttgcccgcttttggccgggagccgggaagaagcacgcggctgcattggcggcggcgcaacaggcccaccagcaaatcctcgaccagttccaacgggcagagacgctaaagaagcagaagctggctgacctgcgtgctcaacacgaggctgctcgcgccctctacgaggccgacgtggcccgccgaaacggggaagttgacgagttccaacgcgcctacttggcccatgagcctgatgccatcgtggcctacaacgacatggtcttggcacgctcggaatacccgacccaaggctttccccagcgatacaagctcgcgtatgcggacgcgtccaaggaactgatcatcgaatacgaccttccagagctttcggtcgttcccacggaggccgactaccgctacgtcaagacccgggatgctatcgacgccaaggcgcgtaaggcaagcgacatcaaagcgctctaccaggacatcatcgcctcgatcaccttgcgcacactgcacgaggtgtttgaagccgaccaagcggatgccttagcgttggtgaccttcaatggcgtggtcgatgcacacgaccccaccactgggcaagaggtccgcgtccctgtggtctcggtccgcgcgaccaaggcctccttcctgcaactacggctggaccgagtagaaaagatcccatgcctccgaaacttgggcgctcaggtatccagccggccggatgagctacaagccatcaagccgattgttgagttcaacatggtcgataagcgcttcattgcccagacagacgtgctctcgggcctggagtcgcggcccaacctgctggagctgacccctggtgagttcgaagcgctggtatcgaatctctttagtcaaatggggttggatacaaagctgacacgcagctcccgcgacggcggcgtggatgcggtggccttcgacacccggccggtgcttggtggaaaggtcgtcattcaagccaagcgctataaggacacagttggcgtcagcgcggttcgggacctctacggaaccatgctcaacgaaggtgccagcaaaggcatcctagtttgcaccagcggctacggcactgcggcgttcgagttcgcaaaggataagcccatcgagttgatcgatggaggcggcctgctctacctcttaagggagcatgcaggccttgacgcacgtatcgcagcgtaa

SEQ ID NO: 498796 - DNA, 1476 bp, Stenotrophomonas maltophilia
atgcgcatcccacaccacctcgttcgcgcgccctcagggctctggtctttccggcaacgggtccccaccgatctccaggccatcgttggccggcgcatcttcaagcgcaccctgcgcacgtccgagctggccgtggcccagttgcgcgccctgcaactggcggcgcgctatgctcaagccttcgacgtgttgagggagcaacgcatgggaatcaaggaagaggacatcgacgcgctgctcaggcgcctgaccgatggcgacccgctacagcagttgatcttgaaccggaccaagacagcagacgggacggtgaccgagcactggcaaatcgacacgccagacgatgtcaggctctatcagcagatgatggagctctctgcctctcagcccagtgagctgagcgagttgatccgtgagggcgtgccgcccatgcccgtggcccgtcgcgtgaccaagcctgccgtggagaccatcaccctgggcaaggcccgcgacgcttggctggccagcatccagcccggctgcctccccaaaacgttcaccattaaaaagaccgccatcgaggcactggtgtccttcctgggggaaaaggccaaactccactcggtcacccggtccgacctggctcggtggtatcagttcatgcgagacgggggcgcagccacccccacccttacgaacaagcaaagttatgtcggcggccgcggagggtttttcgaatgggcgattgcatccggccactaccccaaaggcgacaacccagcggccggccatatcacttactctactagggagaagcgggcgcggaagaagttcggcttcaaagcctatgacagtcatcaggtccaagcgctgttcgcaccggccgcgttccaagacctggccctgtccgcccgttgggcctcgttgctgggcctctacacgggtgcccgggcatcagaggtcggtcagctcttggtcgaggatgtcttgacggtggacggactgccctgcatccgtatttctgacgagggggagcaccagaaggtcaaaaccgaggtgagcctgcgcaccatccccgtgcatcccgacctcattgagctgggcttcttggactgggtgggcacccttcgagcgcagaaggcaccacggctcttccccgccgccaaggcgaacgccaaaaacggtgcgggcaactggatcacgaaggcgtttggccgacacctggaacaggtcggggcgaactggccggaagccaaaaggggcttccattcgttgcgcaagaccctcatccaagagcttcagggcgctggcgtagtgtccgaactccgggcccaactggtgggccatgagctggacgacgagcaccatgcgacctacagcaggaccttcacggtccgggaaaagctggaaggccttaaaggcgtctcgccggggctggcggtgctttcgtatgggttaaatctgccggtcctcaggagtctcctgaccggttaa

SEQ ID NO: 498797 - DNA, 2463 bp, Stenotrophomonas maltophilia
atggcgagtaacgttcaaacgacaacgatcacgatcggtggctcgatctcgggctcgctgaagtccgcactgtcctccaccgaggacggactgaagaagatcggcagcgaactggacaggctggagcgcaagcagcgctccatgagcaaggcgaacccctcgctggtaaagctcaagcagaacgttgccgggctgcgccaggagtacgccaggctctccagcgagggcgatcgcctgcgcaaggtgcagaccggcctggagcgcatcgagaaggcaagcaccgccaatctgcgtaaccgcaagaagctgggaacctccttcaaggagtcacgcaccctgctcggcagcgcagtgacccagctggccaagccggtcgagaacgcctcaagcttcgcccgccagaaccagcagatcggcagcgcagcgggcctggacaacggccaggtcaaagcactgggcaggacgatcctggccgagaccggcaacaccaaccagaaggcgaatgacctgcagcgcgccatccggctgctggtcgacgccggcatggatgcacagtcggcgcagaccagcctgcgcgccatcggccgcaccgccaccatcaccggtaccgggatcgacgacgtctccagcgccgccgtgggcctgcagcaatcattcgacatcgaccctgccagcatgcagtcggcgctggatgtcctggtcgtcagcagccaccagggcgggctggggctgaaggacatggccaaggtaatgccggtgctgggaacgtcgttccaggcgctgaagctgcagggcaacgcagcagcggccaccatgggtgcggcactggaagccacgcgccggtccgcgggcggcgctgaccaggcagccacccagatgaagggcttcatgacatcgatcatgtcgcccgagctgcaggccaaggccaagaagggattcggcctggacctgcgcaaggtcatcagcgacgcacagagcagcggtggcaacccgttcgacgctgcgatgcaggccatcgtccaggccacggccggcgatcagcagaagatcggcaagctgttcggcgatgcacaggcgaagaacttcatcggcccgatgatccagaactgggatcagtacacccggatccgcgacaaggcgctcaatggctctgccggaaccaccgatgcggcgtatgccaatgccatgcagaccgacccggagaagatccagggcgcgaagatcgccgtggacaacctgtccaaggcttttggtgcggcgttgctgcccgcggtcggcgccgcggcggtgaagctgaccgaactgctgaacggcgtgaccaccttcgtgaccgagaatccgaagctgatcgccaataccaccaaggtggtggtgggcatgctcgccatgcgcagtgcggtgctgggtgcccgttacgcctggacgttcgtgaagggtccgatcctgggtgtgcagaaggtcttccagctgttccgtgccggcaacctgctggcccagctggggcgcttcggcccgatggccatgcgtatcgcctcggtgttccgcgtcgtcgccactgcagtgggcgccattggtggcggccctatcgcggtagctgtggccgcgctcactgccggtgccctgcttgtccgcaagtactgggagccgatcaaggccttcctgggcggtgtatgggaaggtctcagcagcgcgggcacctcagcgatgggagagctgatgaatgccgttgcgccgctgcgtccggcgtgggaggccgtgagtgccctgctgggacaggcctgggactggctgtcgcggatgctggccccggcgcagtacaccggaaacgaactctcccgcgtgggcgagatcggcaagctggtgggcgaagcgctgatgttcaacttccgcgccgtcatccaggtcgctggcttcgtcgccgaggtcttcaggatgatcggtgaggtcatcggcacggtggctggattcatcgtcgtcaccttcggcagtgcctgggactgggtttcagcgaaggtcagcagcgtgatcgacacgatgatggccaagatcgcccccttcatggaggtggtgggcaccatcatggacaaggtcgggggcgtgctgggcaccgccaaggacaagatcgcgcttggtgtgaacaccgcggctgatgcctacggcgcgatacgcgcaaacggcggcatacagctgcctccggtgatgctggcgcccgccagcatgcacagcgccagcgtgcagccacgcatgccgaatgcctttggtacgccggccgggcgtgccgcgccggacatgccttcgcccaccccgcgcagcgccaccaccgtgcagcagcaacagaccaacaacatcaccatccaccagcaacccggtgaatccagcgaatcggtggcgcgccgcacggccgacgagctgcaacgtcgcaacgcggttgccgcccgtggtggcctggcagacaggaactga

SEQ ID NO: 498798 - DNA, 291 bp, Stenotrophomonas maltophilia
atgtccagcaagaccaagaccaccaacgaccacgtcatcgaacgcgatggctatgccgaagtcaccctcacccgcccgcgccaggtcaatggcgtggaaaccgccgtgctgcgcatgcgcgaacccaccgtggaagacatggagcggttccaggatgacaagggcagcgatgcacagcgtgaagtgcggatgatcgccaacctgtgcgagatcccaccggacgacctgcgcaagctgccgctgcgcgattacgcccgcctgcagtcgggagtcgcgctttttaccacctga

SEQ ID NO: 498799 - DNA, 504 bp, Stenotrophomonas maltophilia
atggcgcgcaacgtccgaaagaacttcaacttctacgtcgacggcaagggctatgccggcaacgtcgaatccttcaccgctccgaagctgacgctgaagaccgaggatttccaggcgggtggcatgttcgccccgaccgaaatcaccctgggccacgagaagcttgaagccgaggctgtcctcatcgccgatgacccggacatcatgggcaagttccatgtggtggaaagcaaggagtactccttcaccgcacgcgaggcgctggagtccagcgacggcagcatcaccgccgtggtccacaacatgcgcggcaaggtcaaggccattgatcgtggcgaatccaagtccggcgagaagggcacggtgaagatctcgctcgcactgagctactacaagctcacccacggaccgctggtcgtccaggagttggacgtggtcaacatgatcgccaagcagaacggcgtggacatgctggccggcctgcgcagcgccctgggcatctga

SEQ ID NO: 498800 - DNA, 660 bp, Stenotrophomonas maltophilia
atgcccagcggatatcgctcttccggtgtcgactttgacgacctgttcgatccgtacgttgaaggtccactggcgcaggattcgggccgccgtatcggcggcggcgacctgagccgccgctatgcccacatccagtacggcagcaagcgtgccgacgtaggccatcgcatcaacggaatggacgtgtccaacctgtgggcggcccggggcaccgcaagctaccggccgcccttccatggcaaggactactcagccggcaatggcgccaaaacaaactcattcggcgatgtcacggcgtcggtgcagatcagcctgctgtccgacggcaacttcaccgtccacagcaacagttacggcggtggcaacgatgccaccgcccaggtggattccggtcgctgggcaccggcgggtgcaaatcccggccagtacgaagtgcagttcacggccagcaacacaggggctgcttcgttcagcacaagcgcaccgtcattctcctcacttgcgacatcgcgctcggcaaccgtatccatcagcattcctgcggcatcttccatgtacgagagcatcacggttgagatagccgttcatctccgtcgttccggcagccccgctcaggtttcaaccgtatacgccaacgtcgccgtctcgggctggtactga

SEQ ID NO: 498801 - DNA, 1506 bp, Stenotrophomonas maltophilia
atgacgttgcgatccaccgccaagcgctggacctacctggtgcatcgctggctgggcatcggcggatgcctgctgatgctgctgtggttcgtcagcggcatggtgatgctgttcattggttacccgaagctgacacccggtgagcggctggcggcgttgccggtgctggctgatgcccgcgatctgcagggactgtcggtactgccggcggcggtgcaggccgagccggaaagcgtggcactgaccacgctgcgtggcgagcctgcgtatgtggtgcgcaatggccgcaacgtgggcgcctggtcggcgtacaccgggcaggcgctgctgccggtgtcggcacagcgagccgaagcatccgccgcacagttcgcgggcggccaagccttcgtcggcgcgacacgcgtggacgaggaccgctggacgcattcgcgtgcgctggatgcgcatcggccgctgtaccgggttgaagtgggcggcgcgcagccaggggatgtgtatgtgtcctcacacaccggcgaagtggtgcaggacgcaccgcatgtgcagcagcgctggaactatgtgggcgcctggctgcactggttgtacttcctgcgcatgcagtcggtggacccggtgtggacgtgggtggtgatcgcgctgtccgcgctgtgcacggtggcggcgatcagcggcatcgtggtgggtgtgtggcgctggcgcttccgcgggcactaccgcactggcgcgaagacgccgtatgtcgagccctggatgcgctggcaccatctgatcgggctggtggctgcggccttcgtattcacctggatcttcagcgggctgatgtcgatgaatccgttgggagttttcagcagcacgcgtgaagcgatcgacagtggacgctatcgtggcggtacggtggcggtggatggcgcgttgggtgaaccggctgcgctgctggcggccgtcgacgacgcgcgcttcaagccggtggagatccagtggcgacgcatcgatggtgagctgttcgcggtgttgctggacgggcagcgcgagacccgcattgtgtccggcagtgatggtcatctgcaggttgcgcggttgctgccggccgcatggctgcagcagaaggtgcgggcgttgtcggatgcgcccatgcagaggtactgggtccagctcgcagcggatgcgtacttctacccgcgtgcaccggaagccatgaacggcgcagcggtacgccgcttcccggtggcggtggctgatttcggcgatgccgaggcgacgcgggtctacctcgatctggccactggcgacccgttgctgacgatggggcgtcgcgagcgcgtgggtcgctggctgttctacttcctgcacagctgggacctgccggcgatgctgcgtcaggacaccgcccggctggcggtgttgctgctgctgagcctggctggcgctgcgttgtgtgcaacggccacggtgatcggctaccgccggttgcggatgaagctgcggcgcaggcggcggtag

SEQ ID NO: 498802 - DNA, 1281 bp, Stenotrophomonas maltophilia
atgaactacgtttcgatgggtgttctcgcaattggaattgcagcggcatctgcgggcgcgcaggccaaatcgttcccgcgtctctacaacctcccgaccaccaccacggcttccgtgtccaatgcccttccggcgccggggcaggtgatccagctttctgcgcaggtcgatggccaggcgctggggctgtatcacatcccgggcaatgagcagatcggtggcttcgtcgaattcaaggtgaatggccaagcggtgggtaaagtgcaggtcagcacgaccaatacaccaatggcaggtctcgtttcccagcttgaccaggcttgctatgcggcaacacgcgatgtccagttctgtacgcatcgctatgcctatggcagccccgccaaggttgcggtgaactacaccgtgcccgccggcttcaccaccgcatcgatcaccgccaccttcagcggcgatggccagttctcgcaaggttcggtgtcggcgccgatcaacctgcgcaacattccaacctttggtgagatccgcggcgcaggcaacaagtgcctcgacgccgaaggcgccaacaccggtccgggtaccgccatccaagtgtgggactgcacgccgggcacgccgcagcagttgtggacggtgaagcccaacacgtcgaccatcaccggtgtgcccagcaaccgcgtactcgatatcgtaggttacggcaccagtaatggaagccggatccagctgtatgacgcgcacggtgattggaaccagtcatggaagttcaccaatacctccatcgtcggcgtgggcgataaggtgctcgacgccatcggcgcctccagcgccaacggcaccaagatccagctttacagcaacgcacagactgccaaccagaagtgggagttcaatccggccaacggctcgatcgtcggtgtcggcggcaagtgcttggatgtggaaggcgccaacacggcagatggcacccgcgtacagctgtgggactgtacgggtgtaccgcagcagcgcttcgaactgggttcggatggatcgatccgcgggctgggcgggaagtgcctggaggcagccgacggcgcaagccatgacggcaatgcgatccgcatgtggtcctgcaacggcggtgcgcaccagtcgtggcgcctggtcggcgagatccgcaatccgcagaccaacatgtgcctggatgatcctggcctgggcaacaccaatggctccaaggtgcacatgtggatgtgccatggtggcgacaaccagcgctggcagttctcctcctactga

SEQ ID NO: 498803 - DNA, 351 bp, Stenotrophomonas maltophilia
atgaagtcgatggaggcccgccgtcacgaactcctcagtgaaatcgccgaagtggtggcgggtttgctgggtcgtgagcacgcgctccccaccgaggttgctgacttggtgggggcagcggtggccgatagcttggccgagcactggggcggacagaccatcacgtacccgaaggacgcgcacttcaaagctacgcagcgggagatcgagatcttgcgggcctacctcgcaggcacctctaccgctaaacttgcacacgacactggtatgcacgaaagaagcatccgtcggttgattcgccgggcccaggcgcgggcaggcggactggatcagctggatctgttcgtctga

SEQ ID NO: 498804 - DNA, 261 bp, Stenotrophomonas maltophilia
atgagtcaggaaatcaacaagcacgttgcgcgagcgatcgttgagcttgccatcttcctcgagttttcgacggatgacgtattagaaccagatgctgcagtgcaggggctcgaacgattggcttccacattgcaaatgatggacgtggattccagatcgtctttgtgcgtgcagtttgaaagcatcgcaatggagtattcaggtgagcaagccggatttgttgaaggcttgggcgaagcgctggggttgatcgaagcgtag

SEQ ID NO: 498805 - DNA, 210 bp, Stenotrophomonas maltophilia
atgcacatccaaatcggcggtacccacgtcacgaacaacttcaacatcagcaacagcgaccatgtcgccgtgagcctgcctagcacctgcccacccccgcagcgtccaccgacgtcgccgaattgggcagtgctagcggtccaggcgaccatcgccatcgcaggagccgctaaggcacttgccccgtatctagggctggtgggcggctga

SEQ ID NO: 498806 - DNA, 165 bp, Stenotrophomonas maltophilia
atgaccatcgagcagctgcggattacctatttccccaccgcgaagctcaagacgatggccaacaagcacacggccggcctgcttccaccacgggtaggcgacgtatacgacacgcgcgacgttgccagttggtgggatgaccagcgaaagacccgcgcagcctag

SEQ ID NO: 498807 - DNA, 273 bp, Stenotrophomonas maltophilia
atgacgcagcagcagaagactccgccccggccgctgccggcgtgcccgtccggccacccggctcgctacatccttgacggacggcggctggaagcacgcggcggtcatttcattgaatgccgctgcagccggacggcgaaatgccctaccttcgacctggcttgggcgcactggcataagcagcacggactccaggcggcggttccgtcggcgcctgccgccggcagcaacgtggtgcagctggggctgaggtgggctgggggtgacgcatga

SEQ ID NO: 498808 - DNA, 915 bp, Stenotrophomonas maltophilia
atgaaggctatcgacttgttcgccggcggcggtgggtttacggagggcgcagagcaggccggctgcgaagtggtgttggcagcgaaccactggccagccgcagtagcaacgcacgcagcgaaccaccctcgcgccaagcacgtctgccaggacttgcagcaggccgattggacccagatgccctattacgacctcctgctggcctcgcccgcgtgccaaggccatacccctgcgcgcggcaaggaacgtccgcaccacgacgccacacgctcaaccgcatgggccgtcgtcgcggcgctggagtgcaactcgcctgaggccgcggtgatcgagaacgttcccgcgttcctgaagtggaaattgttccccgcttggtgtgcagcggtgcatgccctgggctacgcgatcagtccgcacctggtggacgcggccgacttcggcgttccgcagaatcgtgtgcgcgtgttcgttctactgacaaagagcaagcatcccttggagctgaagttgccgaagatgccgcatgtccccgccagcagcttcattgacttcgccgccggtacgtggacgccggtggagcgtcccggccgtgccgccgccactattgcccgtgtacgcgctggccgtgccgccttcggcgagcgtttcgtggcgccctacttcggcaccgggtctggattgaccggtcggtcactggatcggcccatcggtacgatcaccacgcgggaccgttgggccgtgatcgacggagaccgcatgcgtatggtctcagtggatgaagccaaaatcgccatgggcttcccccagcgctacgtgctgccctcaagcaagaaggacgggatgcagatgatgggcaacgcagtttgcccgcccaaggcttgccagttcattcaagcattgagggccgccgcatga

SEQ ID NO: 498809 - DNA, 789 bp, Stenotrophomonas maltophilia
atgggtaagcgccagatgattgcggtgtggttctcctgcggcgccgcaagcgctgtggcggcgaagctgacgctggaccgctacgcctcaacccatgaggtccgcatcgtgaacaaccccgtggccaacgaagatcccgacaacctgcgctttgcccgcgatgtggcggcttggctgggggtggaggtcgagacggccatcaattccaagttccccacctgcgacgccgtggatgtgtgggagaaggaacggtacatggccggtgttgctggtgccccgtgcacccgcgcactcaagaagcgcgcacgccaggaatgggagctgatccacaagccagacttccacgtccttggcttcaccgtagaagaacgcgcgcgccatgatcggttcgtgcacggcgagcgcgagaacgtgctgccggtgttgatcgaagcgggcttgagcaagcccgactgcgcggctctgctgctgtccgccggcattgcgttgccggccatctatctgcgcggctatcccaatgccaactgcatcggctgcgtgaagtcgcagtctccgacctactggaaccacgtgcgcaagcatgacccgaaggtgttcgccgagcgcgccgagcagtcgcgccggctgggcgctcggttggtcaaggtgaagggccaacggatcttcctcgaccagctgcagaccaccgacaagggcgcctccatgaagtcgctgaacttcgattgcgggattttctgcgaggaaacgccgcatcaatttgattccagccgctcggaggcgcaggcatga

SEQ ID NO: 498810 - DNA, 192 bp, Stenotrophomonas maltophilia
atggctgatattgacgccggccgccggttcctcgccgccgagttcgagagcgccggcctgcctcacgtcgccggcgacatcctggccggcaccagcccctttggccagggcgcgtacatcgctgctgttgcggccgcgctagcagcgccctttgcgacctgtggctgcgcgaaggaggccacccatgggtaa

SEQ ID NO: 498811 - DNA, 186 bp, Stenotrophomonas maltophilia
atggctgatttcctcgccctgctggccgcgtgcctgctgctgcccactgccggcgccaccatgctcaaaatgtggcagacgcgcacgccgcgccgtcgccatagcggcttggctgtgggccagatcccgcaggcacttcgccgccgtgccccgatggccgtccgtcgggaggtcgcgcatggctga

SEQ ID NO: 498812 - DNA, 426 bp, Stenotrophomonas maltophilia
atgcaacagatgacaggcaaagccatgaccaccctcgcaaagtcgctggattccagcaccggacccggagcggaggctaccacgggtgtgcataaccgtgtgaatgctggtagcggcggcgaatccgaggccaacgcaaccatcaccctgcatgtcacccacaaccgggtgatcgccacggcgatgctgaacatgggaccggccaagatcgcgcagtgcgtgttcgagcgccgaaagggcagcaggaagggctgggagctggtcaagggaagcgacttcaacgacgaaacgagctggatttcgcccgagcttgccgacctggccagccgcgtgcccttcccctacgaggtggccaacatgttgcccggcaagcgggctacggccgctgccgtggcgcaggccgcgcaggaggtggccaatggctga

SEQ ID NO: 498813 - DNA, 2691 bp, Stenotrophomonas maltophilia
atgcaagaagagatccgccaacaggtactgacgcgcgtccagcgcgactacggcctcaagcaccgcagcggcaccccgtacatgcgcgggggcaagtgcccccactgcggcaagaaggagctgtacaccagctacgagaagccttgggttctgcgctgcggccgacaggccaagtgtggccaagaggtgcgcgtgcgcgacctctacgacgacctgttcgacgactactccaagaccaacccgcagacgccgcaggcgccgcacgccgcagccgacgcgtacttagccaccgcccgcggattcagcgtcaagccgctgaagggtctctacacccaagaggactactacgaccgcgcgaagcgccagggcacggccactgtccgcttccccctggtaaagggaggctggtgggaacgtctgatcgaccgaccccaccggttcggcaagatgaaggcccggtttgcgccgggcgagagctacgcgggggtgtggtggggcgcggcggctcaggaccaactgcgcaccgcccgcgaagtctggatcgtggagggcatcttcgacgccattgccctcctgcagcgcggcatctgcgccgttgcggccatgtcgagcaacgcctatcccgagcaatccctcaaggaactgaaagccgctcgtccgggcgatctgccggtgctggtgtggggattggacaacgaacctagcgcccgcgcctacacagtcaagcacgcgcgccgggcggagaagctgggctatcggtgcatggctgcgcagatcgagcaggtaggcgacaagaaaaccgactggaacgatctgcacctgcgcgcacaggcggcagaggacggcgacgcacagtggcaggctgacctcgacctggcacgccacaacggcgccgtgctgatggcgcgcacggccgtggacaaggggctggtcatctaccagcgcgagcagaagaccgagttccacatcgagttcgcctcgcgcctgttctggttcgagttcgacgcggtgcgcttcgacaagatgatgcgggagaagaaccccgacgacgaagaaggagcggtcagcgaagagaccgaagccaagatccggcgcgcctgtgcgtcggtgcagcagatcgccaactgctatcccgaagccctctacttccaacgccacgaagcgaccgacgaaagctggtactacttccgtgttgacttccctcacgacgcaccgtcggtcaaaggcaccttcaccggcgctcaggtggccagcgctaccgagttcaagaagcgaatcatcagccttgcgcagggcgccgtgttcagcggcagcggccagcagctggaccgaatgatggaagaccagctgttcaacatcaaaaaggtcgatacggtcgatttcgtcggctacagccctgaccacaaggcgtacatcttccccgacctggccgtgcgcgccggcgaggtgaccctcgctaatgccgaggactatttcgagttcaacaagctgcgcatcaaaaccacacagaggtcaatccgcatggacattcaacgcgatcacgaaaactactccaccgactggctcggctggctctggacctgcttcggcacccacggaattgtggccctcacgttctggtttggctcgctgtatgccaatcagatccgcagcagtcacaagtcgttcccgttcttggaagccacgggcgaggccggagccggcaagaccacgctgctcaacttcctctggaagctgctggcccgtgcggaccatgaaggctttgaccccgcgaagtccacgaaggccggtcgcgcccgcgccatggggcagatttccggcatgcccatcgtgctgctggaagccgaccgcagcgacagcggcgataaggcacacgccaagtcattcgagtgggacgaactgaaggactactacggcggcggcaccctggccacgcgtggcgtgcgcaacgggggcaacgaaacctacgagccgccgttccaggggaccatcgtcatcagccagaacgcgcccgttgatggcagcgaggccatcctgacacgcatcgtcaagttgcatttcaagaagccgaccgcgacgaccgagagccggcaggccgccgacaatctcaatgcactgccggtggagaagctgagctacttcctgctcgccgcgctcaaagcggaagccgccgtgatggagaagttcgccgagcgcgtgcgcttctacgaagccaggttgcgcgaggaaaaggagctgcgtgtcgagcgcatcatcaagaaccacgcgcagatgcttgcactgctcgatgcactgcggctggtggtgaacctgccggagaacatggtgcgcgatacgcgggacgccctggtcaagatggccaccgaacgtcaggacgccatcggcgccgatcaccgcatcgtctccgaattctgggatgcgttcgagtacatcgagatgcaggccagtggcgacaagcgcagcgtgctgaaccattcgcgcgaagaaagccgtatcgccatcaacctcaacgagttcattcagaaggccggctactacggccagcaggtgcccgacattggcgacctgcgacggctgctggtcgagtcgaagcgccacaagttcatcagcgccaataccgccgtgaacagcgcgatccgatcaacccaactgctcagcagcaccgtgaagtgctgggtgttccagaagtaa

SEQ ID NO: 498814 - DNA, 246 bp, Stenotrophomonas maltophilia
atggccagcaacaacgggcatacgcctgtgctgcccggtccagtggatcgcggcgaccaggtcatcagccttgccgactatctgcgcctgtgccgcatcgcagctgcagccgagctgctggccaagctgcccagcgaggccgcaaaaatgctggaaatcgaggccgatcacacctcagcggtagcgaagtacatggccgaagacctcgccgcgattctcggccggtcccgccccgctgtcgagtag

SEQ ID NO: 498815 - DNA, 309 bp, Stenotrophomonas maltophilia
atggcgcctccttccaacgtcaccattccagagccttgcctgcggccggtcatcctgctggaaacgcagatccctggcttcggcctgcgcgcatccttcgaccagcacaagattctgtttctggccttaatacacatcgagtcggacaccgcagcgaccttcacggcgcagcactcacgcaacgtgatgcgagccgctaccgggggaatccagatcggaaccgtcgtctacctgctcgccaagggtgaggccgagcgcttcttccagtggctgcgcacaggcgagagctaccccggcggggtgaactga

SEQ ID NO: 498816 - DNA, 243 bp, Stenotrophomonas maltophilia
gtgtcccacggagccccttccacgcccggcaaccctgccgcgcgtcagctttcgctcgccttcggcctgatcgccgacaccctcgaatggccccacgatgcgtatcaggcgttcattgctcgcctgctggctatcggcgtgtgcccgctcgcgatcaccctaggcgacgtactcgccgcctacaacgccacctgtgacgccgacggccgcgcgccgggcaccgacgacaaggcggtgcactga

SEQ ID NO: 498817 - DNA, 237 bp, Stenotrophomonas maltophilia
atgcggcgccagcaagggagtgctgcgcctgtgatgcgccacaagactcaatctgatggctggtcctcggcaatggagccgagctttgtcaccgctccaacgcgtgtcgaatacgtgtcgtatgcgcagaagcagcgcgacgccgccgagcttcacgacttggtgaaagcccatatcgcacgtggcggcgcctatgaggtgctgccttcgcgcactgctgctcaggtgtccgcatga

SEQ ID NO: 498818 - DNA, 342 bp, Stenotrophomonas maltophilia
atgagcgccgcagtcggacagcgcgctgtgttctgctgcccagcctgcaatgcccggctggtaaagcgcaccagtgcgttgcaacacccgttcctgcgtactgacgcctacgtctgcccgaacccgatgtgcggcgctacctacaccggcagttcggaattgaccaatgtggccagccccagcggcctccctagcgcccctgcctgcgaactgccgccgacgccgtggtatcagcgaacgatgttgcagacgcgctggaagcaggaccagggcgagctgcaaacagactggatcgacgcaatcgaatcctgtccgccagacggcaatccgccctcggtctga

SEQ ID NO: 498819 - DNA, 327 bp, Stenotrophomonas maltophilia
atgaacgcccaacgacgtaccactgcgctacgcactgccgaacaagcccggcagtggctcatcgacaacggcctgtccgtaaccgcattcgcggagaagcacgggctggaccgaaacgccgtgaacaacgctctgcgcagcaccagcaagtgccggatcggcaagacgcacgatgctgccgtcgctctcggcatgaaagccgcccctgattctcacacagattcgcctgtttccacccgcatgcgcacggccaagaacaccaccggcaaagccccggttaagacgaaggccgccaagaaggcaaagaaggcacggggtaaggcatga

SEQ ID NO: 498820 - DNA, 432 bp, Stenotrophomonas maltophilia
gtgtctgtaggtattcgcctgaaagaagaacggaagcgtctgggcatgacccaggaggccatgggactggcctgcggtgttgccaagcgcacgcagatcctgttcgagcaagatgcacacctgcccggtggagcgtacttcatcgctgccgacgaactcggcgttgatgtgacctatgtcctggtcggccggcgcgatcgccttgccgaggccgacgcggatctgcttgatgcttggcgctcggcgtcggcttcggcacgcgcggctgccatggcggcgttgcgcggcgttacgcctgcgacgacagcggcagcgccccgcacctcgttcaagaacaccagcatcggccagcagatcagcggcgatgtggacctgcgtgggcaaaagatcgttgtcaagccgcctaaagcatcgaagaaacccagccgataa

SEQ ID NO: 498821 - DNA, 1017 bp, Stenotrophomonas maltophilia
atgatgcagattctctgtgatcacatcgatcagctagaccttgcgctggaccagctggcgatgaaagatcggaactttgatcgattcgccattatgcttgtcgacaacgttgttgagctaacgctgcatcagcatgccttagatcggcaaattcatcacaatcagcgatacagacaagggcaaaccgagtccgatctgaaagctatgaatgcagcgctagggcagaactttgatgccaaggtaagctttgcgctgcataccggactgctaaccaagccgatgagtcagtccatcaactggctgcattcattccgaaacagctcataccatgcggggatgcgacacgagggcatcctgaactcgctggcaaatttctacgtgcggacctgctgtgatctgttgagccggtaccgacccaccttctggtcattcggtgcggagcgagtttctcatcgcgctgcaaagtatctggggagctgcgatgaactagaagtgatatttaaggccggcgagatgtttgacgtggcgtggaggaggcttggtgctgtggcgttcaacatgcaaagcgatctgataagcgacttgtcgagggatctagaaaacaccattgatcgagttgatcggcagattagctttattgcggataatgctccaagcaagggcgggatgtacacgcgaaatgaggtcgttgcagacgcccaggcgtgggcaatggccttcactcagaagggtatccagtatgctcagaagaatggctatcaaggacgtgcgtcctttgggtcggaactcggggcgtggctggcccataactacactgccccaatccctggagaccctgtcccgaagtggaagatacggcttgacgcgcttaagcgggaaaaagacgagcacaaagcgttggagaaatactgcaacttcatcaagcagacgcaaggagttcgggacgatattgcgcggcaggctcggctactcgatagcgctatccaagagcagattgaatgggcccgagggaagtag

SEQ ID NO: 498822 - DNA, 996 bp, Stenotrophomonas maltophilia
atgagggccagcccgtacccgatccccgcatggcgggtcgtcctcgacggcgtggatctgaccgaacggctggccccgcgcctgctggatctgtcgctgaccgaaagccgtggcgacgaagccgaccaggtcgatctgcgcgtgcacgaccatgacggcaggctggccctgccgcgccggggcgtcaccctgcaggtggccatcggctatgaggggagcggtctattcgacaagggcaccttcaaggtcgatgacgtagaacacagcggatcgcccgacatcatcacgattcgggcgcgttcggccgatctgaccggcgcggttcgtcgacggcgcgaacgcagctggcacgacaccaccctgggcgacattctcggcgctatcgccggcgagcattcgctgcgcgcatccgtggccgcggatctggcgggcgttgccattgcccacctcgatcaagccaacgagagcgatatcaacctgctcacgcgcctgggcaaacgcttcgacgccgtggccacggtgaaggccggcacgttgatcttcgcgcctatcggcgcaggtactacggtcggtggccagccgttgcctggcgtccagatcacgcgagcatcgggtgaccagcaccgctacagcgtcgccgaccgcgagaagttcaccggcgtgcgtgcctattggggtgaccggcgcacagcacggcgcacaggcgtgctggtgggtacgtccgacaacgagaagaagctgcaggccacctacgccaccgcgcaggaagcccggcagcacgcagaggccgagttcaagcggctggatcgtggcaccgcgcagctgagctaccggctggccgttggccgcgccgatatctacccggaacagacggttaacgtcagtggcttcaagcctgaaattgatgggaccgactggctggtggtcaaggccacacatactatcgacgccagcggtggtttcgtgaccgccttggagcttgagcgggggaagtag

SEQ ID NO: 498823 - DNA, 399 bp, Stenotrophomonas maltophilia
atgatgatgacctggggcacgttcgtgttctctctctccaccgccgcctacggcgagctgcagcgccagatgacttggcgccacgccagcagcgaccgcgtgggcgcccgcgcagcccggcagtacgtcgggccgggcgatgacaccatcagcctgcagggcaccatcgccggcgagctggccaccgacctgcaggtgctggacaagctgcgcgagctggccgaccaaggcaaaccgcaggcgctggtggagggcacgggtcgtgtctacggtgcctacctgctgaccagcctcagcgagacgcgacgagagctgttcagcgatggcacgccgcgcctgatcgacttccagatgcagctggaacgtgacgacgacggcgcaagcgaggccatcgcatga

SEQ ID NO: 498824 - DNA, 3054 bp, Stenotrophomonas maltophilia
atgagcggcggcaaccttcgcctgcaggtggtgttggaagcgctcgaccgcgcaagcgccccgttcaagaaggtcatggccggcagcaagggcctgtccaccgccctgcaggaacaacaggccaacctgcgccgcctcaatgccgcccagcgcgacgttgcggcctaccgccagcagcagcaggcggtgcgcgccaccgaacagagccatctggccgcccagctgcgcgttgccgctctggcccgccagatcaaggaggcgggcacccccactcgcaagctgagccgcgagttcactcaggcacgcgccgccgccgcccaactcaagggccagcaccagcagcagtcggtggagctgcagcgcctgcgcagcggtctggaccgcgcgggcatcagcacgcggcaactcggcacgcatgagcgcaagctgcgcggcgacattgccgccgcctcggcgcagatggaggctcagcgcacgcgcctggccgcgctcgatgccgcgcaggcccgtagccgcaagatccacagcgccggcatgaacgcggctgcacacggcaccggcgtggcgctggctgcgttcggcgcgctgcgtgcgcagacgctgcccatcgcgcaggccatgagcttcgagtcggccatggccgacgtgaaaaaggtggtggacttcgacacgccggacggcttcgagaagatgggccgcgacattgaggaactgtcgcggcgcctgcccatggtgcctaccgacatcgccaagatcgtcgccgccgccggtcaggctggcatcgccagcaacgaactgacccgcttcgccgaagacgcggcgaagatgggcgtagccttcgacaccaccgccgaagacgccggccagacgatggccacctggcgtaccgcattccgcatgggtcaggacgacgttgtcgtcctggccgacaagatcaactacctgggcaacaccggcccggccagcgtccagaaaatcagcgaggtggtgaaccgcatcggtgcgctgggcgaggtagccggcctcggcagcggcccgctggcagcgctgggcgccaccgtcgccggcatgggtatcgagtcggaagtgtcggcgaccggcatcaagaacatgctgctcacgctgtcttcgggcgacgcggccacctcccgacagatcgcctcgttcgagaagctggggctgaaggccggcgatatggccaaggcgatgcaggacgacgccggcggcgcgatcctgcaggtgctggagaagctcaagcaactgcccaaggccgagcaggcggcgacgatgacgcagctgttcggccgcgagtcgatcggtgcgatcgcaccgctgctgaccaacctcgatctgttgaaagagaacttcggcaaggtcaccgacgcgcagaagtacggcggctcgatgaacgccgaatatgctgcgcgtgtgggtactgcagagaacggtttgatcctgctcaaaaacagcgccaccgtgctttcccagcgcttgggcaagaccctgctgccgacggtcaaggaactggccgcgcgcgtggccaaggtcgccgaccgcatggccgagtgggtgacgaagaacccgcagctggtggccaccatcgccaagctggccatcggcggtaccgccctggccactgcgctcggcggtttgctggtggctggcggcgtgggcgccatggcactgacgcagatccacaagggcgtgatgctgctcagtggcggcggtggcatcggccgactggttggccaggtgctgtcgctgggtggccgggccttccccatgctgctcaacgtcggccgtatgctcctgccgatgctcggcggcatcagcctgccggtgctggccattggcgctgccgtggccgtcgttgccgcgctggtgtggaaatactgggagccgatcaaggcgttcatgatcggcgtgtggcagggcgtggtggacgtggtcaacccgatcatggccgagctgatggccgcgctggaaccgctggggccagtttgggcgcaggtgtccgatgccatgggcaaagcctgggcgtgggtgcagaagctgttcacccccttcaaggccaccagcgagcagctgcagggcgccaccaaggccggccgtggcttcggccaggtactgggccaggtgttgaccgtcaacctgcgcatggccgtcgccgctgtgggctggctggtaaaggcgttcaccttcatgctgccgatcatccagaacgcggtcggcggggcgtggacgtacctgcagggcgcgtggcagctgatcgtcggcctgttcaccctcgacggggacaagatccggtcgggcctgaccgcgatgtgggacggcgccaatcagatcctgctcggctggccagcgaggatgatgcaggccggcatcgacatggtgcagggcttggtgaacggcatcacgtccagcggcagcgcagcgatggatgcggtggccaacatcgcctcgggcgtgatggatcgctttaagggtctgctgggcatccacagcccgtcgcgtgtgttcgcgcagttcggcgacttcaccatgcagggccttgccggcggcatcgaccgaagccagggcgaaccgctgcagcaggtgaccagcgttggcgaccgcatcacgcaggccggtgccggcatgggcgagcgcgtgacgcaggtcagcgccggcatgacccagcgcatgcagggccctgcagccgacaacgcagcaggtccgacccgactggaccagctgcgcgagcagcgcatcgcaaagctggggaacaacgccgacaccgcacgcgctacggccagccgcgacaggttgcgccaagcatcggccggattcgcgctgggcgccgctgcgctgcccgtcatggctgcagctgccccggtagttgccccggcagctgcgcagcccgcagcgggcagcacaggcgcttccagctacaccatcaacatccaaccgccgtccggcgccgactcccgcgaaatcgcggatctggtgcggcaggccattgaacagatcgagcgcgacaaggccacccgacgcggtgcccggctcagcgactaa

SEQ ID NO: 498825 - DNA, 138 bp, Stenotrophomonas maltophilia
atggacacccttatcgccatcgtctttgcgctgttcctgctggccacggtcggcgggctgctgctgtgggcgttcagcgctggatgccgcttcctggccgcgctggtagccgaccctacggacaccacgacgccgtaa

SEQ ID NO: 498826 - DNA, 330 bp, Stenotrophomonas maltophilia
atgaataccgaatccaacaccacgaccgccaccgacgaaaacaacgacccgaacgtgatcgtgctggaaaccccgatccagcgcggcgagcaggtgatccgctcggttcgcctgcgcaagccgaatgccggtgaactgcgcggcctcaagctgcacgaactggcgcagatggacgtgaccgcgctggtgaccctgctgccgcgcatcagccagccgctgctgacacagcacgatgcgtcccagctggagccggccgacctggtcgagatcgctcgcgtcatcggtggttttttcgagccgagggcgtcgaagcagtccccgtctgcgtag

SEQ ID NO: 498827 - DNA, 510 bp, Stenotrophomonas maltophilia
atggctctgcccagcaagctgaaaaacctcaacctgttcaacgacggcctgagctacatcggccttgtcaccgagttcaagctccccacgctgacccgcaagatggaggagtaccgcgccggcggcatggttggccccgtcgacgtcgacctgggccaggagaagatcgaggccgagtggaagtgcggtgggctgatgctcgacgtgctgcgtcagtacggcgctgtctcgcacaacgctgtgcagctgcgctttgccggcgcctaccagcgcgaagacaccggcgaggtggatgcggtcgagatcgtcatccgcggccgtcactccgagatcgattcgggcaccggcaaggtcggcgacgacaccgagttcagcgtcaagacctcggccagctactacaagctgaccatcaacggccgcaccgagatcgagatcgacatggtcggcatgatcttcgtggtcaacggtgttgaccgccagtccgccatccgccgcgccatcggcgcctga

SEQ ID NO: 498828 - DNA, 1173 bp, Stenotrophomonas maltophilia
atggccgccaacggctaccatcacggcgtacgcgtcattgaaatcaacggcggcacgcgcccgatccgcaccgtctccaccgccgtgatcggcgttgtctgcaccggcgaggatgcggacaaggacgccttcccgctggaccgcccggtcctgattaccgacgtgctgagcgccgtcggcaaggcaggcaagaccggcactctgcgcggcacgctgcagggcatcgccgaccaaggcaacccgattgtggtggtcgtgcgtgttgccaatgccggcaatgacaccgacaccacggccaaggtcatcggtgccgccgagggtggccgctacaccggcctgcatgcgctgctggtggcccaagcccagcttggcgtccgcccgcgcatcctgggcgcgccggggttggacacccagccggttactgcagcgctggccatcgtcgccaagaagctgcgcggcatggtctacgccagctgcgccgcaagcgccagcgtgtcggaggccatcgcctaccgcgagcagttcgccgaccgcgaggtgatgctgatctatcccgacttcatggccttcaacaccgccaccgcatccaccggcatggcctacgccgtcgcccgtgcgctgggcgtgcgcgccatgaccgaccagcaacagggctggcacaagtccatctccaacgtgccggtggcgggcgtgaccggtatcagccgcgacgtgcattgggatctgcaggaccccaataccgacgccggcctgctcaacgccggcgatgtgaccaccctcatcaactccaacggctacaagttctggggttcgcgcacctgcagcgatgacccgttgttccagttcgagacggccacccgcaccgcgcagatcctggccgacaccatcgccgaggccatgcaggtctacatcgacaggccgctgcacccgtcgctgatccgcgatctgctggagagcatcaacgccaagttccgcgagctggtctatgccggctacctgatcggcgccaacgcctggtacgacgaaggcgccaacgcctcgcagtcgctggccagcggccagctggtgatcgacttcgactacaccccggtgccgccgctggagaacctgcagctgaatcagcgcatcaccgaccgctacttcgccgatttcccggcccgcatcagcggctaa

SEQ ID NO: 498829 - DNA, 360 bp, Stenotrophomonas maltophilia
atgatcggtatggacgcccgcagcggcgcgttcagcgatgacctggcacacctgcgccagtccatcgccgacgttctgaccacccccattggctcgcgcgtgcagcgccgtgagtacggctcgcttctgccggagctgatcgaccaaccgttcaacgacgaaacccgcttgcggctgttcggcgccacggccaccgcgctgatgcgttgggagccgcgcatcagcctgacccgtatcgacctggctcacggcgacgtggccggctcgttcgtcctcgatctgcagggccagctggccaccccgagcggcgcatcgcgcaacacccgcctttccgtaccactccgcttccacaccccctaa

SEQ ID NO: 498830 - DNA, 567 bp, Stenotrophomonas maltophilia
atggatagcgctctgccccaacagatcaacaacctgctgcgcgacggtgtggtgaccgaggtcgatcacgcccggcacctctgccgcgtgcagacgggcgaggcgcacaccgacttcctgccatggttcagcaccgccgccggcgagctgcggacctgggcaccaccaagcagcggcgaacaggtagcgctgctgtgctgtgacggcgacctggcaaacgccatcgtgctgcgcggcctgtactgcgagcagtacccggcgccgtcaaacagcccgagcctgaccctgatccagttcaaggatggcgctgtggtcagctacgaccacgatgcgcacgccctgtcggctgttctgcccgctggcggaaccgtggccatcaccgccgacggcggaaccacgatcactggcccggtgacgatcaagggcgccaccagcatcgaaggcagggtgacgatcaccggcaaggcggaggtgtccgacgacgtaaccgccgccggcatcagcctgaccaagcacaagcaccccggcgtgcagccgggcggtggcaccaccggggcgcctgcatga

SEQ ID NO: 498831 - DNA, 573 bp, Stenotrophomonas maltophilia
atgtccaccgaaaaccgctttgcccacgccttcgatcccaccacccgtgcgtacatgggacccgtgcgcctgcagccgtcgcccggcggcgtttggcacctgcccgatggcaccgtggaggtggccccagcacaggccgccgggccgtgccaggcgctgcgcctggctgatgacgggagccgctgggagcgggtgcccgacttccgcaaccgcatgctgtgggatacgggcactgcgatgccggttcccaaccgcttgagtctcggcgaacctctcccgaagggtgtcaccctggccgagccaatccgactcgacggcaccacgccgcactgcaacgcatgggacgccgtccgaggcgagtggacgctgcagcccgactacagcggccgggcgatctggaacaaggccgacgggagtttcgcgccacccctgcagcgcggccaaccgctgcccgacaccgtgaccgatcacgctccgcccatggagcgcagcggcccgatcacctatgacgaccgtgcgggcgcttgggtggagactgcaggcagtcaccccaccgctgcacagccaagctga

SEQ ID NO: 498832 - DNA, 2964 bp, Stenotrophomonas maltophilia
atgcgcatgaagatcaccaacgccggccgcgccaagctggtcaacggcaccaacaccggcaccaacacggtgctgatttctcagatcgggctgacctctaccggcttcacccccactgcggcaatgacgcagctgcccggagagttcaagcggatgaccagcttcggcggcgagtccgttgcggctgacacgatccacgtcacgctacaggacagcggtaccgacaagtacccgctgcgtggcttcggcctctacctggccgacggcacattgtttgccgcgtacggccaggctgacgcgatcatggagaaggcgagcatctccacgctgctgctgtcggccgacgttgtgcttgccgatatcgacacggcgcagatcaagttcggaagcacgcagttcctgaacccgccggccactgaatcggtcgccggcgtagtcgaactggcagatggtcccgaaaccatcacgggcgcggacgcggtgcgcgccgtcaccgctcgcggcctgagagccgccctggacgaccgtttcggcgccaatgcaccgacaccgttcgtcaagacgctgctggcgctggccacggccgcggcgattcgcgccagcctcgaattgaagggcgctgcgctgaaagatatgggccacggcaagggactggacgccgacacactcgacggcatgcacgcgtcggacttcccgcaggtggggaaggttcagccgatcgacgcgatccccagcaactcgaatcaggttcgatggatcaagctgggcacgctgccgtggcgcggccctgctgccagcattttgctgctggaaatgaccaatggcgccatcggcagcccgcgttacgcttgggagcaggtcgccgcgtctacccgcacgttcagtgataccaccaccgtgctgacacaggcggttgttgatggcatggtgcagcacacgcggatcggcgccgactcttcacttgatcgccccagccgcctcggcttggtgctgatgaccgacgctgagggcaagtccacaggtgtcgagctgtggctgcagcagcgcgagtacaaccaaggtcatgccgtgcgcgtcgtcaacgcaaccggagcgacgtaccacggccctggcacgttcgtcactgccgaaccacaggggatcatctacgcaaccgttcagccgattgcctatatgggcgacctgcggcgcctggtcgaaagcaccgagaaccgttggggtcgtcgtcagaccttcgccctgggcgtctatctgcccagcgatcaaaccgtcgacctcggattcggcggtggcagtttgcgtgggaccgatactggcagcgtggtactcgccgcaggggcggggccgaccggcgactcaggcggctatgtctatctgcgccccaatggctccgcgaacccggcagggcagctggctgtctacaagaacggctttgccgagatggcgggcgcccggatcggaaccggatctggcgacgggaaggtgctgtgtgagttctactccgagcggccgtggcaggtccgacaggcaggcactgagggcaataccgccctagagttcttcgacacctctggcgggaaggagatccgcttcacgtccaccacaaacagcaacaagatttcactcaacccgtcgggcagttggatctatgctgccgagttcaagggcaagcttaccggcaacgccgacacggcaagcaggctcgctgcgccgcgcacgatcaatggcaccgcgttcgatggctctgccaacatcgtgactacgtcgtggggcgcctaccgcaaggtgaccatcggcaacaccaccaaggacgtgaatggtggcgtgaacgtcgcatggaccctgagcgagatcggcgcaggctcggccgaggacgtggcggcgcgggtcaagtacctggcgccgacaaacaacgatgattcgtggatcgaagcgtgggatgcgctgcgcatcaacaggcagacaagcctcggttccaccacgatgccggcgcagtacaccattgcctggtccctgcccagctatgacaactcccgtggccttgccctggccgctgactacggtggtggaaaccggttctggatgcgctcacgccgcgataccgcgccggtaaatgagcgctggaagccatgggtggagttgtggaccaattccaacttcagtcctgccaccaaggccaatcgtatccccggccaggtcatcatgttcgcggggaaggccgcgcccgctggaaccttgctgtgtgatggtgccgccgtctcccgaaccacttacgcggagctgttcgccgccattggcacgctctacggtgcgggcgacggcaccaccaccttcaatctgcctgcgatgggtgacggtaccgtcgtgacgcacacgaacagcgctgacgcagtcggtgggttcaccgctggtgaagtgatccgccacgcccacaccgccagttcggccagtgccggcacgcacagccacaccatcacggtagcggggggcggcgcgcactcgcatggtgccagcgcagccgccgccggcgatcatgcccacggcgcgtggaccgattcgcagggccaccacgggcacaccggcggcacgaactggtctggcgatcatcagcacacggttccatacggtgaggacaccgctttcccgtggggccaggatggtggctctaacaagccgggcagtgcccgctccgacggtgataacaactggccctataccagcccgagcggtaaccatgcgcacaacttcaccaccgacggcgctggtgcgcatgcccacaacatcggcatgaatggctccggcaaccacacccacaccatttccgtcgcgcaggtgggcgatcacggccacagcgcgtcggctgcagacgcgggcgctcacacccacgcggtcaccgtgaacaacaccggcggcgaccgcaacctgccggccggtctgcgaatgatctactgcatcacctactga

SEQ ID NO: 498833 - DNA, 552 bp, Stenotrophomonas maltophilia
atgcctgacaccgcctccctgctgccccccaactcgacgcggctggaacgcgcggtggaacgcgccgacgcccagctgtcggacgtgcccatggtgcacgacacgctctggaacccgtggaactgcccggccgagttcctgccgttcctcgcgtggagcgtgtcagtcgatacctgggatagcgattggcccgagcgcatcaagcgcgcccgcatcgccagttcgttccagatccagcgccacaaggggaccgccaagagcatcgcggacctgatcgccagctttggcggtcagatgaagatccgcgagtggtggcagatgaccccgcagggcgaaccgcacacgttcagcctgttcttgaccatcagcggtgacggcgggcaggagtcgtcggccgagttcgtccaccagatcgtggacgcggtgaaccgtaccaagcccgtgcgctcgcacttcactttcacccaaggcattcaggccgacagccaagtcggaaccgtcgcaggtgcccaagcggcggtctaccgccgcctgacgatgaccggagattga

SEQ ID NO: 498834 - DNA, 891 bp, Stenotrophomonas maltophilia
gtgtcctcctttaccgccatcgaagtcgacaagctgccggcgccggacatcttcgagcagcgcacgttcgaggccattttggccgagcgtctggccgagttccgccgcctgtgccccgactacaccgccctggtcgaatccgatccagtgatgaagctgctgcaggccagcgcttaccgtgagctggtgctgcgtgagcagttcaaccagcgcgctcgcggcctgttgctgccctactccatgggcgccgatctggacaacctcgcggtgcccttcggcgtgcagcgaaagctgttgaagccggcagatccgaagaccaacgccccggccgaatacgagaacgacgccgcattccggcgccgcatccagttggcgccggaaagcctgtcggtagccggtcccgaaggcgcctacatcttccacacgctctcggcgcacccggacgtgcttgacgccagcgtggccagcccgtcgccgggcaaggtggtggttacggtcctgtcgcggcagggcaacggcaccccgtcggccgaactgttgaagaccgtcgaggctgcgctgctcaacgacaacgtgcgcccgctgaccgactacgtgaccgtgtccccggccaccgtcaagccgttcgagatccgagcacggctggtcaccttcaacggccctgacagcgccctggtgctggccgaggcgcgtcgccgagtgacgctgttcctgcagcagacacagcgcctgggccgcgacgtgccgctgtcggcgctctactcggccctgcacgtcgatggcgtgcaccgcgtgcagttgatggcgcccactgcggatatgccggtggatgcccagtcagcgccgttctgcaccagcgtggtgatcgaacacggcggcaccgatgcctga

SEQ ID NO: 498835 - DNA, 429 bp, Stenotrophomonas maltophilia
gtggcgccgctgctgcagcggctcaagcctgccgagcgcagccgcctggcccgcaaggtcggcaccgccgtgcggcgctcgcagcaaaagcgcatcgctggccagcagaatcccgatggttccccgttcgcctcgcgacgcaacgccccacctcgccgcgccaaagccggccgcatcaagcgcggcgccatgttcggcaagatccggcaggccaagcacctgcgggtgcgcggcagcgcgagcgaggcggcggtgggcttcgccgggcgtgtctcgcgcatcgcccgcattcaccaagagggccgcaccgatactgtgagcaagggtggcccccgcgtcacctacgcgcgacgcgtgctgctcggcttcaccaatgccgacgaacagctgatccgcgaactgatcctcgatcacctgcacacgctgtag

SEQ ID NO: 498836 - DNA, 486 bp, Stenotrophomonas maltophilia
atgaagaagcctcaactactccgccagcacctggtcgcggcgatgccgtcactggccgcagatcccgaacgcctgctggtgttcgttgatgacggcgggctggtcgccagcttcacggcgggcctgtccttccagtaccgctacaccctcgaactgatcttgcgtgacttcgccggcgcgcccgaggccgtcatggtgccgctgctgcagtggctgacgcggcaccagcccgagctgctggccaacccggacaaccgcgaaaagctggccttcgaggtggacgtgctgagcgataccgtggtcgatctggccatccggctaccgctgaccgagcgcgtgcgcgtcgtgcaggacgacgctggcgtgttccagctgcagtacctgcccgagccgcccgccgagtgggaacaccgccatacgctcgctggtggcccgctgacggccgacggtgaagtgctgggcaccctgccggcgatcaccgagtga

SEQ ID NO: 498837 - DNA, 522 bp, Stenotrophomonas maltophilia
atgctctaccgcgcccttgccatcgtggccctgatcgcgggcaccgccggccttttcagctgccagcaggctcgggtaaatcgcgccaccaccgcactggaccgcgccaacgttgcgctggccagcgccaatgccgagatgaaggatctggccagcaagctggaattggcgcagggcaccacccgcgtggtgaccgagtacgtggaccgcgtacaggtggtgcgcgagcgcggccacaccatcaccaaagaggttcccgtctatgtcactccgaccgctgatgccgcttgcgctgtgcctgttggcttcgtgcacatccacgacgccgctgcggcaggcgtcacccccaccggaactgccggcgatcctgatgcgcccgctaccggcgttacgctctctaccgtcgccgaaaccacctcagccaactacggccagtaccacgccgccggcgagcaggtgacggcgctgcagcagctggtcacccagctgcacactgccctgaccgagtgcgcccggcgatga

SEQ ID NO: 498838 - DNA, 636 bp, Stenotrophomonas maltophilia
gtgctgaccgccccactactggcgcagatcatgcaatgcccgctcccccgcgctcagcgctgggtggcgccgttcaatgcggcgatgaagcgcttcgggatcaacaccccggtgcgcgccgcctacttcctcgcacaggtcggccacgaaagcctgagcctgtcgcgcgtggaggaatcgctcagctacagccgcgagcgcctgctcgaagtgttcggcaggtacgtgaaaggccccgaagctgctgcattcgtccaccagccggcgaagctgggcaaccgcgtctatgccaaccgcaacggcaatggcaacgaggccagcggcgacggctacgcctatcgcgggcgcggcccgatgatgcacaccgggcgcggcaactatcgccacatcggccagctgatcggccagccgctggaagagatgcccggcctgctgatcgagccggaaaccggcgccatggcagcggcggcgttctggcacgacaaccggctcaacgcctacgccgaccagcgcgacgtgctgagcgtcagccgcgtggtgaacctgggcaacgcccgcagccgcgccacaccgaacgggatggccgaccgaaccgcatgcaccaaccgcgccctggccgcgctgggcgcacgctga

SEQ ID NO: 498839 - DNA, 276 bp, Stenotrophomonas maltophilia
atggctgagttcctgaccaccgccacgctgctgtgcagcctggccatctgcatccgcctgatgacctaccggccggcccccggcgccaaccaccgccccgccatcgcctggtgcgcatggctgctgatcgccaccaccggcggcctggccctgcagatcatgctgcagggcgcccgcgcccacgtcaccgtctggcagctgctgctactgatggtcctgctggtggccacctatcgttcgcgcggcaacgtcgcgcacctgttcgggagcaactga

SEQ ID NO: 498840 - DNA, 354 bp, Stenotrophomonas maltophilia
atgaccgaaccaacctctaccggcagcatggcagcactggcaacgggggtcggccttgcgtcgatcctgccggggatccaaaccgatgcgttcctgggcgcgttcgccggcgccaccctgttcgtcgtgtcggccaagaacctgccgatctggaagcgcctggtgtatctggccatcagcgtcgtggccggctacctgggcggtaccgaggtgatgcagcgctttggcgtggtgtccacgggccttgccgcgttcatctgtgcggcggtcatcgtcaccctgaccctgagcctgatcgagcgcagccgctcggctgacgtgacccgcctgccgcgtggaggctccgatggctga

SEQ ID NO: 498841 - DNA, 216 bp, Stenotrophomonas maltophilia
atgcgcgtcgtctcgatgcagggcgacacgctcgacgcgctctgccaccggcacctgggcaccaccgccggcatggtcgagaaggcgcacgccctgaactacggcatcagcctgcatgggccggtcctgcccatcggcactgtcgtggagctacccgacgtacccgcaccgtccaccggcgccgcgatgcgcccccttgttcagctatgggattga

SEQ ID NO: 498842 - DNA, 468 bp, Stenotrophomonas maltophilia
atgagcagctttgttgccaacgcatcacctgccaccaagcagcccaacgtcaccgccggcgcgttctggccggagatcgacgtggttgcgctgcgtgaggcgatccgcgtccccggcgacataccggcgccccggatgcgaagcactgtggtgtcggccgtcatggacgtaacgcgggaactggaagcgtggcaggccggcaaggaagccgccggctacgccaccttggccgacgtgccggcacaggtgatcgacggcagcacccggctggtgcatctgtacctgcgcgcggtcggatgcgccaccgccgtcgaactgcacgaacgctaccgctcctacgacgccaccgcacagggcaaccagcgtgcggaggaactgactcccaccattgatgagatccgccgcgatctgcgcaacgccatctgcgatctgcagggcctgccgcgcgtcaccgtggaactgatctga

SEQ ID NO: 498843 - DNA, 708 bp, Stenotrophomonas maltophilia
atggccgacagccccgccaagcggcacctgcagcgcgttgaggccgaggaagcggccaagcgcgcagcaggcggcaacctgatggaaggcacgccgatctatcagcagaccttgctgcagctggccaccgaccgcgctcgactgaagcagatccagtcgggccaggccaagggccaactcaaggccgcactgctgccgacctacgacgcctacatcgagggcgtgctcgccgccgatgcgggtggccaggacgacgtggtgtccacgctgatgctgtggaacatcgacgcgggcctgtacgacgcggcgctgaatatcgccgcctacgtgctggcacacggcctgacgatgcccgaccgtttcgaacgcaccgccggctgcgtcgttgccgaggaaattggcatcgccgcgctcaacgcgttgaagacgggtgcagggttcgacctgggcgtcctgaaccgggcagtggaagtaaccaagggccacgacatgcccgatcaggtccgcgcccgactgctactggcccgcgctcgctgctcgctgccagcggaccccgacgccgcgccgctggatgcggaggctgtcggccaggccgttgacgatctgcgcgaggccatccagctgcacgacagctgcggcggcaaggaagacctcaagcgcgccgagcgcttgatgaagaagttcgaggccagtcaatccaacgactga

SEQ ID NO: 498844 - DNA, 1023 bp, Stenotrophomonas maltophilia
atgcgtaccgaaacccgcacacagttcaaccagttcacccgtcgcgtggcagaactgaacaacgtcgaatccgcagccctgtcgttctcggtcgagccgagcgtgcagcagaccatcgagcagcgcattcaggagagcagtgctttcctgtccgccatcaacatgcccggcgtgatcgacctcaagggcgagaagattggcgtgggtgtgagtggcaccatcgccggccgcaccgacaccagcggcaatggcaagcgtgagccggcggatgtgaccgcactcgacaagaccggctatgagtgtgtgcagaccaactacgacaccgccattccctacgcacgcctcgacgcgtgggcacgtcagaagaacttccagaccgtgctgcgcgacgcgatcatccagcgccaggcgttggaccgcatcatggtcggcttcaacggcaccagcattgcatcgaccaccaacagctccaccaacccgctgctgcaggacgtcaacaagggctggttgcagaagtaccgtgagcatgccgccaagcgtgtgctggccaagggcaaggccggggacaagatcgtgatcggcggtgccgacaaggcaacgcgtgactacgccaacctcgacgcgctggtcatggacgtggtgtccaacctgatcgacccctggcaccagcaagatccggcgttggtcgtcgtgctcggccgcaacctggtgcatgacaagtatttcccgatcatcaatcaggacaacaagcccaccgagctgctggccgcggatctggtgctgggcaccaagcgcatcggtggcctgcagccggtggttgttcccttcatgccagccgatgcactgctggtcacttcgctggacaacctgtccctctattggcagatcgacggccgccgtcgctacatcaaggaagagccggagaagaaccgcgtggcgaacttcgagtcgtccaacgactgctacgtggtcgaggactacggccgtggcgcggtggttgagaacatcaaggtcgaggactga

SEQ ID NO: 498845 - DNA, 870 bp, Stenotrophomonas maltophilia
atggccggtaagaccgacaaaaagaagctgcgttccaagttcttccgcgtcgccgtcgagggcgcaaccaccgacggccgtgtgatcgagcgtcagcacatcaccgatatggcggcgtcctacgatccgcagctgtacggcgcccgcatctgggtggaacacatgcgcagcctgatgccggatggcccgttcaaggcgtttggcgacgtattggccgtgaaggccgaagaggtcgaagtgggcggcgtgaagaagctggccctgtttgctcagatcgaaccgaccgacgcgctggtggcgatggtcaacaacgacaagcagaagctctacaccagcatcgagattgcgccgaagttcgccgacaccggcaaggcgtacctgcaggggctggcggtgaccgataccccggcgagcctgggcacggaaatgctggccttcgccgcacagcagggtgacaagagtccgctggcagcgcgcaagcaggcgccggagaacctgttcaccgcgatggaagaaacggagatcgctttcgatgaagtcgatcaacccgcagcgcgcccgagcaagatggaggttcttctgtcgaagctgtgcgggctgaccaagccggagcccaagccggcgcagaaggaagaccccgccgcagacttcggcaatttcgccgaccagctgctggccaccttcaccgcgcaggaagagcgcatcgaacagctgtcggcgaagaacgacgaactcacggcgaaggtcaaggccctcggtgaccaggtggctggcttccgcaagacgctggatgagaccccgcagacgttcaacaagcgcccgccgatttccggcagcggcggcaacgtcggcgacgccaccgactgctga

SEQ ID NO: 498846 - DNA, 1794 bp, Stenotrophomonas maltophilia
gtgttgcgcgcgcgtggcgacgggcaacctgttcacgtgaccagcgtagccgaaaaactccacgtcgatccacgacgccaagccaagttcctgtactggatgggctggcgtgtgtgcgacatcgccagcctgatcggcgagaaagagaagacgatccacagctggaaggcgcgcgacgaatgggaccgcgccgacgctgtggagcgcattggtggcgctctggaagcgcggttggcgatcctgatccacaaggaagggaagaccggcggcgacttcaaggagatcgacctgctgcaccgccagcttgagcggcaggctcgtatccagcgataccagggcggtggcaacgagggagacttgaatcctgcggtggccaaccgcaacgccgtaccgaagaagaaggcgcgcaagaacgagtttagccaggaagagatcgagctcctgcagacggcgttcgtggacggctgtttcgactaccagcgcgattggtatcgggccggcaacgagcgcacgcgcatcatcctgaaatcgcgccagatcggagccacctactactttgcgcgtgaggcgctgattgatgcgcttaccagcggccgaaatcagattttcctcagtgcttcgaagagccaggcccacgtcttcctaggctacatgcgtggctttgtgcgtcaggtgctggaccgggatctgaccggcgatccgatcaccctcgccaacggcgccgagctgtatttcctcggtacgaacgcccggaccgcccagagctaccatggcaatctctacttcgacgagttcttttggacctacggtttcaaagaactgaacaaggtcgccagcggtatggcgatgcacacgaagtggcgcaagacctacttcagcacgccatctacgatggcgcacgaagcattcgagttctggactggcgaccgcttcaacaaaggccgaccggtatcccagcagatccagctggacgtgagtcacgcgaggctgatgggtggccgccggtgcgaggacgcggtctggcgccagatcgtgaccgtacttgatgcggctggccgaggctgcgacctgttcgatatcgaggaactgcgccgcgagtacagcgccgaggaattcgccaatctgctgatgtgcgagttcgtggacgacagcgccagcattttcccgctcacgatgctgcagccgtgccaggtcgacagctgggtagagtgggccgacgacttcaagccgctggcgcttcgcccctacggcgaccgtgcggtgtggatcgggtatgacccggccgagacaggcgacagcgccggcatcgtggtggtcgctccgccgctggtgcccggtggcaagttccgcgtactggaacgccatcagttcaagggcatggactttgcggcgcaggccgctttcatccagcagatcacgctgcggtactgggtgacctatatcggtatcgacgcaaccggcatgggcaccggtgtggcccagctggtgcggcagttcttccccggcgtgacgatcttcaactactcccccgaggtaaagacccggctggttctgaaggcgttcgatgtcatcaagaacgagcgtctggagtacgacgcaggctggaccgacctgacgcagtcgctgctcgcgatccagaaaaccattaccccgagcgggcgccaggtgacctacacggccggccgctcgcgcaccacaggccacgccgatctggcgtgggcactcatgcacgcactgcagaacgaaccgctggaaggcggcgccgctacgcgcggctcgatggagattttctga

SEQ ID NO: 498847 - DNA, 1011 bp, Stenotrophomonas maltophilia
atgactgatcctgaccagggcgctaccgcgaccgcgcctgctggcgtcgaggcgttcacctttggtgaccctacgccagtgctggactcgcgcggcatcctcgactacctcgaatgctggcgcaacggacgctacttcgaaccgccggtggatctgcatgggctgtcgcgcaccacacgcgcgaacccatatctgcacagcgggttgaccttcaagcgaaacatgctggtcagcacgtaccgcccgcacaagctgctcagccgcgaggcgttcgcgcagctggcgttggactacatcaccttcggcatggcctacgttgagcgccgccgtgctatgtccggtgtcaatcactccctggcggtgccgctggccaagtatatgcgccgaggcgtggagcccggcgagttcttccagatccgcgccggtcagatcgagcatgagtttgctcgcgacgatgtgttccaactgcgcgaggcagatgttgaccaggagatttacgggctaccggagtggatgccggctgttcagtcggccctactgaacgagtcggcgacgctgttccgccggaagtattacaacaacggctcgcacgccgggttcatcctgtacctgaccgactccctgaccgagaaggacgatgtggacggcatccgaaccgcgctgcgcgagtcacgcgggccgggcaatttccgcaacctgttcctgcactcgccgggcgggagcaaggatggactgaagctgattcccgtcagtgaggttgcggcaaaggatgaattcaccggcatcaagagcgtgacccgcgacgacatgctggcgtcccttcggacaccgccgcagctgcttggcatcgtgccgcagaacagcggtggctttggctcgatccgagaggcggcgaccgtatggactgcaatggagctttcacccctgcagacgcggctgaccgcgctcaacgaatggctgggcgatgaggtgatccgcttcaacccctttgagctgggggcagcagcctga

SEQ ID NO: 498848 - DNA, 711 bp, Stenotrophomonas maltophilia
atgaagaacgaactgatccacggcgatgcgctgaccgtcctgccgaccctgctggccaacagcttcgacgccctcatcactgacccgccgtatgccagcggcggcacgcatgccgcgtcccgccagcagtctccccaggtgaagtacatgcagagcaacgggccgcagctgcatgccgacttcgtcggcgacgaacgcgatcagcgctcgcacctcgcatggatgcgcctgtggctggccgaatgcagccgagtgctgaaggagggcgccccggtgttgctgttcaccgactggcggcagctccctctgaccaccgacgccctgcagtgtgctggctttacctggcggggtgtggcggtctgggacaagaccgagggcgtgcggccgcagctcggccgcttccgcaaccaagccgagtacgtcgtgtggggtagcaagggccatatgcccctcggccggcgtgcgccggtgttgcctggtgttgtacgggagaaggtccgcaagctggacaagcaccacatgaccggcaagccgaccgacctcatgcgccagctggtgcggatctgcgaagaaggcgggcggatcctcgacccctttgccggatcgggcaccacgctggtagccgcggatgctgagggctatagctggaccggcatcgagatgaccgggcactacttcgacgtggcgcggtcccgactgccgcgcgcgtaa

SEQ ID NO: 498849 - DNA, 705 bp, Stenotrophomonas maltophilia
atggacggcacagtactggccttgctagcagcggcaacgagctccgcaacgaattgcgttgcgcctgctccctggcttgcgcctacgcttcagttcgttggaaccatgggtgcggttgcagtgggtgcctacctcgtcagtaggcgtgaggacaaggcgcaccggcgcaagcaagacgccgacaaactctttctagctgtaacggtttctgcagtgctagagacattcacctcggaatgtgccgcagtcgctgacgacgacggcacccaccccgggcagcgacgttcagaccacgagcgcagcccgcaggtagaggctccggacctcagttacgccaaccttgacgttgtgtggatggcgttgccggccctgctcttggatcaggtccacgcgctgccgcgcaagctggaaagcgcccgtcgcttccttgctttcatgcacagctatgacgaagaagactacttctttgagcggagattgaagtacgccgagcttggcgtgcttgctgccaatatctctgagaagctgcgactggatgtgggcctgcccgcgcaaattgaccctacgagtactactcggaagtggattgaatccagtcttgacacgctcaaagcgactgagcagatgagattggcagaacaagcggagtgggttgcagcattcaccgccaaaatggcggcgaatgagcaagaatcccaaggttag

SEQ ID NO: 498850 - DNA, 345 bp, Stenotrophomonas maltophilia
atgccgctgccccccgacttctactggaccacgcgctctgccagcctccccaacgatgcccccacagtcatcgcttgcagcggcgtgtgggtggttgcgatggcgcaacgggtgggcgaggggatctggatcgccagtcttgaccgacaccggcatggccccggcgggccgttccgctggtgtacaagctacgagcaggggcgcgccggcgccgagatgtgggtgaccaggcacgaggcgcggctgcgcgaggatgtggtcgagatcacggcataccgggaggcggtacgtgcgaaccggttggccgggctgcacctcaagccaccgttcggatgggaaggttag

SEQ ID NO: 498851 - DNA, 150 bp, Stenotrophomonas maltophilia
gtgttggacaagcatgtcagtctcccagatagcgctatcgaaaacgtgcgcgaggtcgatctgcacactctccgaaaaagtgcagcttcgcttagctcactatggccggaactcaagtacccgtcgttcttagaagtgttcgatttatag

SEQ ID NO: 498852 - DNA, 1101 bp, Stenotrophomonas maltophilia
atggcaacgctacaaccgcgcaacggccgctggcgcgccattgtgcgtcgaaagggtcatccgacgcagagcaagaccttccccaccaagactgccgcgaagacctggggcgaccgcatcgagcgcgagctcgccgattacgaggcgagaggcggcacccccggagagaacctgaccatcgagcagctgatcagctggcggatcgaggatctggcctcggtgaaagctgcaggcgcgacccagaccggcaacctgacccgactccgtgaagggctgggcaccatagtggccaggcatctgacggccaacgatgtgatcgagcacgcccgccggcgcgttcagggcaaccacatgaacgccaaggggcacattatcccccgttgttcggctgcaaccatgaacgtcgagctgggattcctgtccgagctgctgaagctggccggtccaatgaagggcgtgaagctggcaagcgacccggtggccgaagcccgccccgtcctgcgactgttgaagttggtcgggaagtccaagcagcgtgaccgccgcccgacagtcgaggagctgcagcgcctgcacgcccacttcgcagccgcagaatggcgggccactatccccatgagcgatatcgtcaccttcgcgatccttacggcgaaacgtgaaagcgaaatcacgcggctgcagtggtcggacctcgacgccaccaaccgcaccgcgatgctgagagatgcgaagcacccccgcgcgaaggtcggtaaccaccgcacgttcccccttctaggcaattcctgggacctggtgcagcgccagccgcggatcgtcggggaggatcggatcttccccttcaactcaaagtctgtcggcactgcgtttactcgcgcctgcagcaagctcggaatactggatctgtgcttccacgatctgcgccacgaagcgacgtcgcggctgtttgagcagggctatgacattccggaggtggcagcggttactttgcataagtcttggaatgaactgaagcggtacacgcagctccgccctgaatctttgcaccgtaatcaactggatcagatagatgaagctctatcgcggaatgagcagccctga

SEQ ID NO: 498853 - DNA, 945 bp, Stenotrophomonas maltophilia
atgtcccatcttctggccaaagcagctgagaagcaggatctcgcccgaatcgacgcgctgctggatgagggtgccgatatcgagtggcagcacaaaggcacggggcgcaccccgctgctatcggctgtgatcgccgggaaggctgactcggtggagcggctactggaccgtggcgccaacatccagcacgcctgcgttgcactgggttacaccgcgctgggttgggctgccaacgcaggcgatacggaaatcggacgcgtgctggtcgctcgcggcgcattgctggatgttgcttcgccggaatcgaagtacacgccgctgatgttggcgtcttcgggcggccacctggctatggtcgaactgttgctggatagtggagctgccgtcgcaccgttgaacttcgaggggcgaaacgcactggcaatggccgatgcccgcaagcacgaagacgtagtagcgcgtttgaagttggcgggggcgcagttgccgccgccgttgatagaggcaccggcgcttgagtggcccgagccagacgccgaaggtgaacccgcctcagtggtgcgtgggtatctgttggcctattacgaatgggaaacgcgtggctacaaggattcccggtccggtggcaaccttctgcgaagctccggcttccagcaggagaaagcggatattttgacagcctggtgcaccgaccgccaacgcctgtactcgactggaatttcagtcgggagcccccgacggtatgtgccggatgacctactggtatcagttgcgaagcttgggatctcgaaggcggaagtgctggtgcgcgaccatcctcagaagtcgagttccttgcgttacgagcacttgttcgtactcaaacgcgtgggtagacagtggcgtatcgacgtgttgaaaaggcgccaattccgagtaaaaaagtggtcgtcggctattctttga

SEQ ID NO: 498854 - DNA, 354 bp, Stenotrophomonas maltophilia
atgtcgcccttcatcaataccgcgtggccacgctttttcaccgtggcgctgcccatcgccgttttcgcggtttttttgagcaactcgatcgatgcgtcgccgaatggctggctgatgcaggcgacgctgctgctggtgccgttctcgaccctggtattcctcgggttggggtggcagcgtctgcgcaaggcacatgctgaatatccgatcctgaagagcgagccgcagcggatgctgacggcgttgatcggcaacgtgaaggtggccgcgctgtggttcggcctgaccgtcgttggcatgttcgccctgatgctggcgtgggtgttgctgcggaagagcagcggcggatattga

SEQ ID NO: 498855 - DNA, 1128 bp, Stenotrophomonas maltophilia
atgcgagtgagcccgttcttcatgatcagcctgttcgaattcagacggcacctggacattcgtggcgaagttgcaggtcttctattgctcgcagtgatcgcattggtgaagttgggtggagacgccattcttgctcgggaatctgcagccgtcgtccacttggatgcgcgaggcactccagtagcgggcctgagcgaggggcgcttccacttcagtgacgcgctgggagatggggtctcaggcgatccaccaattctgtcctcggtggccggagactatgttctccacaccgagcagccgccgggctggcttggggaactgcaacgcagcctggacacgctccaccgtcaacattctctatcactgctcggtgtaacccgtgaccagcttcggaaggtggactcaccagtctcgctacgcgtcattgactctcggggcaccgcggtcttcgcggacacatccttgaccgctgtttcaatcgcaatggtggtactgacgacactcgccatacttggctgccttggcatgatttttcagggcctgctgggagagcgctttggtcatgctacagaaatgatcctgagtgcagcgccacctgggctctggctcgactgcaaagttgccgcgtccatccttcatggattgaagacggtggcagtgtatggggtctacggtgcaatcggttggacgctgatgtccggttcggcgagtggggatgcaacctttgccgaaggcagttggaaggtgatgctcggcctgctcgtgttctgccttctggggctcatgctgtggaactggtttttcgccgcgtgcgctaccgccattcgatcaccgcattcagctttccgcaacacgctcccggctttcccactgacgatgatcatgattggatttgctggcctgcggacgcccgacggtgcattcatgcacgtaatgtccctttttcctttcacgtcaatggctgcaatgccggttcggcttctgtacgtgaatgtgccgatctgggagatcgcgctgtccctgtcgcttctggccttcacggcagcacttttgcggaagtgggcccgcagcaacttcaggactgccatcgtttccccggttgaaccaacgcatacatcgtctgattga

SEQ ID NO: 498856 - DNA, 315 bp, Stenotrophomonas maltophilia
atgcagaggatgagagagcgccacgatgcgggtagggtgaaggtcctgcgacgtggcgggatgaagctgtccatccctcagcatgagaatccttctggcgaggcgctgaagcaactcaatgtggtgggcggaaagcacaacggctgtgccttggcgtgccgcacgattgatgaggtcggcaacggcaatctggtttacagggtccagtcccgagaacggctcatcaaggatcaggacgcccgggtcgtgaagcatgcaggcggcgagctgcagcttctgcaggttgcccttggagaggctggatactcgatttga

SEQ ID NO: 498857 - DNA, 201 bp, Stenotrophomonas maltophilia
atggcagaggatacggaagagcgtcgtcttgccaacgccattggcaccgatgatgccaacgatctcccctggaggtacgcaaagatcgaggtcccgcagcacgaccctctcgccaaaccgcttgcagacctgctcagcgagaagcatggcgggacctctcttcaaaaccgtcagccaattggcgggctctggatcgcatga

SEQ ID NO: 498858 - DNA, 927 bp, Stenotrophomonas maltophilia
atgccaatccgcattgaagacacgtcccaggattcgatcggcctgatggaactcgtggactacctacacgattcggcgttcgatccccgcgaccaggagtcgatgatctcagtggcccccgtgctgaggaagctgggcaacaaccagacattcctgagcgagatcatctgcaaggaactcaaggattcgaaaagcattcaggtcgataacgactacacaccccaggtcctgatgctccatgccccacaggtctcgggccagagctacttcatccgcgcatgcttctggcctggccatgaggacgagatccttgctgcaagcgggcacagcacgtttttctatggcattccgcacgaccacaacttcaatttcctgaccatcggatatcagggaccggggtacataagtgactacttcgagtacgactacgcgtctgtttgcggaatccccggagaaagtgtcgatctcaggttcatggaacgatcccagctcaacaagggaagcatgctgctgtacagggcattccaggatgtccaccaacaaatggcaccagaaagcttctcggtaagcatcaacatcatggagcactcactgagaagtgtaaccatggaccagtatgagttcgaacctggaaccggcacgatttcgcagatcatcaaccgctccagcgctgcggccattttcatgatcgcggctgcgacggaagatggggattcgcagcaactgcttcgcgatattttcaggagccacccgatggaccgagtgcgcatggctgcactggaagccctgattgcgaactcgccaacccccgaagccgcccttcagttgaccaccatggtccagtccaggcacagcctgttcatgcgatccagagcccgccaattggctgacggttttgaagagaggtcccgccatgcttctcgctga

SEQ ID NO: 498859 - DNA, 765 bp, Stenotrophomonas maltophilia
atgctttcgatatgccgtgagttcgatcaggtaatcctgcgcgacttcttccacgatgagtgccggagccacatgggcagtccactgtatgcgacgccggggaaattcttcgtcaagccgccactggcgggaatggtcatatacaaggacgagttcgtggacgtgcactacatgcagagctcgccacttcaggcagctgcagcattccaggccggtgtcgaaaccggaatcaccatcaacggcacggactcactggtgttcttcacggatacgcccggcgtcgagtatcaggtatacccggtccacaccggtgacgaatccgacccgcggctgggcccgcctagtcgagggcagtcggcttctggtgaccatctgttccttgagggcggcaggcagggaatgcaccttctacatggctccagtccgacgtcgatgattgtctgcctctcgtccagatcgaggtccgaggtcactcagcacttctccctgcagtccggaaagctcgtcggctgcacggcgacaagcgtaaccgactcccggctccagatcatcgcgacagcattgtcctacctgcgggggagcgacaacaccggagccttgctggacatgtcgcgccatccgacgacattcgttcgctggaacgcgctgaggtcgctctaccgcgttgacccggcagcggcatccgagcgactcaaggaaatgagggagaacgatgtgaacgaagagatcaggaagcttgcgacccgctcactggaacaaggatga

SEQ ID NO: 498860 - DNA, 705 bp, Stenotrophomonas maltophilia
atgcccatccatgactggcccgaacaggaacgcccccgcgagaagctgatcgcgcgcgggcccacggcactttccgacgccgaactgctggccctgtttctcggctccgggttcggtggccgcgatgccgtgcagaccgcgcgcgacctgctgcaggcgcacggcccgttgagggtactgctcgaccgccccgccgccgagctcgcccgcctgcccgggctcggcccggcacgcagttgcacgcttgctgccgggctggaactggcccatcgctacctggcggccgagctggagcacggcgaggcggttggcaacaatccggcggcggtcggccgctacctgcagcaccggctgcgtggccaggcccgcgaggtcttcatggccctgttcctggacaaccgccaccgcctgatcgcctgtgaagagctgttccacggcaccatcaacgccgcaccggtctacccccgcgaagtggtgcggcgcgccctgctgcacaacgcggcggcggtgatcctcagccacaaccacccttccggcgacccggaaccctccagtgccgatacccgcatcaccgacgaactgcagcaggcgctggcgatggtggacgtgcgcctgctggaccacttcgtggtcggcgagggccgtcccgtttcatttgctgaacggggcctgctatccccgccccagccgcggctgttcggctga

SEQ ID NO: 498861 - DNA, 1056 bp, Stenotrophomonas maltophilia
atgaagcgactttccctgatcctgattctttcaacctcgatgctgcctggtccggcgggggctgggggcgctgcggcgacctacgaggaactgccctcgttggccaacagcggagttgccgtcgtggcggcaagcttcgatggcgctgtactggcggggactgggcgtcgcggatgctgcttctcgcaggcattccgatggtcccgtcaggatggcgtccgttggctgttaccgcggaacgaggcagaggacagttcggctcgggcaatcagcagggatggtcagatcatcctggtggagacccgaatctcgaccgcgatgcaggttctccgctggttgcgtgggggcgaacgggttgcggttaccccggtcagtgaatcccaccaaggcctggcgatgaacgctgatgggacagtcgtcgggggagcgcagtacctttaccactcaccggatagcgagcagccctacctgtggagcgaggcagggggctatcgcattcttccggcgcctgaaggagccgacggtacacgtcctacccatttcgacccgaatccggctgtcatccatggcattttctttgtcgacgggcctgaaccaggcgatcccgcgatgcccatgcggatccggtggcgaaacgatgaaatcgaccctgcctcgcttgtccccatgccggatgacacgctccagattggtcagatcgcctcggcgcagtcgctccaggcggcagggatcgatcgctacgagccaatgtcgatcgtgtggatggatctgcagggcggaatcctgctgggaagcgagccgttttcgaatcaggcactgatttggacgcgcagcaatggtgtgtgtcgtctgcaagactggctgcaggcacttcctgtggagctccctgaagatacccgttgggagggctctctggtcagcccggacggacgcgtgttggttggccttgggcaccgcaagggaggcgaggagcaggttccctggcgggtatcgtcggaggtgcccttggcagacattgtcctttctgcccctggttgcgccgctccagctggctga

SEQ ID NO: 498862 - DNA, 957 bp, Stenotrophomonas maltophilia
atgagcgcggcagtggccggcccggcgctggagcaggcggcagagtggttcgcgctgcgccaacagggctggagcgacgacgaccagcaacactggcgtgcgtggctgcaggccgacgccggtcacgccgacgcctggcgccgggtcgaggcggtctggcagtcgttcgccccgctgtcggcaccggcggcagcaacggcgctcgatgccgccggccatcgccgccgccgcgcgcttcgcagtctcggcggcgcgctcggcatcggtgcggtctcgcttctcggcctgcacgggctgcaggcgcagcgccacctgcagacgcaacgcaccgctgccggacgcaccggtcattggacgctggccgatggcagccagttatggctcaacgccggcagcgaagtgaccgtcgacatcggcaacggcaacggcaacggcaaccgcgccctgcatctgctgcgcggcgaactgctgctgcagaccggccaccaccccgcattcgtcggcctgcccctgaccgtgcatgtacccggcgcgcgcctgcagccgatcggcacccgcttcgcggtcggccgcgaagcgcaggacagccgcttggacgtgttcaaaggcgtggtgcggtgcctgccgatgttcggcgcggcgctggatgtgcctgcgggaagtgcgctgcagatcggaccgatggggggactcacaacggtcgctgccgatcctctgcgcggcgactggcaggacggacgcctgcaggtgcaggacacgcaactgatccgggtgatcgacgaactggcccgtcaccatcggggctatctgggctgtgatccggcactgtccgcattgaatgtcaccgcggtattgccgcgcctggacagcctgcaggccctgaaactgctggcgcgcgccctgccgatccgcatcgagcagcgctggccatggtggaccgtcgtgcgcccgatctga

SEQ ID NO: 498863 - DNA, 1278 bp, Stenotrophomonas maltophilia
atgaaactaccctgcccttcccctcgcccgctggccatcgcgctgtgcctggccctggccacgccgtgcctgttgccggccgccgcccacgcacaggatgctgccgccgccgttcgctggcagatcccggccggtccgctcgaccaggccctgaccgcgttcggtcagcagtccggcctgtccatcgctgccgatgcgcgcctgacccgcggccggcacagcggtggcgtgcaggcctcgctcaacaccgaggccgcgctggcacagctgctcaccggcaccggcctttcgttccagcgtgatgccagcgacgtggtgctgcaggccgccccggctaccgacgccggcgtacgccagatcggcaccctgcgcgtggccggccaggccagcgaaggtgcttcgccgtgggggcttgccgatgccgatgctgtctaccgtgacagcggctcgcgcgtgcacctggaccaccagcagctggaacgcttccgcggccagtcgatcggcgatgtgctggccggcgcagtcggcgtgcacaccggagacgtacgcaatggcggcgcgctggacgtcaacatccgcggcctgcagggccagaaccgggtgccggtgatcatcgacggcggccagcaggccatcgacgtgtaccgcggctatgccggcgtgcagcagcgcagctacctggacccggacctgatcagcgcgatcagcatcgaaaagggaccgagcctggccgccaatgccgccagcgcgatcggtggcgtggtctacatggaaacgctgaaggccgaggacatactcgatgacggccaggcctggggcctgcgcctgcgcggcggtgtggccgacaacagtatcgaccgcacccgtaccttcaagcagatcgcacgtggcagcgacaaccgcaacagcctgcgcgacccgcgcgactggaacggcagcgtggccttcgcccagcgcggcgaagactggcagctggtcgcggcctattcacggcgccgccagggcaactacttcgccggcagcaacggcgcccaccgctacgacgaccagcacctgtccagcggcggtaccggcatgtccagccaggccgtttccaagctgtaccacccgggcgatgaagtcctgaacacgcacaccgacaacgaatcggcgctgctgaaattcacctgggcacccaaccccgaccagcgcctggagctgagccaccgctacttcaattccagcttcggcgaaatcatgccgtcggcgatcggccgcgtgggcgagtccaaccagtga

SEQ ID NO: 498864 - DNA, 324 bp, Stenotrophomonas maltophilia
atgaacaccctggccctgtttttcgtgatctgttcggcgctgatcgacgtcgccgccaacatgatggtggccaagtcggagggcttccgccgctggcgctggggcgttggagcgatcgtcatggtctggatcgcctttgccctgctgggccaggctgtgcgctacatggacctggccaccgcctatgcaatgtggggggcgatcggcgtgatcggtaccgccacctgcggccgcctgctgttcggcaatcgcctgcgtccgatcggttgggtcggcatcgcattggtgaccgtcgcggtactgctgctgagtaccgcgaagtaa

SEQ ID NO: 498865 - DNA, 1278 bp, Stenotrophomonas maltophilia
atgcaccgccgccccttcccgttcctgcgtcgcctgccggcgctgctggcgtgcctgctgctgtggaccgccctgcccgccctcgccgtgcagcggccggccgtgagcagcgggttgcccggctacgagcacaccgcctggcgggtcggccagggtgcacccggtgacatctgggacatcagccaggaccgtgacggcctgttgtggttggctaccggttcgggcctgtaccgattcgacggacgtcgcttcgaacggcaggcgccaccggctggcacccgctacccgtccaccaacatggtcacgttggaacacagcgccgatggcgcactgtggatcggctacttccaggcaggcatcagccagttcgcgcgcggccagctgtacaactacggccgcggccagggcgtgccggttggcgtggtaccgcacttcagccaggaccgagacggccgcatgtgggcagccatcaatggagggctgcgcgagttcgatggccagcgctggcagccgctgcccgcagacacgggcgttccggaacaccgcgtgcaatgggtgctgcacgacagccgtggcaccttctgggtactggccaacctcaggatctggatgcgtcctgcaggccaaccgcgtttcgaggacaccggcattgctgtatcccagatggcgacgctgaccgagagcccgcagggcgaagtctggctggccgaccgtgtgcgcggcacctcgccgctggccaatgcgcagggcctgctgccggacagcgaacgcgaagcgcgacgcctgccggacttggtcgccgcacgcctgcagttcactgccgacggcgcgttatgggccacgatgagcccgcatggcggtgtggcccgggtcacgttcgacggcagccgcgccgtgcgcatggagcgtttcgattcgccgcacgggctgaccgccacctcggccgtgccgatcatcgccgaccgcgaaggcaatctctgggtcggcaccaatctgggcctcaaccgcttccgcatgcgcagcgtgcacacgctggcggtcggccccagtgatccctatcgctcgctggtgcggggacctcaagccgtacgacctgcgccggccactgctggaaggcagcgccgcacaactgcaggcggccgcgcgtcgggcgcccacgccgatctggcagttcgactgggtcaacctggcacgcacggtggccggccacaccacgctgattccgctgcccgagcccttcaccgggcaaccgctgcatgccctgctgttcgccgatga

SEQ ID NO: 498866 - DNA, 633 bp, Stenotrophomonas maltophilia
atggctgttggtaggtgtcgaccttggtcgacacttctgtcagatatcgaaatcaatcaggggtcagatccgttccaacagaccgcaggaacctgtcgacggcggggtgggtccggttgcgggggcgtgagcgccatgggcccgaggcatgcctcgggcgggttgggcaggacgcccaaccccggtcttgccgtgtgcgcaggacagcgcacacgagcaaggcgcgaccgagcctccatgggtgagggcgctttgcttgcgaagcattgcttcgcaagcgcccgaacgcacagccgccagcggctgggccggaccgcggagcgggattcacggcgtcccccgcaaccggacccaccccgcctggctacaggaaacccgctgtttgtgctgttgccggccagcggccggcactaccgcaggtgcagggctgcaagccctgccaaacaccccccttacttcaagcgcagcagcaggctgccgcccgcacacaccactgccagccaggccacgccgtgccacccccactgcgccagcgccaggctgcccaacgcaccaccggcggccatgccgatgaacatgcccgtgaacagcagcgcattgaggcggctgcgggccggcggcaccaggccgtag

SEQ ID NO: 498867 - DNA, 882 bp, Stenotrophomonas maltophilia
atgcaagacagtgccaaatcgaatagaactctgttcgaactggacctgctgcgggcgctggtgatggtggccgactgcggcagcttcaccacggcggccacgcgcctgcattcgacccagtccacggtcagccagaaggtgcgccggctggaggaactggccgggcatcgcctgctcgaacgcggccatcgcgacgtgcaccccaccgatgccggccacaccctgctcggctacgcgcggcgcatgctcgacctgaacgaggaaatggcgcaggcgctggccggtgcgacggtggagaccgcggtccgcatcggcgtgcccgaggatttcgtcaacgcgcagaccacgcgcatgctggccgccttcagccgtcgccacccgcaggtgaagctggagatcagcagcggcctcagccgcgacctggcgcagggcttcgaccacggtgagctggacctggtgctggtcaagcaacgccgcaacagccgccaggcggtgcattgccggcgcgagccgatgcactggatcgacagcctgcgcagcagctgcctgcagcaggacccgctgccgctggtcaccttcccgccgcgcgggctgtaccgcgacgagatgatccatgccgtggaagcgctgggcctgcgctggcgcatcgccttcaccagctcgtcgctgagcggcatccagggcgcggtggccgatggcatcggcatcagcctgctgccgcgccgcgcggtcagccgcgagcaccgcatcatcgatggcgagcgcgagctgccggtgatcgacaactacgagatcggcctgctgcatcgcgcggacgccgatgatgccgtgcgcgcactggccagcgagctgtggcggcaggtgcagcgcgaaccggaatga

SEQ ID NO: 498868 - DNA, 474 bp, Stenotrophomonas maltophilia
atgaccagcacgtaccaggttactttgacccctgctccgaaggatgaagccgacatccggttcgatccgctgccacctgcacttatcgcgcacatgcagcagcagcgtgcacaggttgctgcccttgtcgcatctgcgttccccaccgtgcctgttcaatggccgctgccgccgagcacgctgcaacgcgtagtcgatgcagtgctgatcgatcacgatgattgtgacggctgggaagcactgggggtagcattcggtgactgcctggcacagcgtgtaccggaacttgcctggacccaagtaacggatgcctggggcgtcgacgcggttctccgctatggagacgccaatatcatggtcagcgccggcaccctgttgatcaaacgcgtcgaagaaggcgagaccatcgagatcaaccatctgcttgaaactctcgaggagttcgtcatccagcaagcgcgcaagtccagctga

SEQ ID NO: 498869 - DNA, 231 bp, Stenotrophomonas maltophilia
atgaagcactggatgctccgcctgtatgccccgctgttcctgctgggcttcgttgccactgccgtcgtctgggtcggccattgccacggtgatccgttgtggctgctggccttgctggcggccgccatcgcggtctcgttcgtcgccgagcgggcctggccgtacgaccccgcgttcaaccacgaccacggcgacagcctgcgtgacaccctgcatgcaccgaaagcctga

SEQ ID NO: 498870 - DNA, 765 bp, Stenotrophomonas maltophilia
atgatgtcggtcacgcgctgcaccgaggcgacgatctcgcccatggtgctgccggcctggtggaccaggctggagccttcggcgaccttgccgaccgaatcatcgatcaggcccttgatctccttggccgccgcagccgagcgctgggcgagggtgcgcacttcgctggcgaccacggcgaaaccacggccctgctcgccggcacgcgcggcttccactgcggcgttcagcgccaggatgttggtctggaacgcgatgccgtcgatgacgctgatgatctcggcgatcttcttcgacgaggcttcgatggccgacatggtggtgaccacctggccgaccacctcgccgccctgcgaagcgacaccgtgcgcgccgatggcgagctggttggcctggcgggcgtgctcggcgttctggcgcacggtggaggtcagttcctccatcgaggcagcggtttcttccaggttggcggcctgctgctcggtacggcgcgacaggtcgctgttgccggacgcgatctcgccagcggccaaggtgatgctggaggcactggcctggatctggccgacgatctgggtgagctgtgcgacggtggtgttggcgtcgtcacgcatgcgtgcgaacacgccgttgaactggccgtccatgcgtgcggtcaggtcgccggcggcgatcgactgcagcagctgcgagagctggccgaggttgccgtcggccacctgcatcatgctgttgagctgctcgatcatcacgcggaaatcgtga

SEQ ID NO: 498871 - DNA, 504 bp, Stenotrophomonas maltophilia
gtgatcgaaacgctgcgcatcaccgcgctggctgaagtcgccggcggcggcggccgaggccagctgctggatctgcgtgttgatggccagcaggctggccttggccgcgtccatcgactcgtgcaggatcgcgcggctgccgggcaggcggcgggcgtccggggcgaggttgccgatggcgtactggttgagcacttcaatggcatcgacgatcgcatcgaggtgttcgaagatcaccgtgttgatgccgctggccagctgaccgtagacgcccgggaagtcttccggaatacggtggctgatgtccgggccggcatgcatctgtgccatcagctgggtctgttcgctgaagcggcgcagcatcgcggtcatgtcggcggtggccgccagcatgcggccagcctcgtccttgccggtgctctgggtggtgacgctgaggtcgccgcgtgcgacggcctggatggcgttcacggccttgcccagggggccggtcactgcacgtga

SEQ ID NO: 498872 - DNA, 363 bp, Stenotrophomonas maltophilia
atgagctttgacattgtcgttttgaagctggaggacatcggtgaaagagacctgtccaatgttgaggctgtgcaggatatcgggtgtccccagaccgtaatcgcatcattggagttggtgttccccggatgtgtccaaggtgcattctcggatggtgagcgctactcgctcgagtccgctctgaatggagacccggtgagctccatacaccttactcttggattcggtcgagcatggtctgaggcagccaatgctgagttcatggccctgctttcaacactttgccagcggttgcagtcagtcgcttttgcggtctccgacaactcgaggctcgctcctccctacccggtcacgctggattga

SEQ ID NO: 498873 - DNA, 1050 bp, Stenotrophomonas maltophilia
atgaacatcgcgtcccgtctgcgcctgtgtgcgcttccgttggctgtttcgctggcgctggctgcctgtggcggctcgtcggctccctctgatgccaagacgcctgccgagtcgcctgcagcaacggcggccgctgcggaaacggcgttgccggcaggctggcagcgcgtggccggtgccgagatgccggcggtgcatgaccagaaggcggtgctgccggccaaggtgcattccgatgacggtgccgacatcgaagtggctgacaccagccgcatcatcgccggtggcgacgacgtcatcgcggtgatcgaagcactggggctgggcaagcaggtatttgccgcgccgaccaacaccaccacccaggccggcctggccgcgccgcaccagttcctgttcaaccgcaccactggcgtggagggcgtgctgagcctgcagggctcgctgttcctcggcaacagcctgcgccgccacaccgaactggccaagaagctgcgcgaggtgggcgagccggcggtggtcatcgatgacctgcagccggcgccggacaaggtgcgcaaggtcgccgcggcactagggctggccgaggcagggcaagcactggccacgcaggtgcagcgtcagctcgacgaggctgcagcgattggcaagggcctgggccatgcgccacgactgatccacgtatcggccaccggcgctggcggctcaccgactgttgccggtgccgacagcgcctcggcgcagctgatcgcgctggctggcggcgtcaacatcggcaccgaggcgggggtgaagaactactcgcagctgagcaatgaaggcgtggtcgccgcggcgccggaggtgatcctggtgaccgagcatgacctgcagctgttcggcggtgccgaaggcctgtggaaggcatacccgacgctgaagcagaccccggccgggcaggccaatcgggtctgggtgatgccggacgtgcagctgaagtacaccagtgtcggttccggagctggcgcgctggcgctggccaaggccctggcggcgttgccgaaggcatga

SEQ ID NO: 498874 - DNA, 441 bp, Stenotrophomonas maltophilia
atgttcaccttcggccgcgagcatgaaatcaaatgcgcgattcgcagacaccgcaaggacgatgaactgcagatggtgcttgccatcatcaatgccattcacgatttcaaggatggcatcgttccgatcgagagcgcactgaatgcgattcgcaagggtcttgtgggcggcgcctcggggacatgggaggcggctggcagctggctttgcaagctgaatgacgcgtatccagccacagagtgcgtctggttggaactcgcatcccacccgatggccgaagtcagattccgagtggcgtgccacatgctttgggtctcagaggggcttgccacgaacttgtatccgacactcgtaaaggataggagccgccgcgtcagggagcaggcgcaaggaaactgggactgcctgcggcacccggagagttacgatgggaattcatag

SEQ ID NO: 498875 - DNA, 750 bp, Stenotrophomonas maltophilia
atgatccgtaccctcacgcgctgcgcgcttctgtctgcattggtcgcctccgtgtgcgccgccaacacggcgtcggccgcctcggtctccctgatcaaggccgccgaccgggcttcgctgatcgagagccggcattcggccggcgagggtgcgccggtggttccggtaacgacccgctacttcgccaatgacgaagtgctcatcagctgggatgaccagcaggtgttgatgctgtgcaaagaggcggtgtacctgaagattcctgcgggcaaggccggtgccggggcgttggcgcccgagacgcggcagatgattgccaatcaggcactgatgtccggaatggggtcgctggcagccgtggccgaagcggcgggcgattccgtggaggtagccgacgacggcagtgaaacccgtcgcgtgggtgagagcagctgggcctacggtgtggagcgctatgacgtcaccactcagcgcatggccgatggcgcgctgcgggttaggacggccaagaccgcgaccgtgaacaatgccaagcctgcgtcgccggatgacatgttcagtaccgaagatgatcagacggcccgtctgtccgagttggcgccggtcggcagctggacggaggtggtgatccacggtggcccgcgtcaggcgcaggtggatccggcgatgtcgttgaagggatggatcccgatggaggacgaccaggcgacgacagtggccgaggctcgcaggttgcatgagtgcaagtga

SEQ ID NO: 498876 - DNA, 174 bp, Stenotrophomonas maltophilia
atggacaacgcgttcctcatcatcgttttggccgtcgcatgcatcagcgtcggcatcgttcgcatcggctcatgggtcattgctcgccacgagcaagaacagacccgaatcatgttgcagcaggtctacgccgcctgcgccattgcccaggcgcgttcggagatgcgcgcatga

SEQ ID NO: 498877 - DNA, 213 bp, Stenotrophomonas maltophilia
atgatcacgcacgtcaccctccgcaagcgcggatcgttcaataactctccggcatcgcgtcgcgcgcgccgcgacttcaatgcttcatgggctggtaaggacttgggccacgtattgcgcgctttcgcatacaaactggaaattgctgccaccaagcgcggcgaccttctggctgctgcccactatgccgagcaacaggaggccatgccgtga

SEQ ID NO: 498878 - DNA, 612 bp, Stenotrophomonas maltophilia
gtgagcctggttgccgtgctgttcgttcgccgtgactcgatctacaaggcaatgcctggcgttgatgcgttcgacttcgaccgcaacgcgttgagcttcgccggtggcatgccggttgtagcccatccgccgtgccggtcatggggccgtcttcgtgctttcgttaccccggcacctggcgagcgcgacttggccatgttcgccgtcgctcaggtgcggaagtggggtggggcgctggagcatccagccggctcgacgttgtggcctgcggctgggttgccggcacctggccagcgcgatgagtttggcggctggaccttgccgattctccagagcgcctggggacaccgcgccgacaaaccgacctggatttacatcgtcggcattgagcctggtgacctgccggcgatgccgctgcgtctcgggcggtccacccacgtcatcgctcagggccgcacccgaaaggacggtacgcgcatccgcaagggtgatgccgaatggcgccctgaggtcaccaaggctgagcgcgaacacacgccggctgcattggcagcctggctgattgacctggcccggctttgctcgcgggttgagcggcggagggctgcgtga

SEQ ID NO: 498879 - DNA, 138 bp, Stenotrophomonas maltophilia
atgaagcagcagggggcaagagtgcgcacgatcgtgcgcgccctggggctggccattgcattggcactgccggggccgcgatggcggccgatccagccgccggggcagcggctgatgtcgccaccgcgccaggcatga

SEQ ID NO: 498880 - DNA, 1146 bp, Stenotrophomonas maltophilia
atgaaacgctcgctgcggatcctgcataccgaagctgcccggggaatgggcggccaggagatctacatcttccgccacatgcaggtgatgcgtgcgcgtgggcaccaggtgtccctgctgtgccagcccgatgcccgcctggcccagctcgcgcgcgacgatggcttcaccgtgcataccctgcgcatgggcggcttggcacggctgctgcgcggcatctggtcggtgtcccgcctggtacgccgcgagcgctacgacgtggtcaacaccaccagccgccgcgacgcactgatcgccgcggccggcgcacgcctgggcggcacgccactggtggtgcgctcgcgccacctgatgagtccggtcaattcgttgctgacctataccggtcttccgcaccggatcatcaccgtcagcgatttcgtcaagcggctgctggtcgaccgcggcattgccgccgagcacatcggcatcgtgccccccatggcgacgccgccgcgctggggcatgaccgagcagggcgatccctgggagaacctgcaggccacccgcgcacaggtccgcgccgaactcggtttcgccgagcgcgacatcgtggtcggctgcgtggccgtgctgcgcgagcccaagggccatgccgagctgctgcgcgccatggcgccactatgcaagaccaatcccgacctgcacctggccgtggtcggcgacggcgagccggtcatgggccgcctgcaggccctgcgcagcgaactcgggctggagcgccaggtgcacctgctcggcttccgcagcgacgcacaccggctgatggccggtttcgacatcttcgccctggccacccacaaggaagcctcggggaccgtgttcctcgaggcggcgcaggccgcactgccgatcgtctcgcatcgcgttggcggcgtgcctgaaatgctggtggaaggcagcaatgccatcctcacccggctgggtgatgacgccgccctcactggtgcgttgcggctgctggtggatgatcaggaacgtcgccggcagatgggccgcgccggttgggactggatccgcagcgccaagcagttcagcgcggccggccacggagaggccactgaaaactactacctccaatggttgaaggagctgggtcatggctaa

SEQ ID NO: 498881 - DNA, 3024 bp, Stenotrophomonas maltophilia
atgaccagcagcaagcacgtcgcaaggttgaagcgtaccgccttggcggtcgtcctgacttctttcatcggcgccgcagccgcgcagagcacgaccggttcgttgtacggcagtgcgcctgccggcacgaccatcgtcgtgcagagcgatacgggcctgaaacgctcggcgaccgtcgacagcaatggccgctacaacctcggctcgttgccggtgggcaagtacaccatcatccagcagcgtgacggccagaccgtcgatcagcgcgagaatgttctgctgaaggtcggcgttggcaccgaggtgtcgtttgccggtggcagcagtgccgccaccacgctggaggccgtgaacgtcgtcgcggcgaatgtgccgaagatcgatgtcaccaatacggtgtccaagtcggtcattacgtccgagcaactggatgtgttgccactggggcgtagcgccgaagccatcgcattgctcgcgccaggtgttgtcgcaggcagtggcgcgttcagcaacggctcgcgttcggtgctgtctttcggtggttccagtgttactgagaatgcctactatctgaatggcttcctggccaacaatccgctcagcaacctgggtggtatcagcctgccctatgggtcgatcgaccagcaggaaacgttcatgggcggctacggagcgggatacgggcgctccaccggtggtgtgatcaaccagctcggcaagcgcggcaccaatgaatggcatttcggcgtgcaggccacctgggccccggactcgctgtcggcttctgcggccactgtcatctatcccaatcgccagctgccagatggatacagctacaccgatgactcgttgcctggttcgctctatcgctaccgcaaggacgatgtcgccacgcgtaccacctacagtggctatgccagtggcccgctgatcgaggatcgtctgttcattcacttggctgcggaaaaggaccgcaccgaaggtgtgtccacgaacagctctgcagcaacgcagcaggtgcgcaaccactacaccattgatgcgccgaagttctatggaaagatcgactggaacatcaacgatagcaatacgctggaatacacccgcgtgcagaacaccgatcgcaacggtggctactaccgatcgttcgactacgaggacctggccgaaggtgatcgcaccggcacgttcccgaacaccacgaagctcaaggacgactttgacatcttcaagtacaccggctacctgaacgatgacctgaccctgagtgcggtatggggtcgcagcaaggagagcaatctggagtcgaatccgctggatacggccaacccctatctcagcagcccgggcaatcaggatccgtccattaccggtggccgccccatccgcaacgaccagtcggcgctctataccaagtcgtcagatgcgggcagcaagacccgaggcctgcgtgtagacctgcagtaccgcatcggcaaccacgagctgaccggtggtatcgataacatgtacttccaggggcataacgaaggtcaggcgatgaccgggccggggtatgcctggatctatggtcgtgttgatccggcctcgtcgccgaatccgggctttgatatcaccccgccgggcggcaatggctacttcgtgcagaagtacatcttctccacgaccaccagcatgtcggtcaagcagaaggcctactatctggaggaccgctggcaggtcacgccgaactggttggtgaccctcggcatccgcaatgacaagttcaccaactacaacagtgcggccaagccttacgtcgacagcggtgaccagtgggcgccgcgcctgggcgcgagctgggatgtgtttggcgattcgtcgctgaaggtgttcgccaacctgggccgctactacctggcgttgcccaacagcgttgctattcgtggtgcttccgcctcgacgttcacccgcgagtacttcacctatagcggaattgatgccaacggcaacccgaccgggttgaccgctctgggcccgggcccggtgtcagccaacaatgaatatggccagacccctgatccgttgtcgattgcgccgaccgacctgaagtcgcagtaccaggacgagctgatccttggcttcgagaagacgctgggcgagcgctggagctccggtgccaagttcacctatcgtcgcctgcagacggccatcgacgatacctgtgactccgatcgcatccacgacaagcttgccgcgatgggcgtcgacgacagcaatctcgatgtcccgggctgtgtgatcttcaatccgggcaagaccaacaccttcatgatccgacacgcggatggctcgggttacacgccggtgcagatgagctccgccgactggggttacggcaacaagaaggccaagcgtgactacatcgccgtcgatctgttcatcgagcacccgctgagcgacaagtggtacggacgtctggattacacctggtcgcgcagcttcggcaataccgaaggccaggtgaagtcggatatcggccaggatgacgtctccaagacccaggactgggatgccgcggcactgatggaatacgccggtggctatctggcgaacgaccgccgtcaccagctgaagggctatggcgcctatatgttcaacgacgagtggtcggcgtcggccaccctgcggatcatgtcgggggcgccgaagagctgcctgggctactacggcaccgatgagagtgatccgctgggctacgacgcggcctatcactattgcggtggcaagccgtcgcgtccgggtgacgccggccggcagccctggacgacccgcctggatctgggcgtgatgtatcgcccttcgtttgccgatcacaagctggccttcagcctggatgttttcaatgtgctgaaccagcgtcgcgcggtgcagtctgacgcggtctatgaagatggcccctacacggtgtccaacacctacggcatgggtacctacttcagcgcacctcgttcggttcgtgtcagtgcgtcctacgacttctga

SEQ ID NO: 498882 - DNA, 1095 bp, Stenotrophomonas maltophilia
atgacccgactgcgcaagatcatccacgttgacatggacgcgttctacgcgtcggtggagcagcgcgacgatccgtcactgcgcggcaagccggtggtcgtggcatggcgtggtgcccgctcggtggtgtgtgcggcgtcctacgaggcgcgcgtgttcggcgtgcgttcggcgatgcccgccgtgcgtgccgagcgcctgtgcccggacgcgatcttcgtgccgccggacttcgcgcgttacaaggcggtgtcacagcaggtacgcgcgatcttcctgcgccataccgacctggtcgagccgctgtcgctggacgaggcctatctggacgtgaccgagccgaagagtggcattgaactggccaccgacatcgcccgcaccatccgcgcgcagatccgcgaggaaacgaacctgactgcttcagccgggatcgcgccgaacaagttcctggccaagatcgcctcggactggcgcaagcccgacggccagttcgtgattccgccgcagcgcgtggatgcgttcctggcgccgctgccggtgaaccgcgtgcccggcgtcggcaaggtcatggaaggcaagctggccgcgcgcggcatcgccacctgcggcgacctgcggcagtgggccttgatcgatctggaagaggcattcggcagtttcggccgcagcctgtacaaccgcgcacgtggcatcgacgagcggccggtggaaccggaccagcaggtgcagtcgatctcctcggaggacaccttcgccgaagacctgctgctggaagacctgaccgaggcgatcgtgcagctggccgggaagacctggaacgccacgcgcaagaccgagcgcatcggccacaccgtggtgctgaaactgaagaccgcgcagttccgcatcctcacccgcagcttcaccccggagcgcccgccggaatcgatggaagagctgcgcgacatcgcgctggccctgcgcgcccgcgtcgacctgccggcggagacccgttaccgcctggtcggcgtcgggctgggtggcttccgcgaaaaggagccggtggtgcagggggaattgttcgagcacgacatgatcaatcccacagatacctaa

SEQ ID NO: 498883 - DNA, 7182 bp, Stenotrophomonas maltophilia
atgaatcggatttatcgcaaggtctggaacaaagcattgggtcagttggtggtggcctcggaactggcttcctccgacagcagcagcggtggggtcgtcgaccagcgccgcgatgcgacacaggccacgcccgcactgctggcggtggcactgggcctggtattgggattgggcatgagtggctctgccaccgcacagtcggtgcagatcggcggtagcgccacctgcgtggcattcagcggcaagctgctcgaaaagtgcctgatcgaaggctcggccacggccaagggcagcaatgcggtggcgatcggcagcaacagcagtgccagtgcggccaacagcgtggcgctgggcgccggctccaaagccacgcgtgccaacaccgtctccgtcggcgatgcaggcaaggaacggcaggtcaccaatgtcgccgcaggcacgcaggcgaccgacgcagtgaacaaggcgcagctggacgcgcaggcgcgcgccacgcaggccgcgctggccgacgtggccgccgacggcaaccggtacttcaaggccgacggcgcaggcgatgacagcgacgcggcgaagatcgagggcgagggcgcactggccgccggtgccggtgcgcagtcgctggccaacgccaccactgccatcggtacccaggccattgctgcaggcatcggcgccagcgcattcggccagggcgcgctggcgatcggcgatgccagcgtggtggtcgggcaaagcgcagcagcgttcggccttggcgataccgccgtcggtgccagcgcgtacgccgccagcgaaaacggtgcagcaacggcactgggtgcactgtccgaagccaccgccgatggcgcgaccgccgtcggtggcggtgccgtagcgatgggccccggcagtaccgcattgggccgcggcgccacggctgccaacgaagcctcgattgcagtcggtgcgttcagcacggccgtcggtgaatacagtaccgcgctgggctccaattcggccgcggtcgctaccggcagcgtggcgttgggcgccggttcgctggctgatcgtgtcgataccgtgtccgtcggtgccgccggatatggcctgacccgccagatcaccagcgttgccgccggcaccgaagataccgatgcggtcaacgttggccagttgaaggatgttgccgcggtggccgatgccaccgccaagcgcttccaggccaccggcagcagcaacagcgatgccggtgcgctggctgaaggtgacgacgcgctggccgcaggcgaggccgccaatgccatcggccctggcaccacggcggtcggtgccggtgccactgccgttgcgcagaacgcgacggcggtgggcaacaacgcgctggcctcgggccagaacagcgcagcattcggcaacaacgcgcaggccaacggaccgggcagcgtggccgtcggtggcgctgcggtggatgccaacggcaacccgctgatcaccagtggtggcgtgccggtggtcaccggcgccaccagtgccggtgtgggtggcacggccgtcggcgccagtgccgatgccagcggttttgccgcgtcgtcctatggcgtgggggcctatgcgtccggcgcgcaggcgtcggcgttcggtgcggtctccaatgccatcggtgattactccacggcattgggtacgcagagcaatgccacgggcaccagcagcgtcgccattggtggcccggccgacctgattcccggcctgggcttcttcgtacagacacaggccagtggtgaagccgcgaccgcggtgggtgccggcgccatcgccagcggcgaccgtgccgtggccaacggcagcctcagcgaagcctccggcgccgaagccaccgcggtgggctacttcgcctatgcgccgggcgagaacgccagcgcgcttggcgcgcagacctgggccggtggtgcgcagagcaccgcagtgggctactacgctacggcacgcggcgccaacagcgtcgcgctgggcgcgaactccgaagcggtgcgtgccaacagcgtggccgtcggcagtgccggcaacgagcggcagatcaccagcgttgcagccggcagtgaagccaccgatgcggtgaacaaggcgcagctggatgcggtggccagcaccgccgacagcaccgcgcgcttcttccaggcccagcctgaagctggcagtgatgccggtgcgctggcggaaggcgagggtgccatcgcggccggttcgtcgagcaatgcgatcggtgccggcgcggttgcacatggcgcggccgcgtcggccatcggcgatgacagcgtggcggtgggccgcaacagcacggccaccggcgatggcggtgtcgccatcggtggcctgggccaggcttacgacgagttcaaccaacccatcatcggtgcagatggcaaggcgcagcaggtgggtaccacggccgtggccgatgccacggcggtcggcagcgctgcgcaggccagcggtgcagccagcagcgccttcggcaatgcggccaaggccagtggtgacaacagcttcgccgccggcggcaagtcgcgcgccaccggcgcgtatgcggtggcggtgggtgacagtgcgtttgccagcagcgatgacagcaccgcggtgggcggctacagctgggccaccgccagcggcgccagcgcctttggttccggtgcgtgggcgaccgccaccaatgcctcggcgttcggcaacgcggcgtgggccagcggcgctggcgccacgtcgatcggttacaacagctgggccaacggaatcagcgccaccgcaatcggccgtggtgccttcggctatggcgacaacagcgtggcgctgggcttccaggcactgggcaacagcatcaacagcatcgccatcggcaccaacacggtggccggcggcgaaagtgcgatcgcgctgggtgcgggcagcaatgccagtgccagcaacgccgtcgcactcggcgcgggctcggtcgccaaccgcgcacgcacggtgtcggtgggcagcagcggcaacgagcgccaggtcaccaacgtcgccgccggtacccaggccaccgatgcggtgaacaaggcacagctggatgcggtggcaagtaccgcagcaaccaccagccgcttcttccaggccagcggcaacggcgacgatgtggcgggtgcgctggtggagggcgacaacgcactggccgcaggtgatgcagccaacgccatcggcaatggtgccaccgcgcttggcagcggtgccaatgcgctggccggcaacgcgcaggcgatcggcttcaacgcgctggcgaccgccgccaatgccagtgccgtaggcgccaatgcacaggccaccggcgaatacgccaccgcgcagggtgcggaaagcgaagccagcggtgagcagagtgcagcgttcggcgcggccagcatcgccagcggcgcaggcagcaccgccagcggtgccttgtccgaagcctccggcgaagaagccgtagccgtgggttacttcagcaatgccagtggcagtggtgccaccgcggtcggcagcgagagcgtggccagcggcacggctgcggcagcgttcggcatcggtgctgaagcgaccggtggttacagcaccgccatcggcggctacgcacaggcttcggccttcaatgccaccgccttcggcaacttcgccaacgcctcgggttccaacagcgtggcgctgggcggtgattcgcaagcgtccggtgcctacagcaccgccaccggccagggcagcctggccaccggtaccaacagcgtcgccatcggcggctcgctgttcggcgtgctggcgaccgaagcctcgggcaactactccacggcggtgggcggtggcgcctggtcggggggcatcaacagcaccgcgctgggcaatgcggcggaatcgcgcgcggccaacagcgtggcgctcggtgcggattcgattgcggaccgcgacaacaccgtatcggtgggcggcggcggcaacacccgccagatcaccaacgtggccgatggcacgcagggcaacgatgcggtcaacaagaaccagctcgatgccgtagccgccgctgcggagaagaccagcaggcagttccaggccagtggcaatgccgatggtgaaaccggcgcactggtggagggtgacaatgcgctggcagcaggtgatgcggccaacgcgatcggcaacggtgccactgcgctcggcagtggtgccaatgcgctggccgccaacgccaccgctgtcggcatcgatgcgctggcgaccggcaccaacgcggcggcactgggcagcaccgctcaggccaccggcgaggacagcctggccctgggcagcggtgccagcgccagcgaagtggggacaagcgcggcgggcgcgcgtgcacaggcaagcggtgtctacagcaccgccaacggtaccgaatccaacgccagtggcgcacagtcccttgccagcggcttccgcagcgcggcctccgccgatggcaccacagcggtgggtggctatgccgaagcaaccggtcgccttggcaccgcactcggctacggctcggctgccagcggtgccaacaccacggcggtgggcttcggggccgcggcggcgggcaccggcgcggttgcggtgggtcagtcgagtgaagccagcggtgcggaaagcgtggcgatcggcggcagcaccttcttcggcctgattccgtcgcgcgccagtggcaccggtgcggcagcattcggtgccggtgcatgggccaccgaggattacgctaccgccatcggctggaatgcctggtcggcaggcagcaacgccacggcactcggtgccaatgccaccgccaatggcagcaacagcgttgcgctcggtgccggttccaaggctgaccgcgacaacacggtggccgttggcaaggccggcagcgaacgccaggtcacccacgttgcagccggtaccgaagccaccgatgcggtgaacaagggccagctcgacgccgttgccagtgtcgccgacaagaccagccggcagttccaggccagcggcaatgccgatggcgaggccggtgcactggtcgatggcgaaaatgcgctggcggccggcaatgcggccaatgcgatcggcaacggtgcgaccgcgctgggcagcggcgccaacgccatggccaccaacgccacggcggttggcttcgatgcactggccaccggcaacaacgctaccgcactgggcaatgctgcgcaggccagtggtgtcgacagcgttgcgctgggcagtggcgccagcgccagtgaaaccggcgccagcgccactggcgccggggcccaggccaagggcccctacagcacggccaacggtgcgcaggccacggctaccggcacgcagtcgcaggccagtggtttccgcgccagtgcctcggccgatggcgcttcggcgctgggcagctatgccgaagccagcggccgcctgggtaccgcggtcggttacggcagcaaggccaccggtttgaatgccacggcggtgggtgtcagtgccaacgcttcggctgccggcagtgtcgcactgggtggaggctcggtggccgatcgtgccaataccgtgtccgtcggcagtgccgtcaacaaccggcaggtcaccaatgtcgccaacggtaccgaaatcaatgacgcagtgaatcgcgggcagctggacgccgttgcgttcaccgccaacaccaccaaccgatacttccgcgccaatggcacgggaaccgcgaacgccatcggtaccgattcggtagcgatgggctcggtggccaatgcggcgggcgcacgcagcatcgcgctgggtgccaatgccacggtgtctgcctccggcgcactggccgttggcgccggtgctggtgcggtcggcgtcaactcggttgcaatcggtgctggagcgcgtgcgctggatgccaatgttgtgtcggtgggcagtggcaaccccaccgatggcccggccacccgccgcatcgtcaacgtggctgatggccgcatcgctgccggcagcagtgacgcggtgaccggttcccagctcaatgtcaccaatcagcgcgtgggcgcagtggaaacccgcgtcggcgatttcgattcacgcatcgccacggtggagaccacggcggccagtgcggtcggctacgacgacgccagtcgtgaccgcctgaccctgtccggcttccagggcaccaccatcgacaatgtcggtgccggcagcatcgccgccggcagccgccaggcgatcaatggcggccagctgttccaatcgctcagcgatgccgccagcttcctcggcggcggtgccagcgtcggcatgcagggcgtattcgtggcaccgaactatgtgatccagggcgccacctacagcaacgtcggcgatgcattgggtgcgctggaccgcaaggtcagtgagattgaccgccgtactgcgggtggcacgcgtgcaggtgccgccagcctgcgcgcaatgagtgcctcgctggatgaaagcgcactggccagcgttgccgaagcaccggcggcggccgatgcggcaccggccagcagcgcacgcgtgcagggcacgccgaccgctgcggcggcgggtgcgggcatcccggtgggcaccccggcatcgggcctcaacgcggtcgccatgggcgacggcgcagtggccagcggcgcctcgtccaccgccatcggccagggtgccaatgccaccgctgcgaacgcggtggcgctgggccagggctcggtcgctgatcgtgccaacacggtctcggtgggcagcgaaggcaacgaacgccaggtcaccaacgtggcagccggtaccaccgccaccgatgcggtcaacaagggccagctcgatcgtggcatggctaccgccaacagctacaccgacagccgcgtgcaggccgttgccgacagcttcgatgtgttcaagggcgaggtcgacggacgcctgcgccacatggatcgccgcatcgaccgccagggcgcgatgagcgcggcgatgctcaacatggccaccagtgctgccggcatccgtacccagaaccgggtcggcgtcggcatcggcttccagggcggtgaatcggcactgtcgctgggttaccagcgtgcgatcagcgatcgcgccacggtgacgttcggcggcgccttcagcagcgacgacagctcggtcggcgtcggtgccggcttcggctggtaa

SEQ ID NO: 498884 - DNA, 552 bp, Stenotrophomonas maltophilia
atggcctccggaaacaatcgcgcggttgccgatacaatccgccgcatgtcgaccgaactgaaaacccaccagctgtccatgaccgtgctgatgtcgccggaaatggccaatttctccggcaaggtccacggtggtgcgatcctgcgcctgctcgaccaggtcgcctacgcctgcgccagccgttacgccggcagctacgtagtcaccctgtcggtggaccaggtgatgttccgccagcccatcgcggtgggcgagctggtcaccttcctggcatcggtgaactacacgggcacctcgtcgatggagatcggcatcaaggtggtggccgaggacatcctcaagcgcagcgtgcgccacgccaacagctgcttcttcaccatggtggcggtggatgaggaaggccggccgacgccggtgccacccttgcagccggtcacctcggacgaaaagcgccgccaggctgccgcgctgatccgccgccagctgcgccaggaaatggagcagcgccatctggaactgctggcgtcgaacccgccgtcgccggaggaatga

SEQ ID NO: 498885 - DNA, 627 bp, Stenotrophomonas maltophilia
atgaagtcgatcattgcaccggcactgctgttgttgctcaccggctgcggcatccgcaccgaagtggtgcgcgtgaacgtgcccgacatccgggtgaacccggaacagggtccggtggtagtggttgcgtcggtgcgcgacaaccgcccccagtacttcccgcaggtgcaatcggcagcgcgcgcaaagaacatcggcggtgtcatccgtgccggcaatggtgtactggtggaactggagacgtccacggcctcggacaaggcccgcgagatcatgatccaggccctgcgcaacatgggttaccggactgcagacaactgcgaagcgtcgtgcacgcgcctggaggctgcgctgaccgatctttcggtaagttctccggtgaatgtttggcgcgcagcgacgtacacccagcagatgcttgcagacatcgcggtgcaggtgacggcgcgcaaggacgggcagacacgcaccttcacggcttccggccacggagcaaacatcttccaggtggcctcgcgggagaactgggagatcgcactggagcgcgcggtaaagagtttcaccagcagcctgcagcagtcgatgtccgaacaggatgcggcggccggttcaaaggcgcaggactga

SEQ ID NO: 498886 - DNA, 543 bp, Stenotrophomonas maltophilia
atgatcacaactccgcaacgccgtgagcttctgcgcgcactctattccaccgaaaggctctaccttggcttctcagcctcgtcgattttccaggagcagccagcgcgcaactttctggattcattgtggaacttggttgctacaggcgacatgccttcacaacgtctgatgagcgagacccatctctatctcgagaacgccgttccactcgaccagtacggtgtttcagccgctgacaataaaggcgaggcgttcgttctggccttggattccctggtgcttttcctgaccgatgaatcttcagaatcgcttgacttcatccctgaggaattcgaaagattagttgtcgaggaagtggtgaccgatgagatgatcgatcagctgggtccaacacgccaaacgctgctggtcacgaaggaggtcgaagcagagattgacaatcatccgctgatcagggcgttcgtcaaccaacttcagctggacgaatggaagtccaagagcatcgatctgaatcctgaagatattgagaaatcgaaggtctga

SEQ ID NO: 498887 - DNA, 729 bp, Stenotrophomonas maltophilia
gtgcaggctggcccagtcgagctgctcgggcaggcgcttgaggtgggctggcgtcgccaccagcaccgtgtcggtaccggccagcgcgcccaccaggtcttcgtggaagaaccggcgcggatggatcaggcggccggcggccagcggccacagcacccggaacagcaggccgtagatgtgctggtgggacaccgtgccatgcacctgcacgccttccagctgcgcgccgaacgcagcctgcagcgcatccacctcgcgcgccagctggtccatgcgcttgttgatcgcactgggctggcccgtgctgccggaggtgaacacgcacagctcgcaggcgcgctcgtccagcacctgcagttcgccgtccacgccaacggtgggggcaaccagcgctcggtagtcggcggaaacatcgccggcaaaaccgctcacctgtggctgcagcgcctgcagcgtggccggcaggttgtcggcagccaggaacacccgcttgccggcatgccaggcgccgaacagcgcagcagcgaaggccaccgcatcatcgaagtacagggcccagtcacggccatcggcagcagcaaaggccgcacgccaggccagcacccgctggcggaagcgggcatggtcgatcacctcgccatcgcacacgccgatgctgcgctgcggctgcgggtccaccagcagccggtccagggcaatccactcagccatgcgcgtgcgctgccttga

SEQ ID NO: 498888 - DNA, 897 bp, Stenotrophomonas maltophilia
gtggcaccgaccgaggtttacggcagcagcgaaaccggtggtatcgcctggcgccgctgggataccgacctgccgccgtggcagccgttgccaggcgtgcaatggcgcatcgaggatggctgcctggccgtcgcctcggcgcatctggaaaccctcgactggtggcgcacccaggaccgcgtggaagcgttggccgatggccgcttccgcctgctgggccgtgccgaccgcatcgtcaagatcgaggagcgccgcgtttcgctggatgcgctggaacgcgcgctgcgcgaagacaccgaagtggacgatgtgagagtactggtcctgccaggacagcgtgagcagctggcagcggtggtggtaccggccagcctggcgctgctggagggcggtgacgccgcgcgccgcgcgctgggccagcgccttggcgcgcgcctggcacaggcgcatgacgcggtcacccggccgcgccgctggcgcctggtgaaggcgctgccgatcaatgcacaaggtaaggtcacccaggcggcactggcggcgctgttccagccgctcatgccggtgccggtctgggttcagcgcgatgctgccagcgctacgttgcgcatgaccctcgacccggcgctgcggccgttccagggccacttcccgcaggcggcgatcctgcccggcgtggcgcagctggactgggccgtgcgttttggccgccaggcgttcagcatgccggccggattcctgcgcatggatgcggtgaagttccagcacgtggcccgcccgggcgatgagctgaccctgcagctggactgggatgccacgcgcaatgtgctggccttccgctacacctccagccacggcgtgcatgccagcggcaaggtggttttcgccgatgcggactga

SEQ ID NO: 498889 - DNA, 771 bp, Stenotrophomonas maltophilia
atgcggactgacccggccgttgccggtgccgcgttcgcgccactggtggtgattcccgtctatgaccacgagcacgccatcgcggcggtggtcgacggcgtgcaggccgccgggctgccgtgcctgctggtcgacgatggctcgcatgaagcgtgcgcgacggtgctgcgttcgctggcacagcgccagggcgtcgacctgctgcgcctggacatcaaccagggcaagggtggggcgatgctggccggctttgccgaggccgctgcgcgtggctacagccacgtgctgcagatcgatgccgatggccagcacgataccgccgacctgccgcgtttcgtcgaggcggcgcgtacgcacccgggtgcggtgatctgcggcattccggcctacgacgccagtgttcccaaggcgcgcctgtatggccgctacgcgacccacatctgggtctggatcaacacgctgtcgctgcacctgcgcgacaccatgtgcggcttccgcgtgtatccgctgccgccggtgctgcgcctgatcggtgaagagaccatcggccgccgcatggatttcgataccgaggtgatggtgcgcctgtactggcgacagctgccggtcgagcacctggccacgcgcgtgacctatcccgccgatggcgtgtcgcacttcgatgtgtggcgcgacaacgtgcgcatcagccgcatgcatacccgcctgttcttcggcatgctctggcgcgcaccgcgcctgctgtggcgccgcctgcgggggcagcgctga

SEQ ID NO: 498890 - DNA, 1551 bp, Stenotrophomonas maltophilia
atgacgactgacgccgtacccgcgtgccgctttggcgatgcaccgttgaccatcgaagacgtggttgccctggcccagcgccagtgcgaggccgcactgagcgacgcgccggcgttccgcgcccacatccagcgtggtgccgacttcctcgaccgcctgctgcgcgaggatggcgtgatctacggtgtgaccaccggctatggcgattcgtgcacggtgaacatcccaccggcactggtggctgaactgccgcaccacctgtacacctaccatggctgcggcctgggccgttacctggacccggtcgagacccgtgcggtgctggcggcgcgcctggcctctctggtgcgcggcatgtccggtgtaagcctgccgctgctggaaggcctggccacgctgctgcagcacgacgtgctgccgatgattccggccgaaggctcggtcggtgccagtggcgacctgacgccgctgtcctacgtggcggcggtgctgtgcggcgagcgcgaggtactgcacgacggccgcgtgcagccggcggcggacgtgctggcgaagatcggcatgaccccgctgaagctgcggccgaaggaaggcctggcgatcatgaacggcaccgcggtgatgaccggcctggcctgcctggcctggcagcgcgccgactacctggcacgcatggctacgcgcctgaccgcgttcaacgtgctggccagcgacggcaacgcgcaccacttcgacgaaaccctgttcgccgccaagccgcacccgggccagggccgcatcgccgcgcgcctgcgcagcgacctgcacagcgagcgcccgccgcgtaatgaacagcgcctgcaggatcgctactcgctgcgctgcgcaccgcatgtgatcggcgtgctggaggacagcctgccgttcctgcgccagctgatcgagaccgaactgaacagcgccaacgacaacccgctgatcgacgccgacggcgagcgcatcctgcatggcggccacttctacgggggccacatcgcgctggcgatggacaccctgaagaacaccgtggccaacgttgccgatctgctcgaccggcagctggcgctggtggtggacgcccgttacaaccatggcctgccggccaacctgtcggcggccaccggtccgcgcgcggccatcaaccatggcctgaaggcactgcagatcagcgtgtcggcctggactgccgaagcgctgaagcagaccatgccggccagcgtgttctcgcgttccaccgaatgccacaaccaggacaaggtcagcatgggcaccatcgccgcgcgcgactgcctgcgcgtgatcgagctgaccgaacaggtggtggcggcaatgctgatcgccgcgcgccagggcctggccctgcgtgaacgggttggcctgaatgcgcagctgcatggcagtctggccgacatgtacgccgacctggggcaacgcatcgccctggtcgaggaagaccgcgcgctggatcgcgaactgcgggaactgctggtggagatccgcgcgcaacgttgggagctgtatgccggtgaatga

SEQ ID NO: 498891 - DNA, 474 bp, Stenotrophomonas maltophilia
atgaagccaaccatcctggcactggacctcgaaggtacgctcatctccaacgcaatcagtcagattcctcgccctgggcttcaccggttcctagaggatgtccgatcgcagttcgaggaacttgtactgttcactacggttcccgaggcacttgcaagaagaattgccggactcttggctagggaaggcagtgttccggcatggtttgtcgaacttcgatacatccattggtctggaaggacaaaggatctttcctatgtctccccccgcgtgggtgaagcccttctcttggatgaccatggcccatatgtgcatgatgggcaggagagactgtgggtcgagatcccgatgttcggctctccgtactcgccagacgatgacgggttgcagaacgcagctgaacgcctgaccgatcgcatcatggaactgcagagtgcatccaaccagggccacatgatcgccggtcatggctga

SEQ ID NO: 498892 - DNA, 1302 bp, Stenotrophomonas maltophilia
atggcctatgacgtcgaaatatgcaccgcacgtgcgatcgctccggaagcgacagaaatcgcgggtacgcgaggcgtacccttacccgagggattctgctttttggtcagcagggctgatggaacgatcgttcagcccgcatttgaattcttagcagatgcccatctaacgatcggtccaaagccaaagcttgcctgcagcaagaacacgacagcagctatcgcggcggacctcaccgacttccatcactttcttgacgcaagaaaaaagctcgtttccgacgtagatgaggatctcctcagatcctatgcggacaccttgactgacctagactcagcggtgaccctggacaagctcgccgccgcgactattcatcgaagatggtcgaccctgaccaagctgatcgcattctgcgtaaagcggggatacctgagaaaggcaccagcgctgctgagcaagcagacgaagcgaggaactgttcaagttctcgacgttggcgtcgatcttcccgggctgaacgacgctgacgaactcatcactgcgctccatcccgagaccgtcgtcggtattcttgacgaactaggtcccaaccctttgctcgaacggaacggtctcgttgaactagcattcgctaccaccgcacagcgactgatggctgagctttgctatcaagcaggactgaggcgggcggaagtatgcgatctgaaagcgcagaccgtccttgagactcatacgagagggcgcgatcctttcagtgcagtggctatccccgtcgtcgggaaaggtaacaagaagcgcaacgttcccgttccagtttggctactcgaggcgctgaagcgttatgcaaaaggtgttcggcagcgcctcattgacctccgactggggtaccacaagctcgaggatcacggcgtcctcttcgtcctcaacgcaaacaaccgcaagcatgcgggcaatccgataaccccgcagatcttcgaccggcatttcgcccaggccaaggacaggctgctcaaacggctttccaaagagcttgacctggctcgctacgaatccacgcagcgcgagcggataaccattcacgcccttcgacacaccttcgccttgtacacgtacatggagaagcgcgcaaacggtgacatggatgcgatcaagtatgtccagtcagtactgggacacagtctcagggatacgaccgagtccatctacctgcgaagcgcgaacgcattcgagagcgaaaccagggaatcgatcaggctgcaccttgaaggtcaaccctttatgcgaatcggcgtcgaggcctga

SEQ ID NO: 498893 - DNA, 1830 bp, Stenotrophomonas maltophilia
gtggcaggaagaaggtccgcccaactgcggcacgccgtagtagttgaggaaaaggtaggcaacacaaagaaatgggatgtccgcgagagcgcgggtcgcctagaagtcgcgttcaggcgcgccggagacctgcgcgacaacatcgtcaatctcagccgttggaagggcataggtgcagcggcaccgctcttcgccgaggcgttctgtcgagctaacaagaacagcagggagacgactagatcctcttcagctaacaacatcgtgagtggcctggtgcagtacctaaccgtaaaaggggtaaagataagcggcccagacgacactccgatggatctcggcgaatcatttctaacgtatctgaaaggtggggataccacgcacccgacagttctctcggtgcagacccagcgccactattacgggaccttcaagaaggtcgttcttgcactgcacgagatggatccacggtggaaggtgatccgtattccgccaaagccgttcgcaggactgccacggaagagcaagcccaaagagctggaccgtgcggcttgggccaacgtcatgaaggcggctgtcgaggaatgcatatcgacaatggacgaagtgtggccgcttctagatagggttcacagtgccctcgctcagaagaaaaagggcgacgctgtatcgctaagcgacccggcagaggcaattgctcaaatcttggcaaactttgacggtcatcttcctcgccaagccgcggttcacaagctcccaggcgtaggaaagatcagcgaaagcgagtacttccgtctgaggagactagcgcaccccatcggcggcgatctgatcccattctttctcgtactagccatgcactcgggcttcaacgagcagccacttagaacactcaccctagatggcatatcggagcactacccgcttggacaaaagcgaacggtgatcaagtcctctaagcgcagggcaggaacttccgctcagggcgcgacacagcgagcagccttccccgctagcgatcacccgctagcgccggaaagattgatcagtttcgtgattgcttggaccaaacgaattagagactacgctgctggtgagcttgccaatgacttcttcctccacgccgtttccgaaggcgggcggcacaagcgccgaggaatgcacatcgattcctactcagccagaaccgacgacgtgaccacgcgggtgaccggttacatcacattgttctgcaaacgaagggggcttaagtactctggctcccaagcaaacaggcttgcgttctccgaagcggttgatgggctgaccgacggcgacgccttcgagctccgagcaatgctaggccatcggctattgtcaactggccaagacagttaccagacaaccacgatgcagcgtcggcagaaggaacagctggcaggagccctgacggcacaggagcgttgggtgacttcaaacggaaagattgacacgcgatccgcgcggagtgaccgcgatcaaacggcagcaacgcagggcttctgctgtgcagatccattccaaagtcctcaacccgggcagcgccatgggaagctctgcaccgcctatggtgcttgccctgcgtgcccactcgctgcggctgacccaaacgaggcctatgccctcgcccgctttcttcaactgcaggagctatacgaagaagccagggcagaccttggcagcgagatctggaggcgaaagttcgagaacgcctaccttgctctccgcgattcatggattccggcagtgagcacagctgcgaatcaacaatcagcggcgatgatcatgctgacgaccctgcccggacttgaatag

SEQ ID NO: 498894 - DNA, 2067 bp, Stenotrophomonas maltophilia
atgcccgcactaagaaatttcgaaaaagcacaggcagagactctgcatccttcattccaagtggactatgacagtgatatctggaccttcgcccagaccacggtcggccaacagaaggagtttgtcacagttgactgggcaatcccgctggcgcgtggagaattgctcacagaccacaaacacagagcactcctcgccgagctgaagtgctacctcaagaccgccatcatcgaggacacggtgcgcatgacggttgggtctatccctgccacctacatgggcttgagggagctggtcaagttcatggggcagcggaaaatccactccctctttgacatttcgacagcggtaagctgggaatatatcgaaggtctcgaagagcagtacatgaccgctggagatgacaccggtcgagacagggcgtggacgcatgcgaccgcctacaaactcatccacccacttacacagatctacgagatcgcggacagattgcgcgctagaggcggacaagcaccgtccgaagcgccgtttgacggacgaaggacctatgacgtcgtgacagagccgcttgggcttgctcgaacgggtggattgatgcctgtcccggacgagatctccgtaccaatcctttcttacgcatgtgagtggattgaccacggctctgaggatgtgatcagacttcaggctgaggtcatccctatgctcatcgacgcacggagtgccacgggcgcgagacgaattgcctgtcttcgtcagatcaaacggcacatcgaggaattccagatgagtccgatcccagggacactaatttcctggcatgagccattgaccgccatagatcggattgatgacgctggagacgagcgcgggattagcggaactcaaagcctgagacgcctaatactgatgactcagagcgcatgcagtatcttgctccagggatgcactggaattcgagctcatgagctgattggcctctccctggaccacgatccgacgctacagcacggcgtggtcaagtcagtgacatcgctagacggactgatggaagttttctccatttgtggcatttccgccaaaagggaagcgacgcggcatgagtggactgccgggctgcgcccgttgggcacaaatcacctgccgatcgtaataaaatccatcgaagtactggtgcggctaatggagccttggcgagctctatcgggtagtaagtcactgatgcttagcttctcccacgccaagtcccttccgtcgggtcccgatggaatcggccgaatgacagcctccagaaattctctgctgcagcgtgagttcgccgtcgaagccctcacgaagaagcgtggcatcgaaacgacgcaagctatctacgaggtgagatcccttcgcccgcagcgatggaggatcacctttgcgcactatgtcttccgatccaagccggaactaatgccagcgctacggacgcacttccgtcacatgagcgagcagattacggatcaggggtacattggaaacgatgcggccctgctcgagaacttggaaggagagagagtcatggagacctctcggttcctcgttcaaatcacgcttggcaagccaatcggaggtggaccggcgcagcggcttctcatgcagcatgccgaatcaatgaccgaggcactgtccgagatggacggagagacgctgatcgataaggccgtggcatacgtgaagctcaccgacctgcggatatggacagggacttacgcgagttgcctgattgatatgttgcctgaccgttccagttgcaacccacaagcaagcctcctcactgttcgcgcctcgccgaacttcggcctacggtcgcccgggctgtgcgcggggtgcaagtgttgcatcatcctgccagagcataaggacttctgggaggatcgcctcctgaaaaatcaggccattgtccaggcagagcggaccaactctaggaatcagccttccaagattgctaagagtcgtgttgttcagagtcgaacagtcctgaggatgatatccaacgctaccggggacgcttccgatcgttccggcgaaagttga

SEQ ID NO: 498895 - DNA, 1194 bp, Stenotrophomonas maltophilia
atgcgtctcatcgccaagttcccgacgcgcagtggccatcatcccgaactcttgaagctcaacaacgcgagtagcgactatcccgcgatccgtgaatcagtccgaagactcttggagtcggggcatatcgctcaacccatcgcagccacctacgcccggctgttggttgacgagtatcaggattgcagcaccgtccaacactccatcgtgtccgccctcgcttcccttttgcccacctgcgtcctcggagaccctttacaggccatcttcggatttggcggaaatcggctggttcactgggaacgggacgttcaatcatccttcccagccgagggtagccttcgaactccttggcgctggcagattgcaggtaacgaagagctgggccagtggctgctctcccaaaggcatgctcttacggcgagcttacccattgatctgaccacggctccgccatccgttcggtggatccagctggttgccggtcgtgaggtgcaacaaaggctgactgcggcacgaaccaatgcgcctggcagccaaggaacggttctggtcattggcgagtccatgaatgtccaagggcgccatcagctcaccagccaaacgcctggggcaatggcggtagaagccgtggacatgcgagacctcgtcaacttcgcgaggcatttcaatcttcaggctcctactgcgctgcaggacttggccaccttttccgctctcatgatgacgggtgtcggcgcgccaaatcttgtgacgcgtgtcggcaccattcgtagagggagagccaagacccctccaactcctgtagaagctgaggcagtcgcctttgagtccgagcggagcatggctagcgccttacggctggtggacgccttggccgaacagacaggcactcgggtctatcgacccgagattctgcactgctgtcgatcagccatgcgaagcgttattaaccaagagcaagatctattgggagccgcgcttcaagcccgggagcgaaatcgtcacctcagccgtcccattgcgcgcaaagcagtcggcagcactctcctgctgaaaggtctcgaggcagacattgccgtggtcctttatccagagagcatgagcgcgcaaaacctctatgtagcactcacacgtggtgcgaaagggttggtgatctgttcccgcacctcaacgctgaccccggccccatag

SEQ ID NO: 498896 - DNA, 1728 bp, Stenotrophomonas maltophilia
atgcctcgaattcgccatttggccatccggaattttcggtccatcaaggcactcgactgggcgccagctccgggcatcaactgtttgatcggtcctggcgacagtggcaaatccaccatcctcgatgccatcgacctgtgcttgggtgctcgacgaagcatctccttcggcgacatggacttttttggcctcgatgtctcagagccaattcgtattgccgtgacattcggggaactgccagcatcgctgatggacattgatgtctatggggacttcttgcgagggttcgatgcggtatttgacaccctcgaagacgaacccgccgcgggcctggagacggtgcttaccctgcagcttcaagtcggggcggaccttgagcccagctggacgctggtttccgataggtcgcttcaacaaggcttggaacgaagcctgccttggaaagaacgaatcgcattggccccggcacgtataggcagctttgcaagctccaacttgtcttggagccgcggatcggtcctcaaccggctaaccgacgaacgcgcagaattgggagcccagctcgctctcgcagcgcgtcaggcacgcgccaactttggcgctcaagcgtcgccccacctgagtcagacactcggaatcgtccaaacaacggcccagagccttggggttaacgtcgggtcgatgccgcaagccttactcgattcgcactccgtctccatcggcgaaggcgccatcgcgctccacagcgaggcaggcatcccccttcggtcacttggtacgggttcttctcgactcttggtgactggacttcaacgggccgcatcggagtcagcgccgattgccttggtggatgaggtggaatatggattggaaccccatcggctcatgcggctgctggattccttgggagccaaggagacgcccccgcctctccaagcgtttctcacaacacactcccctgtggcacttcgcgagctttcaggtgagcagctacttgtggttcgaccacgaccggctggccatgtcgtcatttccgctggctcaaccgacgagattcaaagcacgctgcggactgacccggaagctttcctggcgaagtctgtgattgtgtgcgagggagcaagcgaggtgggatttgtgcgtggcctcgatctatggggagtggccaacaaagaaccatcttatttggctttaggtggtgcatacgtcaacgcaggcggaggcactccggataacgcttttgcccgtgcaactgcgcttatgaagttgggttaccgagtcctcgtcttcatcgacgctgacaagcccgccgcgccaggtgttgcagaggcatatctccaatcaggtggcagcctcacgacttggcgggcaggaatgacgttggaggacgagctgttcctctgccttcctgacacatcaattgatgccctgctcctgaaggctaaagagcgtgtcggtgaagaccttgtgaaccaacagctggttgccaaatcgaacggtctaacaagcttggcgtccatcgaagcattgaggccgaagtcgccgtatccgctcgatattcgcgtactgcttggcgaggtctcgcgcaccaaaaagaagagctggttcaagtctctcacgacttaccagtcaatcgtcctggatatcgtctctcgcggctacgccgatgcggacgccagctttaaggcagtagtagaccaactctgggcctttacccgtgccgcctga

SEQ ID NO: 498897 - DNA, 741 bp, Stenotrophomonas maltophilia
ttgtcgaagccgggctacgttccgcaaccgatcgcgctgggcatcaacaccgatgcgtaccagccgatcgaacgcaagttcaagctcacccgccagctgatcgaagtgatgctggaaaccaggcatccgttctcgctgatcaccaagaacgcactggtcgagcgcgacatcgatctgctcgcaccgctggcggcggagaacctggtcagcgtgcatttctcggtgacctcgctggacccgcatctctccgcaaagctggagccacgcgcgtcggcgccgcatgcacggctgcgtgcgatgaagcgcctgcatgaagcgggcattccggtcggtgtgatggtggcgccggtgatcccgtggatcaacgacagcgaactggaagccgtgctggaggccgcgcacgatgccggcgccagcaccgcaggctacgtgctgctgcgcctgccgctggaagtggccccgctgttccgcgactggttggacacccaccatcccgatcgcgccgcgcacgtgatgagcaccatccagcagctgcgcggcggcaaggattacgacagccagttcggcacccgcatgcgtggccagggcgtgtatgccgatctgttgaacaaccgcttcaagctggcgcgaaagcgtctcggcttcaatgcgcagaacagccattggccgaagctggattgcagccggttcgtgaagccgctgacgccgaagaaggattcgccgcagggaagtctgttctag

SEQ ID NO: 498898 - DNA, 396 bp, Stenotrophomonas maltophilia
atgtttggatccatcggaggtggcgattggaccggagagccaacagaagcagaactgcgcgctgctaccgatacctttgaactcccttcaggcggccatcccacgaacgttaagttcttaccgaaggtcacgttcctgggggccgtcttcgacgccgaactcgaatctgatccagagcagatcgccgctttcttcatcaaacaagccgcagagaagcggtggcgactgcagaaagacaaacggcagcgccattacagattgatggtcttctgcgaggatcgcctggcgcgctcggtagagctgacgacaagaggcagtacggtgaagctctatggaggaacctactgggactcggacaggggcggcgactactactgctctcctgaggcccggtaa

SEQ ID NO: 498899 - DNA, 324 bp, Stenotrophomonas maltophilia
atggatcggcagtatttcacgggttccgccgacagcctattctttggtgggcggctgatcgatctaggacccgggaatgatcttgatgtcacacaagctcccgtaatcaagcacagcctctcagtcgacgaagaccgggaagcgatcgaagcgttcgagctgaccaacatgtgggggagtgacgacctccaggacaggcttgttcgacatttcaccactgggatagatcgggacgatctcaaatttgtgatctttcccgatctttggcccgatcgtcaggcattgagcccgctgacccgcagattgcccgaacggctgcgctag

SEQ ID NO: 498900 - DNA, 360 bp, Stenotrophomonas maltophilia
atgaccctggacggactctccgttctggcagaacaccacgccatcccgatttcggagatcctcgacggaattgccgaattcagggccgccgggtacaagaacgaatgggtgcaccaaaccaagtgctatctcactgatcgggttcgagcaacgctccactgcagcctcaaaccaaacaacttcagcatgacactggacatcagcaaggacggtcataccgtgctgagggaggtcatcctggaatgtctgccggacgaaatcatttttgcccatcgacttggcagtcttgagtggtgcgaggacacgatcactgtccgccagaaggatggggcgatcctctatcgctctacaagccaatga

SEQ ID NO: 498901 - DNA, 960 bp, Stenotrophomonas maltophilia
atgatcctgcgcggcctgttggccctggcctgtgccggggcggtaggcgtggccaccgcagcggtaccggcagggccgcagatcctcaccgaggatgtcagccgtttctatgcactttatgacagggctggcggcaagcccagcgttgcgcagctgcgtggatacctggccgaggggtcggccggcctggccgaactggccaaggcgcgccgggtcactcccgaacgcattgccgagtccatcgccagccagcccgagctgtatgcacagggacgaaactgcctggccgaactgcccgcggtgaagcaacgcctgacgcaggtgttttccaacctgcaggcgatctacccgcagacccggttcccgccggtgaccatcgcggtgggccgcggccggccggtcgggctgacctcgaaaagcggcgtgatcattggtctggaagcgctgtgcgcggccgacttcatgaatgccaatgtgcaggatcgcttcgtgcatgtgatcgcacacgaatacgtgcacatccagcagaccggcctgatcgacttcgagccgggtgacccgcgcgcgacagtgctgcgcgtgtcgctgggcgagggcatcgccgagttcatcgccgagctgatttccggcaacgtcggcaatgggcgtcacgcggcctggacccgtggccgggaagtgcatatcgaaagcgcgttcgcgctggatctggacagcaccgatctgtcgccgtggctgtacaactacaagccgggctcgcaggaaccctacgacctggggtactgggtgggttaccgcatcgccaaggcctattacctgcaggccaaggacaagcgtgatgcggtgcgtgcgctgatccagcaggacaacccgaaaacgatcctggccgccagcggctggacgccgggcatgtggatgccggcgaaagtcacgggtgtagcggcgcgtacggctgcacgctga

SEQ ID NO: 498902 - DNA, 834 bp, Stenotrophomonas maltophilia
atgtccgaatcggcccatcaccgttgccctgcacccctgctcccgcagcgctcgaagccccgcgccgtccatccactgcgcaccggccaatgcggccgcaggcactggcgtggaccggcgattgacgggaaccaggtccgcctgcagctgcaatcgcagcgcatggatgtccggcggccaccggtcgtccagcggcaggaccagatcgtccacctcctggcaggtcgaggcgctgctgcccgcccagcaatagggcaaggtctgctccatcacgtagatgtcctcccccaccgggtcggtcaactgcggctgttcctgcgggcgccattgatcaacgcgcgtggacggtgtctgcggtgcgctgggcacctcgcccggcgacgatggcagaactggcgttggctgcggcactggcgggggtggagggggaatggggggctctgccggatcgccagcgccatcgcctccgcctgcatctgcgccgttcccaggttgatcggtagccgaccgatcgcctgctgccacctcgggcgcaggctgcagatcccggccatgagcgccaaggccgacagcgccgccgccagcgatgcaatgcgtcgccaggtgatccgttgttggcggtcacggtctggcttgaacgaggtatctgtcatcacgactccggcaacgctggccacaggccctgtccaaagctcgtatagcggacaggctccactcgaacacgctcccagccgcccttcctgcgatgcagaaggtagaggacacgcatcgccgttcctccactgcacagatccgaggcgatcgatgccattgcccagttcccatccaggctga

SEQ ID NO: 498903 - DNA, 216 bp, Stenotrophomonas maltophilia
atgggcgcggctgaaagactggaagagctgctatcgcttgatcgcgtgcgccagatgaccggtatgggcaccaccttcatctacggcgagatcaaagctggccgattcccgcgctctatccgcatcggccgtcgcgcactctggatacaatccgaggtgcaaggctgggttcggcagcagatcgcgcagaaccgacctttgcaggtggatgggtaa

SEQ ID NO: 498904 - DNA, 315 bp, Stenotrophomonas maltophilia
atgacccaggaacatatcagccacccggaagggttgccgaactgcgccgccggccaccgcgcgcgccacatccacgacaagcgctgtgcgtctgccggcggtggccacttggtcgagtgcgcatgcaggtcgaccagcaagcatgccgatcccgacgccgccattgcggcgtggcgtcggctcaaccgccccgcccgcagcgcgcgccccattccagtcgaggcacctgccggcaacgtcctgcagttccagctcagccttgccgaacgcacatccaagactcaccgcatcggaggtcatcatgggcgcggctga

SEQ ID NO: 498905 - DNA, 873 bp, Stenotrophomonas maltophilia
atgaatgcggtcccacaggcggccgagcgcgattggcgcacgccgctggaattgaccctgctgggcgccatctggggctgctcgttcctgttcatgcgggtggcggtgccgtcgttcggcccgttcgcgctggtcgaggtgcggctggtgctgggtgcgctggtgctgctgccgttcctgtggcgcgcccgcgcgcagttcccgccgcggcgctggctgtggctggcgccgatcggcctgatcaactcggcgttgccgttcgtgttgttcgcctatgcagcggaacaggcgccggcggcgatcggcgcgatctgcaatgcgatgacggtgctgttcgccgcgctgatcgccttcctgttcttcggcgagaagatcggcatgcgccgcgccggtgccttgctggttggcttcgccggcgtagtggtgctggccaccgccaaggtttccggcctgagtatcggcaccgcggtgctggcaggtgcggcggcttcgctgctgtacggcctgggcgtgaacctggtgaagcggcacatggccggcctgccgtcggcggccgcggcggcggcaacgctgtcgtgtgcctcgctgtggatgctgccgatggcggtgagccactggccgcaggcggcgattccgctgaaggcctggggcgcggccgtcgcactgggcgtggcctgcaccgggctggcgttcctgatgttctaccgcctgatcggccgtatcggcccgtcacgggcgtcgacggtgacgtacctgattccgctgttcggcgcggcgtttgcgtggttgttcctgggggaggcggtgacggtgcagatgctgattgcgggtgtgttgattctgggcagcgtggcggtgagccagaagggctga

SEQ ID NO: 498906 - DNA, 945 bp, Stenotrophomonas maltophilia
atgctgctacgcccttccctgctacccgcactggccgtgttcgcggtcgccgcgcgccaccagaacttcgcccaggccgcgcaggagctgcacctgaccgccagcgcggtcagccaccacgtccgccgcctggaagaagtgctggaagtacgcctgttcctgcgccacgcccgcggcgtgcgcctgaccgccgagggccggcaactggccgacgccgccagcgccgccttcaccgatgtcgcggccgtcgcccatcacctgcagccggatgccgacagcgtgccgctgcggatcaccacgctgcgctcgctgtcctactgctggctgctgccacggctgccgcgcttcacccaggcctacccgcacatccgcatcgaactgcataccggcagcgggctggatcgctatgacgacaacggcccggaagtgggcatccgctacggcctgggccaatggcccggcctgcgtgcgcagcacctgatggatgactacctgttcccggtcgcctcaccggcactggccggggtcgaaacgctggtcgatccggcgcgcatcgccgacctgccgctgctcaccgacctgtcgccgcagggctggcgcgactggttccgccacgccggcgtgcgcacgccgtcgccgctgccacccatgcacaccttcgccgacagcaccgatgcgatgcgtgcagcggtgtatggcatgggcgcggtgctggcgcgcacccacatcgcccagccctatctgcagcgctacgaggtggtgcgcctgcccggcccggcgctgaaggcgcgctatgcgtatcacgtagtgcatgccgaaggacaaccgcccagcccggccgcacgcctgttcatcgactggctgctggagcaggcgcaggacgaacgcacaccgattcccgcattgccggacagcctgctcgggcgcccggccacacgcgcctga

SEQ ID NO: 498907 - DNA, 1071 bp, Stenotrophomonas maltophilia
atgatcaagcccgacaagcctgccaacgaagcccttcggctccaggcgctgtaccgctaccggatccttgattcgcagcgcgagaagtcattcgacgacctggtggcgatcgccaaggcggtctgcggtacctcgatggcggcggtgaccctgattgacgtcgaacggcaatggttcaagtcgatccagggcatcgacgcggcggaaaacctgcgcagcgaatcgatgtgtggccacgccatcctgcagccgcacgaaatcatggtggtcgaggatgcgttgcaggacatccgcttccacgacaacccggtggtgaccggcgacccgcacatccgcttctacgccggtgcgccgctgatcagttccgatggcctgccgctgggtacgctgtgcgtgttcgatgcacagccgcagcacctgcccagcgacaaggccgaggcgctggccgcgctgtcacggcaggtgatgctggtgatggagctgcgtcgtttcgcgctcgacatccagaagcacatgctggaacgcgatgactacgagcgcctgctgtcggagtaccaggacgtgctgctggcgcagaatgccgacctggccgaacagagccgcaccgatgcgctgaccggcctgcccaaccgccgcgcgatggcggcggcactggaagaggcggtggcggagatcgatgggcagccgggagtagcctgcgtggccctgctggacatcgatcatttcaagcacatcaatgacttccagggccacgccaccggcgaccgggtactggccgagctgggtgtgctgctgcgttcgcattttgccggccgtggcatggccgcgcgctatggcggcgaggagttcgtggcggtgatgccgggcactgatctgcgcacggccgaactgcaatgcgagttcctgcgcctggccgtggcggatctgccgctgggattcccggtcacgatcagcattggtgtggcccagcaccagcccggtgaaagcgtggatgagatgctggcgcgcgccgacaaggcgctgtaccgggccaagggcaacggtcgcaaccgggtggagctggcgggctga

SEQ ID NO: 498908 - DNA, 882 bp, Stenotrophomonas maltophilia
atgggtagaagtggcacggaccagcagagccggcgggtgccgatgacccgtgggctgggattgcgctttgcgttgttgacgggcatggcgatcgggttggtcgcgttgtccgcgttgatccaggaactgcaggcagcctcgacggcctggattgccggccaggggtactggtcacgagggcagcaggatgcaaccgctgcgctgaaccgctacctggcgcgtggccatgcccaggacctggacgacgcgcgccaggcgctgcggattccattgggcgatctgcaggcccggctggcgctggaacaggcggtaccggacgaggaaaaggccaggcagggcttcctgcagggtggcaacgcgcgcgccgatatcccacgcctggtgttctcgttccgctatgcacgcgacatcggtgcattccgggaagcaaccacgctgtggcgacagaccgacgatgatctgttggccatgcagcggctggttgccgagctgcagtcggggcacgcccagggcgtgctggcagcggcggaccgcgaccggtacctgcaacaactgcgtgatctggaccggcggctgcaggtgcaggcgcaggcattttcccaagcgttgctgcgcatggccacgatggtacggatcgccacgcttgtggtcggcgggttgtcggtgctggcgatcagcctgatggcggtggccctcgcgcgccgcgtcggcaaggacctgaccgagcatgaaagccgcttccgtgcggccttctaccaggccaatgtcggcatgctcaagctcgacaccgacggcaaggtgatcgaagccaacaggcgatggccgacatcctcgactaccgacgcgacgtgctgctgcagatgtcgctcggcgatctgttga

SEQ ID NO: 498909 - DNA, 417 bp, Stenotrophomonas maltophilia
atgcttggaaaaacaacgacgcaatatcatctgaccgaagggcagcttaatggcccggctgcagcttcggcggtcgatggtctgtcaacgcgcgtgggatttgcgctccctgaaagttacattgaattcttcaaggcccacgatggtggtgaaggattcattggcgatggctacatcattttctggagagtcgaagaagtagtcgatttcaaccgtgaatatgaggtcgggacatatgccccgggaatatttttgttcgcttccaacggcggaggcgaggggtatgggtttgacacatcggatgtggcaatgccggtggttcgggttcctttcataggtatggatcgtcagcatgcgatcttggtggcgagggacattcccgatctgttcgctcagctggcagaacaggatggttga

SEQ ID NO: 498910 - DNA, 303 bp, Stenotrophomonas maltophilia
atggctaccagcgtaggcaaggccgagggcaactaccagggcgtcggccagcagagcggcttgtttgcaggaaacggtggctatcacgtggatgccggtcacgtgaatctggtgggcggggcgattgccagcacccatgcgggcaacagtgaactgactgcgggctcgctgacattcaccgacctgcagaaccacatggactacacggccagctccggcagcatcagtggtggtgcgggcgggcagatggatggctgggcgcccaagccgggaactgcccgatttgtctctcaaacaacctga

SEQ ID NO: 498911 - DNA, 1086 bp, Stenotrophomonas maltophilia
gtggtgactgccagcagccagcgcaccaacagcgaacagagccattcgaccagtgatgcccgcgtcagccagttggctgcaggcggcgatctcacgttgattgccaacggcggctcgatcctcagccagggcacgcagatgtcggccgagggcaacgctgtgctgctggccaccaaggacatcgtgttcgacgtggcccacaacaccgagcgcagcgacagcagcagccgcggcaagggctggggctttgccaacaacaccagcggcctaccgttcggtaccaacaactcgcagagccagggcagcggtagcagtgacaccatcactggcacgcagctgtcggtcggcggcggcgtgcgcatggccaccaccgagggcaacatcagcctgaccgcagccaacatcgccgccgagaaggacgtgaacatccgtgcggccggtgatctgcgggtccgcagcgggcaggatacggtcagcaacgccaatacgtcggacagcaaggcgatcggcacggtacagatatcggataccgagaagttctccggctggcaccgcgagcagcaccaggacgacagcgcgcaggtgtcacaggtggccagcagcatcggcagcctgggcggcagcgtaaacctggcggctggcgacaagtacacgcagaccgccagcaatgtggtggcgaccaaggacgtgaacatcaccgccgccgagatcgagcttttgaccgccgacgaaagcggccactactcgcagagcgacaaggacctgaagatcggcgtgttcgcgcgggtgaagtcgccgttgatcgacctgatcaacaacgtggacgcggcccgtcagtccgatgatcgcctgcagaagatgcagggcatggcagcgggcgccaacgcgtatcaggcagccagtgcgatctcggcactgtccggccgtggcggcagtggcgaactgttccgtgctgaagcaggcatcggcttcaagaccgccaacagcagtgccgatggcagcagcatggtttcgcgtggctccaccatccagggcggcggcaacgtcaacctcaccagcacccagggcgacatccatgtggtgtag

SEQ ID NO: 498912 - DNA, 618 bp, Stenotrophomonas maltophilia
atgctggcggcagcgctgctgcacgagcagcagaaagaatgtgttgaaggaagtagcagagctggctacagagcgtggcggacccaaagcatcccggacgtcgcggaaggaagtgcggacaagagccagttcagaagagggcggcgtgatgagtatgagcgatatgagaggtttcggggaagtttccgttcaggctgcatatgtgttgatgtgcgctttcctgcagaagtatgtagagagggggggggcgggaaggatactctcgttgatctattatcttcggcgggctcatttttgtgggcgaatggcttgcctaacgacccggtaatgtgggatgactggcgcgacgcatatgcagaggccaccaccgctgggagtgctcttaattctgaattttgtagagcgcaagtaaatctatcggacggacacttggcgttgctggatgcattctcggtgatgatggtattcctcgaagggatttttgatcgatctggtgaggatctccagctgttcgaagttgttggacgcctcatgtcgcctctaagtgattccggttgtctgaatgattcctctgtctgggttgagtgggtggggtcggttggaaaggtcagggcgtag

SEQ ID NO: 498913 - DNA, 429 bp, Stenotrophomonas maltophilia
atgccattgcgcgccatcgcctacgccagccgggcgccgccggacctgtccgccgagtgcctgcatcggctggtggaggacgcggcacgattcaacaagctggcaggggtgaccggcgtgctgctgcgtgacggcgagcgtttcctgcagtacatcgaggggccaccggatggcatcgaatcggtctacgagcgcttcctgcaggcagcaagccacatcgacaccaccggactggggcgcggccgcctgggccagcgccagtttccctattggccgatgcgttcgctgccggtcgacgcgtcgatgctgcgccagctttcctgcagtgactggtccggattctcccggcgcctgcagggcgatcgttcggcaccgacgccagtggacctgctcgatcaggtggtgcagccggcgctgcacgcaggctga

SEQ ID NO: 498914 - DNA, 456 bp, Stenotrophomonas maltophilia
atgatcgacgaattgaggggccactggcccgttatcgagcagcatccatgggacttcctgtgggttttcgttatcgggttgtcggctggatgggcagcgtccgcactgtggcgaaagctaacatcagagaaacaacccgcccctcggcagccaggcgcagttgccaagcttttgaagcgcgcaactgagcgtaagttcaagccgaatgggattcaacgcaactgcgttcagggcttgcgattccatgaccacaggcacctgacggtcgagcagctaagccaggtcatgcagaacaagtaccccgtttcagacgtccagcaggccttagagcaactggacgaacaggggtgggtgcattggcagatcagcgaagagacctttagacccgcctacaccctccagggcaagggacttgattacgcgagagagatgaatttccaagtgcgggccccatag

SEQ ID NO: 498915 - DNA, 192 bp, Stenotrophomonas maltophilia
atgcgctcttcccacggcttccgcaccaccccgatcccctctggctgggtccagaccggtgagcgctgggcgctctggtacaacggccgcgagacggccagcgtcacgccggatggcggttctggggtccggctatggatggaaggccagaaaatgtggcaggtgaagaaagtgcgcgccgccaacgtctga

SEQ ID NO: 498916 - DNA, 234 bp, Stenotrophomonas maltophilia
atgggcatcatcgactcgactcactatcgattgacctgcaaggcctgcggaaccgtcgacaccccatcggcgcatcaaaagggttctggttactccggggggagctggagtggcccggactccaaagtcttctccctgcggaccgaaccatcgtacggcgaggacgtcattaagtccgcgtcatgcccctgcggtggcgaggtagaagtggtcatcacccggactggtccctga

SEQ ID NO: 498917 - DNA, 258 bp, Stenotrophomonas maltophilia
atgatggccactgcctataccaagagcgacagtcggcgcgcgaccacggtccagccgatcggtggccagttcgcgtcaccaggtgacccactcaagggcatcgcgcccagcatgctgcaggacgatctgatgacagcagggcggctgcaggcccactacctcaatgagcagattggtcggcaagtggccggcggccgtctgctgatcggcttcttgcagcagggccaagctgtggtgaaggacctaggaccgatctga

SEQ ID NO: 498918 - DNA, 363 bp, Stenotrophomonas maltophilia
atgagcatcctcaatgttctgatcagccgtgaccagcttgtcattgcagtagatacgcttgcggaggatgcgcttaccggcgcccactctgctggtgccaagatgctcctgataccgcagcacaacgtgctgctggcggcgagaggtgcggcccagtttttcctgaagacctacgagctggtcctgcaggccagcttccgtgcggatttctccattgagaagctgtccgccgagatgggatctgtaatggaccagctatggctgaactacgagaaggccgcggcggaggctgacctgccaatcgaacagctggggggaccgagatcatcctgggcggttggtcgtcgggaagtggcaggatga

SEQ ID NO: 498919 - DNA, 1353 bp, Stenotrophomonas maltophilia
atgaatcgacgctggtggggcgtgagtgcattattcgttacggcagtggcttcagctgcgacagccgacacacccgagggtgaactgagcgatccctacggctatacccgcagcgtacgccgtgctgaactgggcgcgctgcaggcgatgggcaagacgcagggcgctaaggggctgcttggccagacaggcttctaccgtgtccgcggcgaaatcgaccgctccagcaaggccgccgagcaatgtcttcaggcggtggccaacgagccccgcgaacaggtaaaaggcatcgagtacctatgtgcagcctccttggcaggcaacttgctcatccggggcgatattgccggatgggcgacgcagatgatccaagttcgaacgctgctggaccgcgatatccgcccaatgctcaaacagcaagcgggcgacatccacctagcgggcatcagcgagccgcatttcgagcgcttcacagcttggccacgcactgccttggcggcacaaacacctccaagcgatatccatgttcccatccaattgcaaaacgaactgccgacactcagcctgaagatgcgcactaaggccggtgagcgcgagctgcgcgtacacgtggacagtggcgcagcgcattcgcgcatcgggcgcacgctggcagccgaactcgggctggaactcaccgaaggtttcatggttgccgatggaaaggctggggcggtgtatgcgctggcgtcgccggtgactctggacatcggaagtgttctggtgcgcgatatctcctttgcagtgctgggcaaggacgatctaccgcgcatcggcctggacgtgttgcgcgcgcttggacgggtgcgtatcaaccaaaacgcccttgtgatccaggccgctgccagcccggtgccatgcgcgcgacggatggcgacactatcctcgctgtggggcgatgcgtatgacgtccgctatccgatccgtgccggcaagcagaatgtgctggtcaaggtggataccggattcaacggtggcttccaggcgcgcggaacgctgcccgcccgcccaccggcagctgctatacggcgcaagaacgtgatcaccaccgaaggcagcgaagatatccagtacgtggaagcaaccacgccggtgatgattggcgacgaagttctgaatctcccgatggacataggcctttcacctgggcctaggccgttgttcaatcccgagtggcgcttgggttttgcttcaacccagcgttacagcctgtacatggatgttgctggcacctacggttgcccagttgccgttcccgaagcaccgccgctgttgccaccgaagccagttaccgcgccgcccaccggcgactga

SEQ ID NO: 498920 - DNA, 525 bp, Stenotrophomonas maltophilia
atgtccattcatcaactgaacgtttgtggctcagcacagatgctccgcgccctccgaggtcaactggaaaaggccgaggcccacgccaagaccctcggatatgatccgggcaacttgctgttagcgcgattggcgccagatatgcactcccttgccaagcagattcagttcgtatgcacccaagcccgtgaagtgatcagccgtctcggtggcaagcccctgccgacactccagccgccgagcgacatggacgaagcacgtgcgctcatagaccaaacgctggagtacttgaccaccagcgaagcggaagagatcgatgccggcgcctcgcgtcatgtcgtgatcgaactgactggtggccttgcattcgaaatgaagggcgatgagtacgcaacgaactgggcaacacctcagttctacttccacctgataaccgcgtactgcatcctacgccataacggcatccctctggggaaggcagactatgtgccccacatgttcgcgtggatacgaaaggacggctag

SEQ ID NO: 498921 - DNA, 156 bp, Stenotrophomonas maltophilia
atgaccagcgacaatagaattttcatgtcaaagcatgagacgttctcgcaaactctcatcaccaacaccttcccggtcggcggcgtgactatgggccctcagagggccacgatcttcatcgtggacctgacagaggtgccgctggggttcggctga

SEQ ID NO: 498922 - DNA, 390 bp, Stenotrophomonas maltophilia
gtgaccctagtcgggctccgcatacgacgagctgatggctacgtggagaccacggtcaccaccaagctgtccaagatgatcgggtcgtacagattcccgctctacaacccggtgaactccaacaacaaatgggtggcgccgcctgaggcgaatggcgggctcgtcgtcaatgatttctccggcggcgagcccttctactacttcacctgcgaggggcagcgatcggtgtacggaatgctggtcccctccgttaccgtgacaggcaacagcatcaactggtcctggggtcctgacgtggtgaactatcacgtcaggatggagatgttcttgagccagtcgatcaccaacaccgtgggcggcatcacccttcactacgggatctacagctga

SEQ ID NO: 498923 - DNA, 1617 bp, Stenotrophomonas maltophilia
atgaccgaactgtccaacatcgtggcggccgagcgccgtctggaactcctccacccggcaacccaggagccggtgggcctggtgctggttctgctgcccgacagccatctgcaggtgaaggccgcagcccgcaagtcgatcaacgaccgcatcagccaccgcggcaaggtgagtgctgagcagctcgaagccagccgcatcggcatgctggctgcctcggtgggtggctgggagtggcagggtgagctgaccttccacggtagcaagcccgagttcaacccgcagacgctgcagcagctgctgaaggaactgccttgggtgacgtcgctgacggccgcgtcgatggtgttcggtatccagttggcctgggcgttcccgcccggggcaaccgacaccgaacgcaccgagatctggcgcagcccgggaccgagtctggaaagcgcgacgaagctgggcgatttcgcctatccccagaaccggcaccggctcgatggcttggccgccggcgcgaagttctacttctggggccggctggtggatcgcagcggcaacattgggccgtggtatccggccggtgcaggcgtggtgggcgagtcgagcaccgacgtggccgagtacgacgcgtatttctccggcctcatcaacaagagcgcgctgaggcaggaactgctgtcggaaatcgagagcatcagcagcatcgtcccgttgatctgggacgcagatgccacgtatgaggcgggccagacggtggtgcgcaacggcaagatctggttgtggaccgacgcccaccccggcaatgaggaaccgccgggcacgaagtggaagagtgtgggcgatgctgtggccgaggccggtgcgttggttgggcgaatcgaccagctggagctggacgttacggagatcgacggcaaggtcaccgcggtggggaaccgtgtggacggcttggtcgcgcagtacagcgccgagcatgcgggcgatgaggactggaacgcaggtgatgaggactcgtttgcaggcacggtcaccacgctgacggtcattgccagtggcgactatgcgctgagccggcacgtggataccaccgaggcggcggtgggcgaaacccgggcgatggtgcaggccacctcgcaggctctggtcgacttggacgggcagatcagcgcctcgtacagcctgaagctgcagatcgccgccaacgggcagtactacgcggccggcatgggcatcggcatcgagaaccagccggacggcagctaccagagccaggtgctgttcaccgccgatcgctttgcgttcgtcaacctggtcaacgggcagctgacctcaccgttcgtgatccagggcggccagaccttcatcaaccaggcgctgatcggaacggcgtggatcaacacggccaacatcgcggatgcggcgatcaccaacgcaatgattggtggcgtcatccagtcagacaactatgttccagggcaaaccggttggcgaatcagcaaggacggtggtttcgaactgaacgggaacacgccagatggctacaagttgcgcgtagtcaatcaaggcgtctacgtctatcacccgaacggagttccagctgttgaagtgggggtcttgctgtga

SEQ ID NO: 498924 - DNA, 333 bp, Stenotrophomonas maltophilia
atgaggcttgatcgcaagggcaaccacgctcttgaactgaccgtatccagcgtggatccggattacgacaatcaacggcgactcatggtctgcctaggtcgcgtgtcgggagtgaagccgattgaggtccagtacacgcacaagcgccagtcaaagaaggagacgtgggtttgggtcacctgtacctgggaaagccaagaacttgcgtcacttggcgaagcgatggcgttcgttcgaagtgtgactattggcgacttaaccgacctgcagatcaagcctgactctgtggcgcgtttgaagcgaattgcgggaattgactggaaatcgatctag

SEQ ID NO: 498925 - DNA, 471 bp, Stenotrophomonas maltophilia
atggccgctgaagcaaagaccaacgcaggttccaagctcttcatctgcgtcacccccaagaatgccgacctgaccgaaaccgagttcgcggccctgaccttcgtccaggtgaagaaggtcggcagcatcggcgagcgcggcatcaacaccaacatcgtgcagtacgacacgctggacacgttggttgccctgaagggcaagggcatcaccaacgccggcgacccgcaggtgaaggtggccgaggatctgaccgacccggggcaggtggccctgcgcgccgcgggcgcccccaacgtcccggacgcctatgcgttcaaggtggaacgcgccgacggctccatcgagtatctgcggggtctggtgaccggtcccaacgtgcccggtggccgcaatgaggatttcatcctcaacaccttcaccctggcgctgaatcaggcgccaatcacggtggccgcaccgggcggcccttaa

SEQ ID NO: 498926 - DNA, 348 bp, Stenotrophomonas maltophilia
atgccgtaccaactcagtttcgctcctgcgtccagcaatgataatgattgtggcccgacctatgggttcatccttaacgccgacagcctccctggggctctttccaaatggattggggcgcaaggaacgatgatcgatggtcaagggaggctggttccaatacagctcggcgccgggtccaaagaatcatcgcttcggatcttgccagcagatggcagcgacaagcgagagcatgtgattgtcagtgtcagtggcgatctgggggttggaacgtcggttgcgctggcttggccgtctaacccttacaacccgctggcctacaagatcagctactacggcgaaatttga

SEQ ID NO: 498927 - DNA, 240 bp, Stenotrophomonas maltophilia
atgcgacctacgccacccaatctccatttggtcagcagcaacgagatcccgaacgagggtgagctgcaggccatgcgcgatgccatcacccgcatgaagcggaaccggcagctgctggacgagttctgcgctgagcaggcgagattcgtccgggccgagtacttggcttacgtggaggcgggattcacccggccgcaggccatgcaactggtgtctgcaaaactgtcaccgaaaaagtaa

SEQ ID NO: 498928 - DNA, 366 bp, Stenotrophomonas maltophilia
atggacgatattgctgcgctcaaaagcgagctgtctggtatcaatttggacgacgtctccgaggacgattccgcgtatctctctcaatgtcttgacacagttcgacacgacattgggttactccagaaaggcgaactggacgcaggcgcgaaaggacgtgtgctggctgctctggatgctctgaagattgcaatagatgcgtcgaagaggaagcgggctttcaagcgtgcggaagacgaggctaagttgaaattggccgaagcccagcgcaaccacgatcaggcagagaaggaagctaggaaggctgtgcttcacttgcatgggctgctcaccgctctctcgcaaggctccgatcttagaatttga

SEQ ID NO: 498929 - DNA, 408 bp, Stenotrophomonas maltophilia
atgagcgataccgcgatctatgacgcattcgccacgctggcggggcagttcgctgcggcgcagggcctggcctgctcctacccggggcagggattcacgccgcccaccggcaaaggtgcccgctggctggagctgcagtggttcccgaatcggaccgagaactacggcatcgaggacgatggcccgttcctgatgcaggggttcggccagctgtcggcctgctaccggcccgggcaggggatcatggtcggtaccgcgatgacggaccagatcatcgctgccttcgccaagggcacgaccttcgccggcatgcgggtggagaggaagccctggacgtccagcatcattcaggatccggagcgggtgatgcatccggtgaccataccttggcggggcttcactgattga

SEQ ID NO: 498930 - DNA, 426 bp, Stenotrophomonas maltophilia
gtggccaataagttcgggagccaggtccgcgctttcacggagaaggccaaggccatgcagggcgtgatcttccgcgagtcggccacgaagctgatggaggaagccggcacgccagagggacagggcgggaagatgccggtcgtcacgggcaccctgcgcaactccgttgcggcctcggtcgagggtatgcctacggatggggcacagccgccggaggtggtattcgccaccattgagctggggcagaccgtgtgggctggctggacagcgaagtacgccatgcgcatggagcacggctttcagggcgaggacagcctgggcagaacttatgcccagaccggtaagggcttcgcgcgcgcggcggcacagcgctgggatttcatcgtggccgaggtcaccgccgacgtgaaaggacggatgggatga

SEQ ID NO: 498931 - DNA, 171 bp, Stenotrophomonas maltophilia
atgaatggtcaggtacgccggttcggagagccgttccaaacccccagcggtgcgttgatgcggttccccggcgacatgtcgctcggtgccggtccggaggaaaccatcggctgccgctgcatgaagcaataccgcgttgacatggcggcggaggtgaagcgtggccaataa

SEQ ID NO: 498932 - DNA, 288 bp, Stenotrophomonas maltophilia
atggcccggcacatgtccgggaactgcgcctggtcgtacagcttcgccgcgccggtggcgttgatcggcttgaaccccagcagggccagaccgtcggcgctgatcgagagcggggcgaccctatcgctgcggcagcaggtgcgcgggcggtacaacccagccaacgacacgccgctgcttcggttcgggttcgacatgcgcaaccgtggcgtggagagctggctgcagtcgaattcctcgcgcctgatcagcggcgtggtggaggacgccacagccaccaggcgatga

SEQ ID NO: 498933 - DNA, 291 bp, Stenotrophomonas maltophilia
atggagttctggcgcaccagcgaactgcgggccctgcgccagatggagggccgcgacgcgatgaccgttgcggccgccctcgggcgctcgccccgcgcggtccaggacatggcccgctgccaggggatgccggtaccacgccagcctcacgccctgtactggccggccaccactaagcgccgcgcccggcagctccgggccagcggcaacaccgtcaaccagatcagcgccgcgctgcgcgtcgcgtttgggaccgtgcgtcgctgggtctacgaaggagcagcagcatga

SEQ ID NO: 498934 - DNA, 222 bp, Stenotrophomonas maltophilia
atgaccagcatccacgtgaagcccgtcttcagtggcgcgaccgatcgcgaaaaggaccaggcccggcagaagctggccggcgacatggcgcgcttcgaggccggcggcggtaaggtccagatcctgggcaacagcggcatcgacaagagcacgatcggccgccgccaggtggttgagggtggacactatcgccgcggtggcaaaaaggcagcacaggcatga

SEQ ID NO: 498935 - DNA, 258 bp, Stenotrophomonas maltophilia
atgagccgccacatcgaacgccgcgcgcccaaggagacgctgggcttcgcctggggccggttcccaaccttcggcggcagcgcaatcacgtggcgcctgtaccgccgcgaccaccgccgtgcactgcatatgcacgtgctgaccttcttcgcccatgacgatcgagttgtgatcgccggccacctgcggcgcgcgcgccgctacctgcgcgacaaggttgacgaaatcgacctgcaggcgatgggggtacacgcgtga

SEQ ID NO: 498936 - DNA, 675 bp, Stenotrophomonas maltophilia
atggcgattgagttttgtccgttggcggacgacgtaggaaacttggccgattgggctgcggtttttgtcggtgcgatagcagcgattgccactacagtggtggcagtgctcgcatacaaaacgtcggatcgagctacggacattgccgagaaggcgaaggacattgctgagaaggcgaaggacattgctcagcagcagcaccaagaggcagctgatctgcgagacgcccaggctcgtattctcggcaagaggctgcgccatgaagtgacccatctggcgctgcgtgtcggaggtcttctcagacagctcgactccgccgtgagcttcgttgggctgccacatattgagaatggcgacaagctggttggtatgctggatgaagcgtcgatgccactcttgcccggcggccgtgcggtagaggatcgaattcacaacctcccagatgctttgggtgctgatcttgcgacgttgattggcgctgaccagacattggaagagcgagttaggaacatgcgagctcgactgcatgccgttggcccggattcgccgtgggcgtatggaggagagactacggacttcctgatcctcaagaatcaccttgattggatacgggggcttgccacgaacgtcgctttgcagttcatatccttcgaacttgagggccgaaccgagtag

SEQ ID NO: 498937 - DNA, 267 bp, Stenotrophomonas maltophilia
atgacccaccaccgctgcgaccgcaggctaccgaagcgcaccgagggcttcgctcggggccggtccatcgacaaggtgctgggcggccacgtcctcacctaccgcctgttccgccgcgacctggccggaaagctgcacatcgagacgcggacgttccagctcaccgaccaccgccggcacatcgcgctgcagctgttgaactcccgccgccagttgttcggccgagtgaagaagatcgaccatcaggcgtggggagtgtcgacatga

SEQ ID NO: 498938 - DNA, 615 bp, Stenotrophomonas maltophilia
atgagcttcaactcgctcattcgagaccatcagcagcttcatgcgtgcactcgccgcagcgaatgctttggcagcaccttgcacgctattgcaaagaacctcgaactgctcctcctgtccgtctcgatcgttagcttgtcgaagcaagcgcacgttctcagcacacaggtcagtaagggcaagccccatcgccagctgctcacaaatttccgttggaaggagattgagtcgcccaatctcttttttcgaccttaccagacctggaccggcagccaaacgctccaacttgtccaagttaacttcgctttctactgcccattcgagcgaattccccgtgacaagatgttcgagaagatctgcataggatatcgctgcagaaagcacctctgcgtaaatgagcgcgatcaaaaccgcctgatcacgacgtcggacctcatcgtcacgctccttcatctgccgagcgagttcgtgcgatgcgctcgccttcgattcgcagctttcgtaacgagccaaaccgcgacagctccagcagcagctactccggccgcaatccaatccgcaacgttgccccaatctgctgccagcggacaaatacccatggccacacctccttga

SEQ ID NO: 498939 - DNA, 252 bp, Stenotrophomonas maltophilia
atggctgaggcaatcgaccaccgcgaggtcggccggcagctggccagcatgtccggggtcgagctcgactcgatcgccccccaggacgctcgtctgtgggaggcccgcggccacgcacttcaggcgctcgctgccggcgacatggacgccgcgctgcgaaccatgggcatggtgtcctcgcggatcatggaccgagacgaagcatgggagatcgcatcgaacgcggtagccgtccgcattgctgccggctag

SEQ ID NO: 498940 - DNA, 228 bp, Stenotrophomonas maltophilia
atgctggacagcagcaccgaggccggccgcgcgccgtgtggtcgcggctactacctgctctgctccggagccatcgcggtctgctacttcccgatggttttcatcaccgacatgaacggccgcggctaccacttccatgtcgcccaggacctgctcaacgagcgagatcccagcccctacgccattcgtcgtccgaccgtgccgcagcaactggagatgttccgatga

SEQ ID NO: 498941 - DNA, 312 bp, Stenotrophomonas maltophilia
atgatcgcccaggacacaacgcacgtgcctgaccccgatgaggacgagtacgaccgccggcgcctgccgggtgcgtactcccaaacgctccaccacatccgggagctgcgcaaagagcgggacgcattgctactgcgtagccacgccggtgaccgatacaggtccgcccagcactcacggttcatcaggaacagcgagaactatgccgcgcgacttctggtgcgaatgcagcaactcgggatgggtggatccggagccgcctctatcgcgccactaccggcactgccggcccaactggacctgtttgcatga

SEQ ID NO: 498942 - DNA, 990 bp, Stenotrophomonas maltophilia
atggtcaaggtcacaatcttctggcacgatggcgccgcgtacctcaactggcgggaaggcggcaagcgaagccgtgtcgccattggtcgcgtcagcccacgcgaggctgagggcgtacgagcagcgaaagaagcggaactgacccatggtgtgcgcatcctcccccggctgcccactgtcaaggatttcttggaggcgtacctggactggtacaaggcggaacacccgaccacgcacgggaaggcaaagaacgaggtccgactgttcattgctcgcttcggccatcgaccgatcgacaccctgcgcccgatggaaatggagtcatacaagacagatcgcctgaccaaggacaaggtggcaccagagaccgtgggcaaggaagtgcgtaggctgcaggccgcgttccggcgtggcgtgaagtggaaggaactggacttcaacccgctggaggaaacccaggcaccgcgcggcgtccgcagcgtagcggtgcggttctacgaccgggccgcgatgcgcaagctgtaccgtgcgaaccccggtcgggcgcctctgtggcttttcatggcccacacgggtctgcgccgtggtgagctggttggactgggcaaggattcggtggcagggagcagactcagggtcgagagcgagccagacgaagatggccaggggcgcacgaagtcaggcaagtggcgcgaggtgccgcttaaccggtatgcgcgctgggcgctgcgccgcctacccgatccgctggtggccgtgcacaaagacaccgtatccgactggttcgcgtccaatgccaagcgggctgggatcggcggcagcctccaccgactacggcacaccttctgcgcccacatggtcatggccggagtgccattgcgacgggtgcagattctggccggacacgctgattacgccacgaccgagaagttctacgctcacctaactcctgagggcgacgatggcgccgtagcgaagctcaaatactga

SEQ ID NO: 498943 - DNA, 3120 bp, Stenotrophomonas maltophilia
atgacgttgcgcgccgaacgctccaaggtctccaccccgcttttcccgttgcgccctgccgctgccctgctgttggccgccctggcctccagcgcacaggcacagaccctccccccgcgcagccaatggcaggccagcagttcctcgcagcaggtgccggcgatggcaatcggccacctgatcgacggcgacccgaagaccgtgaccggcggcgccttcagccccggccactggttccagatcgacctgggcgcacccaccctgctggccggcgcgcgcctcacctgggatgtctccaatccggaaggctattcgctgcagacctcactggatggcacgcagtggcagaccgcgcacacgatggccgattcactgggcgatgtggaaacgctgtacttcgcgccgcggcaggcgcgctacctgcggctggccagcccgcagcgaacctccgactggggcgtgtcgatcttcgagatggagccgctggacagcacgctcagcgcacgcatcagcggtatcgatgcagcgcaggcagcagcgctctggcaaggcggcggcaccgtcccgatgccggccgggacaaatggatcccatgcgttagagatcacgctgccgcaggctcaatcgacggctggtctggtggtcgactgggctgatggcagccgcggccctgcccgattgcaggttcaggatgcacagggccggtggcaggacctcgcgcacgatgcgcaggcggccagccaccgccagagctggctggccgccaatgccgcacaggccgtgcgtgcattccgcctgagcgtggatggatctgcaccaaaggtggcacgcctgcgcctgctcggcccaaaagccgtgatgacaccgatgaagcagtatcagatcgccgccagcggcgcggagcgcccgttgttcccagcctcactgcagatgcagcagacctattggacggccgtcggcgtgcacgcaggacgacagaaatcgatcttcgacgagtacggaaacctggaagccttcaagggcgcgccgttggtgcagccgatctggcgcagcgccgacgggagcactgcgggtgcggccgggcagaacgtgcagcatgcattgcgggacggctggaagccgatgccctccgctacctggtcaccgcaacccggcctggagctgcgcagtgaagcgttcgccatcgagcgcaacggccagccggtgaccttcctccgccatcgcctgcacaacaccagcggcaccaggatcgacggcacgctcagcttggtcgtgcgcccgatgcagatgaatccaccgtggcagaacggcgggctgtcacccatccgcgatgtggcgatcgatggacaggccgtgcgcatcaatggacgcacgctgctgcagtcgctcacgccggtggctgcgtccggcgccgcgccatttggcagggatggcgcaacggaaatcaccgcggacatcgctgccggccaactgccttccgcgcaacaggcacgtgatgaccagggtcttgcctcgactgcgttgaactaccgcgtctcgttggcgccgggaaccagcgatgccatcgtggtcgcgttcccgctgggtactgccaccgccgatagcaagggcgcactgcccgaggcgcccgcgctcgatctggccacgctgccccgcgatgccaatgcggcgttcgattcactggccacgcaggcgtccgcggactggcagacacggctgggccaggtcggcctgcgcctgcccgatccttcgctggtggacatgctgcgcgcgcaggccgcctacatgctgatcaaccagaccggcccggctatgcagcccgggccccgcaactacaaccgctctttcatccgcgacggcatggccacctcggcggtgctgctgcgcatgggcgaagcccgcgtcgcgcgcgattacctggcctggtacagcgaacacggcgtgcatgccaacggcctggtctcgccgatcctcaacgacgatggcagtgtcaacaccggttttggttcggacatcgagtacgacagccagggccagtacgtgacgctggtggccgatgtcgcgcgcctcgatggcgggcccgagtcggtacgtgcctatctgccgaaagtgaaagcggcgctgcgcttcctgcaggaactgcgcgagcgcacgctggtgcccggctacaaggccgaccagccggcgccgaagcgattcgcgggcatccttgcgccgtcgatcagccatgagggatatccgtcgcccacccacagctactgggatgactactggggactgaagggctggcacgacggcgcgtggctggccgagtcgctgggcgaccatgaaaccgcccgttgggcgcgcgaacagtacacgctgctctacgacgcgctgcacgcctctatccgggcgacgatggcgtggaagggcatcgacttcattccctcctcggccgacctgggcgatggcgatccaaccggcgtatcgatcgcactggaccccaccggtgcgcagagcgtgttgcccgccgaggcactgcggaccaccttcgcgcgttatctggaggatgtgcgcaagcgcagccagcccgatgcgctgtacgcctatacgccgtatgagatccgcaacgtgctgagttatgtgcacctgggccaaccgcaggttgccgatgagctgctgcagggactgctgcatgatcggcgcccgcttgagtggcaggtactggccgaggtcgtgcactcgcggctgcgtttcccccgctacctgggcgacatgccgcatacctggattggtgccgagtatggccgcacgctgttcggcatgctgatgcgcgaagacgatgatgcattgtcattgctgccgggcacgccgccgtcgtgggtggcgggcgatgggttggcggtggagcggctgccgaccgcgtatggcacgttgcagatgcaggcgcggcagcgcgacggcatgctgacggtcacgctgggcaaggggttgcgcagcgggacggcattgaaggtctggtggccggcgcgcaccatgccgaagacggtgcgtgtggatgggcatagcgtttccgacttcgatgccgagggtgtgcggctggcaaagccgttcagaacgctggaggcgcgctggtaa

SEQ ID NO: 498944 - DNA, 909 bp, Stenotrophomonas maltophilia
atgagccaatttcccgcaccgtgcccgatctgcgagaccgagggggcgatccatacccccaatgggggtgccaccaatgtgaattgcccggcatgccggttattccgggtcagcggaactgccgaagccatcatcaagaactggtccagtgataagaaaggctggctgtctggtcgcgctcgacgacattgggcgagcacgcacaggcattacgtaattgacagcaccctcctcgacgagatcgatggccccgagctgaacaccgtcccgagcaagcagaacgctcttctggtggacattgcggctgatagcaagcaccccggtgccggtgttatgaggggcctaaacgatatacatgccatagacgccagtaacatcaccgaactacgctatcacatccgctctcttacggaacggggtctattaagcggcgcaaacatgacatacacgataactcccgctggctgggagtatctggaacgactgaggtttcccgtaggaggaaaccgctcagacttctttgtagctatgtcgtttagccccgcacttcgcgacgcctacgagaatggcatcaagcccggggctgaagcagcgggatacaacgcaagacgggtagacagcgtagaccacaacgacaagattgatgaccgcatcatcgcgggcatccgtggttcgtacggagtgatcgttgatgttacgacgcagaatgccggtgcgtattttgaggctggattcgctctcggcttgggtcgccccgtggtgtggactgtccggcaggacgacctccccaaactacatttcgacacgcgccagtttcgccatatagtttggactgatgaggccgaccttcgcgagcagcttacaacacacttgcttgccgtgttcggacgcggacctgttgccccttga

SEQ ID NO: 498945 - DNA, 135 bp, Stenotrophomonas maltophilia
atgcagcccccgaagccttttcgtcgcatcctccacttccacgagcaactgatggtgcgcacccgctggtatcccatcgcggtggccttcgcgctggtgtgggcgacggctatggtcaccaagtccgctctgtaa

SEQ ID NO: 498946 - DNA, 1242 bp, Stenotrophomonas maltophilia
atgccgcgtaccgtcgcccctctcaccgataccgccatccgcaaggccaagcccggccccaagccgaccaagctccgggacggcggcggcttgtacgtacagctcaacccggatggttcgcgttggtggcggtgggactaccgccgacccgtgaccgggaagcgcaacacgctcagcttgggcacctaccccgaagtctccttggccgacgcacgcggccgccaagctgaggctcgtcggctcctggcatcaggcatcgacccaggcgaacaccggaaggccgccaaggtcgccggagtggaaaaggccgccaacagcttcgaggtggtgacccgcgaatggctggggaagcagaaatgggtggagtcctaccgctgcaaggtcgtcgcctggatggacaacgacgtattcccgtggattggcgggcgtccggttgcggaattggcggcccccgatttcctgcgcgtggctcgccgcattgaagaacgcggagccatcgagtcagctcaccggatcatgcaaaactgcggccaggtcatgcggtacgcggtcgccacgggacggactgaccggaatccggtggccgacctgaggggtgccctggcacctcctatggaacggcaccatgccgccatcactgatccacgcgaactcggcgggctgctgcgggccatcgacggctatgctggcgatgcgagcacccgcgccgccctccgactagcaccgctggttttcgtccgtccaggcgaactacgccatgccgagtggtcggagatcgacttcgatgcaggcgagtggaacatccccgcgcacaagatgaagatgcgcgagccgcacctcgttccgctgtcctcgcaggctgtggcgatccttcgcgacctgcaaccgctgacgggccatcgccaatacgtgttccccggtggccgttcgcccaagcgaccgttgagcgataacgcgctcaccgccgcgctgcgccgcatgggtttcgacaaggaaaccatgacggcccacggcttccgtgccactgcgcgcacgctgttggacgaagtgctggggtggcggccggacctgatcgagcatcagttggcccacgccgtccgcgatcccaatgggcgtgcctacaatcggacgagccaccttcccgagcgccggaagatgatgcaggcgtgggcggactatctggacgccctgcgcgctgacacgggaaatgtaatcgtcccgttcaagccgaaggccgcttag

SEQ ID NO: 498947 - DNA, 1194 bp, Stenotrophomonas maltophilia
atgattaggtcgttgaaattcaagaacttccagagcttcctcgaggagcagcgggtgacgtttgagctacccaagggagcttccttcagcggctacgagcgcaccactgccgacggaagccgtctgtcaacggtccttgcggccttcggtgctaacgcttcaggcaaaacggctctactgaagacggcagcttttcttttctggtttatgaagagttcgttcagcttagatgtcgatgcagaaatccccttgccgcctcgtctcctctcgcccgatgatccatccgagttcgagttgatctttgacgacggcaatggcgatacctggaagtacgaattgaagctaacggaaaagagagtgctctgggaggcgctctaccgaaagcaggttcgcttcaactaccagtttaagcgggcgtgggacgaggaaacaaagtcctacgacgtacagctaaggtctttcgatcttcctagcacgcttgccaagaaggtgagggagaacgcctctctcgtttccacagctaggcaatacaacagcaagtccgtgtccgccatcgaacgctacagggcccacttcaacgttgacgtcagtggacgtccgcattacaccaagaatcttgaatacgcaaatttgatgtacaaggccggaagccctatccgagatgaggcaatgaaaattcttcgtgcctgggatctcggtcttgagagcgtcgacgtaatagaagaatcaagaacggacaccgctggccattcccaagttgagctgaaaagcaagttcgttcacctccgcgccgacggcagcacgttcgtcctgcctttcgaggtcgagtcgaacggcacgcagtcggcctatgtcttgctggccatactgatacccatcctccaatcgggcggtatagccatcattgatgagatggaaagcgatctacaccctcacctgctcgattctcttctgcagctgttcaactctgaggtatccaatccctacggcgcccagctctttttcagcagccacactacgaaagttctcgactacttaggcaaagcgcaaacctactttgtcgaaaaggttgattgcgtcagcactgccttccgtggcgatcaggttcaaggtctgagaagcgacgacaacttgcgagcaaagtacgaatctggcgctattggcgcgctacctgaggtgaggagcgatgtctag

SEQ ID NO: 498948 - DNA, 270 bp, Stenotrophomonas maltophilia
atgaacacatatgaccgccttcccgtgcgctaccacgtgcacctggacgtcgccggcgcattgatcaacatgactgacaaggagttggacggactcttcgagcgcgttccggccggggagccgctgaacgcgactgaagctcgccgggtgctggcggtgcacctggccaacggccgccacgtcatcccgctcgctgcgtgcgaaggcttcgactacggtggcaccggttgccctggccatctggaagcaccagaggtggcccatggctga

SEQ ID NO: 498949 - DNA, 273 bp, Stenotrophomonas maltophilia
atgagccagatcatcgtcttcccgcgcggccagctgactgctggtgatcgcaagcgtatggctgaggcaggaatcgtggccgtcgaggcggacgaccccggtagcgtggtcactgtggtgccaggcgcaccgctcgccagttcggacgacctggccattgcggcgctgtctgcaatcgccacatgtggatgggatgaggtagccggcaggttcgtcaaggcgctgcacggccggctcgctgctcgcgaggctaaggcggtaccccatggctga

SEQ ID NO: 498950 - DNA, 597 bp, Stenotrophomonas maltophilia
atgagcaccgacgacaaaacgacggcgggcgtgcagcccgctgagagggtgaggctggggtatcaggccgagcgggcgcggtttgatgaattcctgagcaggaatccactcatggccctgtgcgcgggtacggcatggcaggtttggcaagccgccctatccgcccagccctccctgggtggtcaggatgcgcgacgctgtgccgaccactgccagaacgggcgcgccgatttttgcctcgcctcccaacgtgacggcgtgatctgccccgaggacagctgcgacattgacgacggaatccgtcacaaccgcctcgccgcccgccagcggctgaatgggctttcatgggctgactactggatggggcgcggacaacccgcagtggcccacgacttcgatgccttttctcgcgctgaggcctgggcgctccagcgcttccacgacgcgcgccggcctgtggacctgaccgcagcccaggctgtcgccgtgtacgacgccgtgacccgcaggaacttcacccgggacgtcaagtcccccgaggacaaagcccgtacggtgaccgcggccctgatcgacagcctggcggtggacatatga

SEQ ID NO: 498951 - DNA, 669 bp, Stenotrophomonas maltophilia
gtgcgtgagcagcccatcctcttcaacggccccatggtgcgcgccatcctggctggccagaagacgcagactcggcgcacgatcaaaggcataccttggcgtcctggctgcaacccagatttcagccaggcctgcgcattctccaatgccggcgagttccgcatcgcgggcagtcaggaaatgaccaccggcttccggtgcccctacggccagcccggagaccggctgtgggtgcgcgagacatggcgaccgcagaccgtgcacagctgcgcgatggacgcctgtgactgcgacagcgtgggcgtgaccttcgccgctgacggggaatgggtactgcacacctggtctcagaatccggtgccggacacgtggtgcctgcccgacgctgcagcgcgcgggaacctgccatcgatccacatgccgcgctgggcctgccgcctgctcctcgaaatcgcagacgtacgcgtggagcggctgcaggcgatcagtccagccgatgcccttgccgaaggcgccatggggtgggccagggagcagacctcccccattcgcgacctggacacaggtgatgaacggatcgccttccgtgcgctgtgggacagcgccggcggcgactggaacagcaacccgtgggtgtgggccattaccttcaagaggatcgacgcatga

SEQ ID NO: 498952 - DNA, 222 bp, Stenotrophomonas maltophilia
atgctggccatgacctcgaaccatctgcgaacggtacctctgaccaagaagtcccaggtatcggacgtgctacacgccggcggccgcatcgtcgctggccaccggcctggcctgctgcagttgctcgacgccgagggccgcccagtccccgcctggcaaaccgccctgaaggccgctcagctctcggccgcaccctccggagattcccatgaaccgcaatga

SEQ ID NO: 498953 - DNA, 240 bp, Stenotrophomonas maltophilia
atggctgaccgcaaacgcaacttcgcgctcgagcagcgcctgcgcttcatcgacttcctgctggaccactacggccggctcaaccgcggcgccctcgtggactacttcggcatcagtgtgccgcaggcaagcattgacatccgaacctaccaggagcacgcaggcgccgagcagatgcggtacgacctttctgagaggtgctacctggctgagaaggggtttaaacgatgctggccatga

SEQ ID NO: 498954 - DNA, 228 bp, Stenotrophomonas maltophilia
atggcaaagaaactcctgtccttgcacgtcaagggcaagcacaaatcctggagcttcgagttcatgggcgaccccaagcacatccccgactgggaggcggatggcctggaggtgtgggaggtctgcaacgtcgtccccgcatggattgctgacctcggccttactcggccctgggtcttcctccaggacgtcttcaacttcaagaacccttggagtcgcaatggctga

SEQ ID NO: 498955 - DNA, 252 bp, Stenotrophomonas maltophilia
atgcattcgatcctcgtgaccagccaccgtccattcctcaacatgctcttggccagcctgctgagccagtcgcggtcccaccccgtagcacccgcagcacctgtgcgccgcatgccgcaacgacaccgcaccacctgggcaccggcgggcggcggccgtgccgagcgcgcccgccgcatgcgccagatccaggctggcaccttgaacgcatccagcgggctgaccccgatccacaagggtgagcggccgtga

SEQ ID NO: 498956 - DNA, 249 bp, Stenotrophomonas maltophilia
atgaactcggtgaccatgaccgtcgacgcggagatcgacctcgatgacctggtcgggaatctgggctccgccagcaaggactaccttgcccgcctcctgaaggttgaaggcgagaccgcgcgcgcccctgacggccgcaccttcgagcagatcatcgaagccgccttctacgaggcccgcgccatgtccccggtgccgccggcactagccgacctgttctgggtagtgcacgggagggcgatgtcatga

SEQ ID NO: 498957 - DNA, 129 bp, Stenotrophomonas maltophilia
atgaggacggaggaaatcattgccgaggctaccgcggtcctgttccggcgggtcctggccatcggcggcgcggccggcttcgtgctgggtgtcgtggcagccctcggatcccgggcggtgctgtcatga

SEQ ID NO: 498958 - DNA, 264 bp, Stenotrophomonas maltophilia
atgagcgccgtggccgatgtgctggcggcgaagctggccggccgatgtgcaaacggcctcgagcgcggacagggcaccaacctgcatgcgatccctgccacccaggtgcgccagcacggtgggttcgtcgaagccaccggcaaggctctgtgcggagcagaaccgggccgccgatccgtgggctggaccgcctgcgaatcgcatcctgtgacctgccctcgctgccgacgcgccctcgcgcgcggcaagggcggtgccgcatga

SEQ ID NO: 498959 - DNA, 294 bp, Stenotrophomonas maltophilia
atgacggacagccgcgcacaggagcgcctgctgatgttgatgctcggggcactggatgcccacaagtgtgcgatcgaggcaatcatcgcttcgcaccccagaccagacgtgctacgcggcatatggcaccaatcaaaaccggaatggatcgatgactccgagcgcaagaacgtgttccgcagcaaggactttcaggaaggcttcgtgaacgcgctgggtgctttttcgcagtcgattgaccagtcggaagcgatatcccggcccggtggcccagaagcgccgagtaagccgtga

SEQ ID NO: 498960 - DNA, 294 bp, Stenotrophomonas maltophilia
atggcccgtcgacacctcagcaatcctcgcgaaggggagggccaaggccacgggcgtgaaatccgtgagctgcgcgcgctgcgcaatcaggtccgggacctgcagcgccaggtcgatgagctcacagtttggcgcgctcaggcggaagccacggcgcgctgggccgcggcgacactggcggcgatcaaggcaggccgctcccggccgttgacgaaagtccggccggccggactatttacgcgtgccgccgcggtactgcgcgccttgttcgctcgaggcgggcgcaatgagtaa

SEQ ID NO: 498961 - DNA, 396 bp, Stenotrophomonas maltophilia
atgacccctagtgagcttgagcaacgccttgcgacgtacgacgaaaaaatcgcttcccttgaaagggaggtgatggcaacggaaaccctcgtccagctgcttattggcagtcatcacgaaccatcggttctcctttcctacgttcaggcgaccatccaaacagcgcggacaaaaaacgtcgcagccagcaagcgcgccgcactcgaccgggtgattgcacggcttgaggatgtcgagaagaaggttcaggcggcgaaggacgatagggagcggacccgtcagaacgcggcggtggaattgcagcggcaacgggctgcccaagaagtacagcggcgtgaggcacaggcggcacgcgatcgggaaaatgacgaccattcccctggcatgggcatgtga

SEQ ID NO: 498962 - DNA, 339 bp, Stenotrophomonas maltophilia
atgagtggctggagatccagcggtcacacggcgggcacccgagtcgatctcagtgcggtggccaccaccgatctgctgagggagatcgagcgccgttgttcgacggcagggccgcccaaggtcgcccgccccgcgaaggagcggccattcgcgaccaaggcgctctgggccgaggacaaggtcactcaggcacgagccaagcttgcagatctccgcgcgctgccggtgccggcctgcgacgctgagctggccgctcgcgccgctcaggactcccaactggtcaccgacatcgtcaagtacgacggcatggccaaggccttcgcgaggaagggtcaatga

SEQ ID NO: 498963 - DNA, 504 bp, Stenotrophomonas maltophilia
atgattgagacggtactgggcatgacggacttgcagatcaaactgttcaccgcgctgggccagattttggtcgcggcggcggttggcatggttgcgctgcgccagtggcgtacagctcagcagcaagccgagacggctcgcaataagctccggctggatctcttcgagaagcgcgttgagacgttcgaccggattcggcgacttttggagataaactttccgggcgtacccaatgaggaagtatcgcgggagctatgggatctggctggaccttcgggaaagattcgctggcttttcggcccccatgtccagcagcgtttcaacgacgtggttctgcagaagctccatgctgcggacaaggccagtatcgctgcaatgtccgcaaccaacttggaggagttgaagcagttgaactccgtccgggatcaggcaaaggaagagctttcaatagcgttactcgctgtctcagagatctttgcggattcactcacgctacttgactag

SEQ ID NO: 498964 - DNA, 432 bp, Stenotrophomonas maltophilia
atggatgctttaagcgagaatgttctaatcggcctgggcacagggctggtaacgggattggtcacaggcttgctgtctggttactacgcaggcgtagtgatcagcaggacgacgcggttctacgcgttgatgagggatgcccagagggcgctcaaaaaggtcgactatatgcaggaggagaggagggtctctgtaaggttctgggagccgctggtagtgggcgcgatcgcagatgatctagcgaccgaccgacaagtggcagccgcgcgggaagtgcgattacaggccaagaacatttccgaggcagtgtttcaagggtctcacggccaattgagggtaaaggagtttgagggccaaatcatggaggcgcggcagaagattgccaaattgcgaccttcaaagcgcgttttgcttccttgggggccgctatga

SEQ ID NO: 498965 - DNA, 681 bp, Stenotrophomonas maltophilia
atgagttgctgggccttgggcattgattggccggtgatcacgcaggggtttggtgcggttgcccaggggggcggcgcccttgtgctggcctgggtaggcttggcaggcctttcgtcatggcgaaagcagctgaaaggaacccgtagccaagcgctggcggaagaaactctgagtttggtctaccgggttcgagacgcgatcgatcacatccgacagccttgggcgtttaccggcgagatgaataaggtcgaacgtatcgccgatgagacggatgcgtcatttgaggggcgaaaacagtacggcgttgtcgagattcgataccaggcgcacgcggaaccggttgctcagcttgaggcgattcgctatcgggtgagcgccgtcttcggtgaagagcaggccaaagcggtggaagatgtcctagatgtcttgcgtcgagtacgcaacgaagcggcaaacgccgtgaggcacaaggcgctggttcaacagcaatccgccaggcttggcagggatccagtcggccagtccctcaagccttatgaaactgcgcgttcctacctgaccatggccgagtcttggatctgggctggtgaggaaggcagtgatcccgcagcgaagaggcttgctgaggctgttgcaaaggctgaaaccgccttgaagcacttcgccatgatgaagtcttga

SEQ ID NO: 498966 - DNA, 375 bp, Stenotrophomonas maltophilia
gtgatcaccagggcggccgtctctgcctggtgggcagcctggaagtgggttgccgttctggccggcctgttgaccctgtcgctgtcgctcaacgtcaggcagtacggcgatcggcgtgaggctgcagctgcagcgcgggccgccaccctcgaagacacgctcgaggtgacggccggaatcgcgcgccaggtccaatccgacagtggccagctgctgcagcgcttggaggcgatcgccgcgcgcggtgagcggacccgaaccatctatcgagcagcagctgctgcgcagccgctgccagccaactgcgccccgggtcaggcccgggtcgacgccatcaaccaggccctcgggccgaccagcaggaccgcgaagtga

SEQ ID NO: 498967 - DNA, 285 bp, Stenotrophomonas maltophilia
atgttgaaccagcaagccggtacaaccccactggcggacccgcagaccccgatcgaatccgctgtgaaggatctcgcgcgaacccagcaggacctgcacattgccgtcgagcagcttgcattgcgtctcgcgccggtgctggccgtaagcaaaccggatgctgcaccgtccacgggccgcgcactcggtgcctcgccgttgctcgaagacctgttccagcggcgggacgcagcggcggccaccctggacatcatcaccgaactgcactctcagctgaccctgtga

SEQ ID NO: 498968 - DNA, 975 bp, Stenotrophomonas maltophilia
atgggcattcaaacaccgctcattctcaaccaggctgctggacggatcgaagagctggcggtcggtgatacgttgtccgggctgctcgtagatggctatgccggcgggaacgctctgctcaacggtgatttcgacgtatggcagcgaggaacgtcattcacagtgagcaacgtctactcggccgatcgctggttcatccagcaagggggcgtgtctggtcagtccgtggtgcagcacgttccgctgcccggagagagcaatttccccgacagtgtctttaccctcaacgtgaacatcacgggtaacagtagtgcaaccggagcgttccagacattcgagcagcgcgtcgaagactgccgaacgtttgccaacaaggtttccaccctgagtttcaaggttttcaacgcgggggccgccggtcgcaaaattgcggtcgagttcgcacaaatattcggtgcaggcggctcgccggcgatcctgggcattgcgccgcaggttttcagcctggcggccggcatgaactacatcgtcaagaccgtgacgctgccttctgtcgcggggaagacggcaagcctcgggcacgccgcagtagtcatcatctggagcactgcgggatccgatttcaacagccgaaccgcagggctcggtttgcagaccggaggtctctacttcagcaagatgaagtgggaggctggttcggtggcaactccctttgtcagacgtgacccgggcgtcgagctactgctgtgctatcgatatggggagcctgtcggcttcatcgccaatgcgctgggcgctgacttcgccacgttctcctacaaggtgcccaagcgagttgttccaacgctcacgttgcttggcaactccatctccccggcgaccttgaacgcgcgcgggtccacgacctggttcagtatggatgggcgcgcttcgtcgtctgtttccagctactgctttgcggacgcggagatctga

SEQ ID NO: 498969 - DNA, 474 bp, Stenotrophomonas maltophilia
atgtatcagctgaccgcagatcccaccgttgtctactgccccgaacgccagtcgtggatttctgagggaacctggctgtgggaccagtatcagcagtggctgatggagggcaacaggcccatgcccattgggcccgcctacgtgctgtactcgccggagcacttccgggcaatccgcgatgcagcgttcacgtggatgaactccgaggtgaaggcgcgcggatacgatgacctggccaactgcgccagctacttcaacagcggcgtggagcggtatcgcttggaagcgcgggcgctggttgcttggcgcgacgcagtgaatcaacggctggagcagcttgtacttgcgccgcctacaggcatcgagacctgggagcaggtgcgtccgctcctgccgcagcctgaagcgttcccatggccggcgagtgtagagctcccgctggaggctggtgacggccccactgcacaactttga

SEQ ID NO: 498970 - DNA, 564 bp, Stenotrophomonas maltophilia
atgctgattgcatgcaagttcaagcgcccgaaagcgcccgttgagctggacggcactgtctacttcttcgtgccgatcgacccggccaatgccgattcggagcacgtcgccgacgtcgaaaactccgaccacatccagcggctgctgggcattccggaggcctactacatcgcccgggcccagagcctgcggaccaccagcaagccggtagcgccggtcgactcggccgcaggccaggaaccgccaacggcgccggttgtaagcagcaccggtaccgatgccggcggcgatggctcaggcgccagcaccaccacgagcgccgacaccggcagcagtgagccgccggcaggcgcgaacgtcgcagctacgctgccgccggagatcgtcgaagcagcggcccaactgaacggcctgagctggcagaagctgaaggccgagttggccaagggcggcatcgcaaaggtcgtgatcaaggccgccctcgatctggagctggccaagccggagcccgaccagcgcggcaccaccctgaaggtgctgagccaggcgctcgaggaagcctga

SEQ ID NO: 498971 - DNA, 681 bp, Stenotrophomonas maltophilia
gtggaggcgcgcaccctcagccagttgatcgaggaatgccgggaagagctcgacgacgacgtggctccctacctgtggagtgacgccgcgctgacccgccatctcaacgaggctgtggaagaggcgtgcattcgggcgcggctgctcgtggagagcggccgccccgatatttgccacatcaaccttgagcccggtcgggctgactacacgcttcatccgaccgtgtacgtggtccggcgcgcggtgctggccagcaacctgtccgacccgctctgcaggaccaccagcaccgcactcgacggacggcactgccactggcgcaccgaggcagggcgcccggagtacctggtgcgcgatcggcaggcccgtgaggtatctgtcagcccggtaccggcggagtcggacgtgttgcagctcaccctctggcgcgtgccggaggctgcagaggcgatggaagacagcgaggacgagccggtgatcgatgccatccaccaccggaagctggtgcactgggcctgctggcgggccctgaacaagcgggattccgagcagcggagcactgcggacgccgatcgccacctcgcactgttcgagagctacttcggtgagcggcccaccgcgcgcgcgctgcagcagctgtcgatcgacccgaccaccggcacccaacccatgtggttctga

SEQ ID NO: 498972 - DNA, 1314 bp, Stenotrophomonas maltophilia
atgcccgttcgcgatgaagatctccgccctggtggcccgtggccactgggcatcaacaacgtggccggagagggggcgctgccgaccgatgacgacgggatcccgcgcgcactacgtgaggcggacaatgtcgacctggacgccgcaggccggccgcagcgccggcgcgggcatcagcgcttccaccccggggcgctgactcactcgctgtggggccacgagctgctgcagtacgggctcttcgtcgacggtggccagcttcatgctcttcacgaggacgagcgtgtagagccgctgggcatcgaggtgggtttggcccccttgagctatgcactgatcggcgaccgcgtcttcttcagcaacagcacggcaagtggattcctggacatcgacctgcagaggcattcctgggcgcctgagcacccagcgggacagcccgtcctcgtgccggcggccggcagtgccctcgcaccagggcagtaccaggtcgcggtgacgttcttggaccggctcggccgcgagtccggcagcacgctggccgcggcgatcgacgttgccgaaggcggcggcctggagctgactgacataccgctgccgttggcaccgggcacggtgtcggctgcgatctacgtctccggtccgaacgaccaggtgatgcggcagtacgccattcttccggccggtacccgctcggcaccggtgctgtcgcccggtgagggcagggcgctcactactcagttcctgcggcccctaccggcaggccacatcgtgcgcggtgggcacggccggcagttcgtcgcatgcggccaagaagtcctgtggtcggaagcactgcgctacggcttgttccgaccgtcggccaaccgcatgcggttcaatgctccgatcgacttgatggagccaattggcgatgggtctcccgatggagcgggcctctacgtcgccgccggtgcgcgtacctattggtatgccggcgccgatcccaaggacttcagtcagacggtggcgcgcggcagcggcgcggttcccggatcggccgtggtcgtcaacggcgacgtgatcggtctgcagtccgcagcacccgctctgatctggctcgcgcgtgacggctatttctgcatcggtctgcctggcggtcaggttcaggtgctgaagaagggggaggcggtcatcgatgacgcagaccatgccgcagtgttgctgcgtcagcaggacggactcagccagctggttgccgcgctgcgggcaccgcaaggccagtcgctggccgtgaccgatcgggccgtcgcccacgtcatccaccgggatccctga

SEQ ID NO: 498973 - DNA, 174 bp, Stenotrophomonas maltophilia
atgactctgttggccaagccggacgacgtgaagcgtcgcctggagatctgccgcgcctgtccgaacgccgagcgtgtaggacgtcgcctcttcctgcgctgcagcctctgcagctgccccctggcaagcaagacccgattccaaggggcctcctgccccgcgggcaaatggtaa

SEQ ID NO: 498974 - DNA, 633 bp, Stenotrophomonas maltophilia
atgaacgtcatgaaggccctgcaatccctgggcgcggtggggcgcgatgcaattcgcgcgatccgccagcacaagtacgaacggtgcgaatcgggtatctacattcccggcgcgcgcgtcagcatcggcggcatcttccggcacgcgcacgcgcctgctggtggcgagctcggtccatggcagatcgacccgaaccgcctggtcaacgaaggcctgaactatctgctgaacgccggaatgggtggtggcagtcagcagaccgctttctacctggcccccttcacgggaaatgtcacccctgcagccgactggaagggcagtacgttcaaggacgtggcctccgaattcacggcctacgccccggcgacccgactgccctggactaccacgccgtccacggcagaagccatcggcaacacggctgcactggctgcagcgactttgacctattccgcaggcggtccctacaacctgtacggcatcgggctgctgaccggatcggcaaagggcgcaaccgcgaacatcctgattgcagcgacccggttcgcgaccccgcgcaccaaccagctcgccggcgacaagctggcgatcgagtacgtgctctctgccaaggatgggggtgacgtctcgtaa

SEQ ID NO: 498975 - DNA, 1902 bp, Stenotrophomonas maltophilia
atgagcggcgggcggcataccggctggacgccgatcgtggtggttggcgatcgggcggccgcctcgctgcatgtgccggcgggaaggaagctactgggattcgtaacgcaggaggccgctcgcaatgggctggggatcgccagtgcaaggcaagaagcggaggacggaacccttatcgtggccgagaagatcggtgaactgacgcggttgacgatcatcacgccggagccggaaccgccactcgacccactcgaacccatgggcggcttcatcctgtggcctcgctggaacgtgcacacgggcgatccggccgaccgcggctcacaagtggaccccaccggtgagaatccgacggcctggctcgagttcagcggccgaagcctgatcacgcgctactggaagcgctgggacgttgtcgacaacatcaccggggctcgctacgagagctacaaccagccagaccgctatcccgccggtctccacttcttcggcaacgtcgactggaaggacggccgcgatctggctctgtccttctatgggtatggcgtccggtacctccgcgacctgaccctgatcgacgacggcgcgcgttggatcttccagcagggccagatcctgttcgatcgcattgcctatcgggatgcgatggtcgatacacctccggactatctgtcctggcggctgacgtccggttgcctgcgcaggggggcggatggacatcatgagctggtggtgacgttcacccactatgtgatcaaccaaccgaccacagctcaatcggcgttcgtggtgttcagggtcactcggagcgagggaacgcccgaaaagggtgattgggaagtggtgcagggcagccaccgcctccttggaatgacaccgggcaggatcaatccacaggacgaatcgtccgcgaacggtttcaacgacgctgcgctgccctggttcttcaatgctgatgggaccaaggcaattcgcacggtgagcagtgaaccgaccacggtgttcggcctggtcaatacgatgacgcaggaggtggaaatctccggcgtcggtatcgaccatagactgagccgggccgactacctgatcggcgactacatcaacgcccttggggccttcgcgctggtcgcgccgactcgtggcctggtggcttccgactatgccggttctgagcgcagggatgccttcctcgcgctgcgcctgagccagggacaggtcgccaccgaggcgacagggtaccgcgggacccttcgagtgctcgtcgtgttggagtttgatggcggtgaactgccgttgatcgacagggacttctccgtcggcaacgatcgccaggactatcacctcctggcgtacatggatcttcgccacaacctgtactccggttggcggatccagggcgtgaatggtgttcacagcattcaaccattcgcatacatgggcgggcgattggtgtacggcgagatcgaggccgtggactgggacccggccagtggcctgccagccccattcctcgggctcgacacccgggcccctggcggtgtcgttgacggtctcgttttcgggaactactggaccggcgcgtcgggctctggatgggggccgcgagacggtacccagcacggcgtgatctggcgcaaacacccgcgcgagggcctggtcttcttctcggccgccgcaagcctcaggacagccatggtccaacgccaaggcgtgaccgatttcctcggcttcgattggagcgggggctggaactactgcaagggccgttactgcgtgtcgatccccgggccctacaccgggacgctcaactacctgacgggctacgagctcggcgcggtcaccggcgtgattgccgatgaccgtcgcttctacccgctgacgtcgctacccaaacccatatag

SEQ ID NO: 498976 - DNA, 474 bp, Stenotrophomonas maltophilia
atggcggtcatcacttccaccgggttcgaaacgctgctgctcgggcccacctcgttcgacgggatcttccggaacggctgcatcgagattcgctcggggatccaacccgcgcgtgccgacctgccgcctacgggacagctcctggcgcgcattactcgcgatggcgggccgtggcaggcgggcgggacggccaacggcctgcatttcgtccgcaacggtcgctatgtctacaaggatccagtggaacgctggcttttgcgaggcgtcgcgaacggccaggccgggtggttccggcttgtggggaacgagcctgacctcgggcagatctctttcaccgccccgcgcatcgacggagcaatcggactcgatgacgggtccgctggcgacttccagatgcggcttccgacccttgctgtgacccccgacaccggcatcgaactgggtgactggtggtacgcgattccccccctctga

SEQ ID NO: 498977 - DNA, 471 bp, Stenotrophomonas maltophilia
atgacgatctcgattcctcttgctcaggcgctgctgcagcaagtcaaaagcgccctcgatggtggttttatctacatctacgccgggccggtaccggcaacggccgacactgccctggacatggccgccgcacatactcaggtcgccaagcttgaggtcgcgggccaagggctgacctttgcggctccagtggggaacgttctgccgaagaacccgtcggaagactggcaaggcctgatcgccttcgacggcgccaatgctgccgcaccgaacctttcgccgtccttctatcgcttctgtgcggctggtgatgatggaagaggggcaaccactggcattcgcctgcaaggcaccgccggcgggcctgcatcgaatgcggccgtgctcttcagctccgatactgtcgttgccaatggcaccaacagcaccggcatcagcatcttcaacgtggtcgccgatcaggccagctga

SEQ ID NO: 498978 - DNA, 738 bp, Stenotrophomonas maltophilia
atgttgtcgaagccgccgaccgcaagattcattcccccgcagcctgcgcgtgaagcacagccgtacagtgcggcctatacgttttgcggcggggagcccgcgaagggctactggcggcagtcatgcagcgaagggacgatggctgtcccgaacaacggcgcagtgcagttgccgcagaacgcgacgatcctgggctacgagcagtcgggtggcaccagctacgtgcgttaccaggtttgtcgcagcgtgttcgtccagacggcaccgccagggcctatcacatgcaccagctatccggagcagaaggcacggcctgcatcgcctcgagttcctggccgcttcgagtatgcgagcgtgttcgcgtgggatgccggagctcggagtgacgccgagctcgatggtgatctggttatgaagctgacaatgagtcgggtggttggggttgtggtggggctgtgcaccgatcgggacaggctggaggatcctgcagccattcttcatgggctctacttccaccagagcgccggcggcttgatgcaggtctgtgcgatcgagtccggggcaagggtcagcgaagttcgaacctacagtgcggaggatgtctggcaggtccgccgggtggggggcgttgtcgagtacgtctgcaacggcgatcgcttctaccgttcgctgcacctgagcgaaggtccgctgctggtcggctgcgccatgtttgccaccggagacgtcatcgaatga

SEQ ID NO: 498979 - DNA, 1482 bp, Stenotrophomonas maltophilia
atgaccattgagttcgttccccttgacgccgtttcgattgagggaagcgccagctgcgcgctggtagttcgtgcgcgaggtgctggccgtggatttgccggcagcggcgccgccgtgctgaggcttcgcggcgctggcgttgcgcaggttcgcttcggcggcggtgtggatcccgatgtgccagcgcacggtgctgcggctctgcagctcagcacggatggggtggcatcgctacacctggtcggggagggaggtgcatcggtcctggtcgtagcggctggcttccaggccgcccctggccatggtggtggtgtggcgaggctggcgatccacgcgcgtggacgccagctcacagagcccatggcctatgcggggctcgaggccattcctcgcatggtgtcgtccttcggtgggttgtggtttgtcagcccacgggctgcgttggacatgggacagttggagtcgacattgccgacccacgtgctgggcgaggccttggccgtcgcagctgggcggcgaagcacccagtcaggcaacggcgctgccgctgatgtgttgagcctggaggacactgtcgcgatcgtctaccagctcctggtggaggagggtgtcgtgttcgcgccggcgccgcaggcgacggtctcgaagctggagcgagttctagacaggcttctgctgctgggtgcgtgccggtcctatgcggacgcggtcaatgcgattgccggcggcttgtggtttggtgctttgaccgaagtcctcaagtccgagcgtgtcgccgatagcctggtcgcctcggaggtggttgggaacctgcagcgtgcggcggaccgtctcgcagaagcgctactgatcaacgcagacgccttcggatcgggtaccggcgtcgtactgatcaatgagagcgcgctggcgacggcaggcgaagtgaatagtgcagaggccctgcagcgcctgggtgacgggctggggttcgtcacgcgcttggcgctggacaccggtgagtacattgcatgggttctgaacaccgagagccgcggtctgtcgcggtacacggagtatccgttcaacagcttcgccaagatcggcaaccgatactacggtgcggcgagcgacggacttcaccgactcgacggcgatgacgatgacggccaaccgatcgccgcacgcatcagactcgggctttccgcgctcgggacgcgccggctgaagcgagtgccggaggcgtttgtcgggtacaccagcaccggcaccctactgctacatgtgatcacggtgaacgaagaatctggccagaaggaagccgccatctacaagattctggagcgaccggcgacaagcacgcgcgagacgcgctggaagctgggcaagggaatcaaagcagtggacttcgacttcatcatcgagaacgtggatggagccgactttgatctggcggcgatcgagttccggccggtctatctcgaacgacgtacaagggggtag

SEQ ID NO: 498980 - DNA, 333 bp, Stenotrophomonas maltophilia
atggcggggccttgtttttggcgcgagctcagtggtgtggtgcagcaatgcggtgatgatccggagcccgtggaatatcagcttctggtcaccaacggatacgcatatccgtggaggaatccggagttcttcaatggcgccgcaggctttgagtacggcatcgacttcgagctaaggatcgagctacctgacgggcccactgtcattccgatggttttcgaagcggaaggccggtacctcctggatgggtacgtacccgttgatgccacgccaggcatagcggtccaaggcggcaatcagtggaacgtcttcatcttgctgcagtggtcttga

SEQ ID NO: 498981 - DNA, 7926 bp, Stenotrophomonas maltophilia
atggcaacgttcgagaaggtcgatgggaatcctttcggcgcaggccaggcgccgactcaggcaccagcaccggcagccaccaacaagatcgcgcgccgtccgacgctttcacctgtccagggagacccttttcagaaggtggccaagcgccctgaacgtacctggggcgaggccatcaaggacaccggtctcggcatcgccaccggcgctgcgaacatcattggtggcgccatcgagcaacgaaactctctggagccgacgaacctggtgcggcagggcctgcgcggcttggatcgcttgggcgtaaagggggcgtcggagacggccgctctggtgccgggtacgccgtcggaaatcttgggtggacgtcgtgctgggtccgacagcgcgggcctctccaaggcgacgcagatggcaaccgactacctcggggagagccagtcggatgcgctcaagcaggaaaagcaggagctgcaggacaccaagggcttcttcgccagcgctggcaaggtgctgtcctcgccgcggctgatcggaaacttccttgccgagcaggtgcccaacatcgccacgatgggcgctggcacgcgcgctgcagcggctcaggcaggcgagcgggccatggccggggcgctggccaagggcctcggtaccgaggctgcggaaacggctgcgactgccgctggacaccgggcagcgaccgccgctgccactggcatgacgacggtgatggagaccggttcggcaggccagcagacgtaccagcaggcaatggcacagccgcaatcggtgtgggacgcgaatccggagtacaagcgcatggttgccgccggcggcgacccgcagacagtgaaggaaacgatcgcgcgtggcgcgtcgatggaagcgcaagccattacggcaccaatcgctgcgattgccggccgcatcgcggcgccgttcgaggctgacgtcttcacccgcggcctggcacgcaagccgaaggcgatgctggccggtgccgcgcgcgagactgtcgaagagggcctccaggaaggcgggtcgcagttggccggcaatctcggtcagcggcaggtcgatccgacccaggcggcatgggagggcgtgcccgaggccgccggtaccggtgcggcgatcggtggcttgctgggcggcggaatggccgccggcggtgccatcgcgagtcgtggcgacaatcaagccgccgtgcaggccgatgcagagcgcgagcgcttggcacgtaggccggctcccacgccgccatcgctgccgccgcccccgattccacagatgctcgcgctcccgccgcctgaagtgatgaccgcggcgccggatgggaccatcacgcgcggtggtgtccggccggagttgatggccgaacccgaaatgcggttcccgcagggccgtggcatgtccgcgcccttcgaggggcgccgggtcgctgcacgcccgcagccaacggtgcctttccccgacgcagcccccgactcgatcgcagatgtcgccaatctggtgtcccaggctcggcggcccaacgaacctattgccatcgcaccggctgccgcggcaatcgccgagcccgtgcctccgcaagtccagggcgaccaggcaggcctggctactcccgaagtgtcggcagcggcggcaccgccgctgccgcccccagtcgcgccaccgtgggtcgatgcacagaccggcgaagccctgcgcgagccgacttcgacggacatcaagcaactgctgcacaacggtctgcagtaccaggtggaggcgcatggaggcatcaatacgccgactctgctgcgcaccatgcgtgaccagtacggcctgcccagcgcccgcgtgcgcccgctgctggacgaggtcaagggcgagcgccggcgcggcctcaccgagccgcccacggatgccgacggctcggttgcgagtgaggccgaaggcccggcatcgccgaggcagcaagcgctgagggaatcggcacgagttgcggacctgcagcttgatgatgcagcgccagccgatcgctctgcgtcggcgccgctggccagcgacctgcagctcgcaccgaatgatgcgccgctgcaatcgggcaccggtttgtctggcgaaccggtttcggagcccggtgccgttggcacgacggaggcgcccagcttggcagagactgctccgatgcagccccttgccgaggcgacgcctgctcaggacggcgccgccgagcccgcggatgcgccgaaggtggccactgcggcagcagaagccgcgaccaaccctgcgaatgatctgccgctcccgtcggatgcgcagaaggaagccgggaactacaagaagggccatgtccgcatcaacggccacgacatcagcatcgagaacccagcaggtagccagcgcgatccccgctggccggcgctgaagaaccactacggctacttcaagggcacggtcggcaaggacaaggaccacgtcgacgtgttcatgaccgaccgcgccgaagatccgtccttgccggtgtacgtggtcgaccaggtcaacaaggacggctccttcgacgagcacaaggtgatcatgggaaccgcgtcggagcaggaagcccgggatacctacctggccaactactcgaagggctggaccggcctgggcggcatcaaggaaatgtcgcaggagcagttcaaagcgtgggtgcgcgacccgaagaagaccacacgtcgagtcacgaaggccaagctggcagaggcagcgccggcgtcgcagccggcgccgagcggaggtgagacggggcagagcgtcagcgctccggtcgaaggcgtaggtgtgccgacggaaaccggtagtgttccggccacgggcggaagtgaaccagcagctgctgcagcaccagccgcagatgaacccggccccgtctacacgcccaaggtccgcatcaaggcaggctcccccgagtatgttcgggatgacatcggcacgctcggtgcgtacttccagccgggacggatcgtgaacgcctacggcaacaccctggatcgggtgatcgaattccgccctccaggtaaggatccgcgctggcaggtgaaggtgcagatggtggacaaggaagggaatgctcttccggatgaggcaccgcgctggcacagcaccattcctagcccgcgcgatctggattccgtgctcgggaagcctgagcggaagtcgagaagggacgcgaacgcggccaaggtggccaaggccgcagaggcaaagaagcacgacaaggccaagccggggtcaaaccctgagacttcgaagcctgcgccgagtgataccgatcgagagagcggtagctcccccgtcgcggacagctcggcgggacagtccgatccactcttctcccggcggggctgggaggcggacttcccggacgttgtcacggcacatcgcccagggcgtctgagcgctcatgcggactacgatgcagccaaggccggcgacgatgcggcggcgctgcgtgtggcgcgcgacgtcgtcacaccggagttcgtcgaggacgtgcgtgctgtgctgccggagggcagcaagcccctggtggtggccgtgcagtcccaggaagccacgggcaacaaccgcattccgcggatggctgccgaggtgctggcccagcggctgggactgcaggtgtccgaagacatcgtccaggccgcgaaggtcaaccgtagtgccggcgacgccctgcaccggctggccaaccagcccccattcaccggcaaggtggagaagggccgcgactatgtcctgctcgatgacacgctgacccagggcggcaccctggcccagctgaaaacccacatcgaggacaacggcgggaaggtggtgctggccaccgctttgaccggcaaggactattcgcggaaaatcgccctcaattcccagagcctggccgacgtccgtgaacgtttcggatcaatcgaaccctggtggcgtgaccagttcggctacggcttcgaaggcctcactgagtccgaagcgcgcaccatcctcaccctcgacaagggacgtctcgatgctgacgccctccgagatcgcgtcgctgcaggccgagtatcgggcctccgggcagtgggcgaaggagcagctggcgaaggatccggagctgaagcacctgggcccgccgggcgggtaaatcgatccgctgcacccgctgccggcggcggtctggacttcgaccgcgcgctgcagctcaaaaccgacctgacccagcactggggggagaacgcgcccaatgtggtcgtggtgcgctctgccgaaggcttccctgccagcgccaaggttgatccggggtatcgccgcgccgagggtgtgtacgacggccgccccacggtctggatcaacgccggcaacatcgccaccgagcagcgctttgctcaggtgctggcccacgaggccattggccactacggcgtcgagtccgtggtgggggctaaggactggacccagatcgtggacgcgatcgacaagctcgccgccgacggaaccggtaccactgcattgaagtcggtgctggctgatgtgaccaggcgctacggcactgtcgatcgtgagaccttcgccaaggaagcgatcgccgtcatggcggagcgggggatcaggaacagcttcaccagccgtgtcgctgcagcggtgcgccgcttcctgcgtcgcgtgatgccctcgctcaagtggtccgagaccgaggttcgggacctgttgagccaggccgacggtttcctgcgtgccggcatgtcagcgcaggcccagcgcgaaatggtccggtcctactcgttcgcgcagccgcagatcgatgcccgcggcgaagccttcctcgagcagaatggcggccgatttctccgccgcgacgatcagtggtacctcgccgacgagcgcggccgcccggccgacttcctgacccttggcaccgcgcgcgctgaggccgaacgcaccggtggccaggtcctggccgatccggttgagcgtgggccgcgcacctggagcgtggtgctgcccaacggcgccgaggtgacacgggccgcccgcggccgcctcttcagcatgccgccggcagatgcgctcgaggacatcgaggcgatccagaggggcattgaaggcgaaggagtgttggcacgtgcgcggcagaagctggaagacctgacccccagcaaagtgaaagacacgttgcggtccacgtggctcggtgcgctggccacccggcacctgacggagctggggcgcgactacttcccgacaatcgatcgctattcggactacctggccgaaatgcaggccgatcggaacaagctgcaggcggaggcggacacgatcgcggaggcggcgcgccagtgggccagtaagaacaatgccgaaagccgccggctgttcgatctcatgcatcaggcgaccatggacggcgtagacccctcgcgtgagtaccagcccctgcagttcaaggcgccagggggccagggactgcaggaggtcaaccgcaagaacgttcaacacgcgatcaatgtgatccagcagcagatgagggaacgcagcggcgacaccaagacaaacatgattaacgaagtgaagacgctgaaagcaatgctgaaggtcgaaccacgccgccgccggcaatatgtccccttggtcgagcagtggtcacagctgtctccagaagcaaaatcgttctatctgcagttccgtgatgcctatcgatcaaggtccgacgcagtggaagaggccttgatccaacgcatcgaggacctgaaggggggcgatttggttggaggccaggtcatcagcgacagtagccgccgcatgctggtgaacaagatccgcgagcagttcgaatctgcgcgtctgcaaggcgtctatttccccctgcagcgcttcggcaagttcttcgtcgcagcggagaaggacgggacaaacaccttcctgatgttcgaatcgcagaatgagctggaccgcgccgtgaaggacctggagcgcagagagtgggccattaccgcccgaggaatgaagatggagggcaaggcggccgacgcacccagcggcacgttcgttgctgatgtgatcgatcagctgcggacgtcccacgtctccgacgctgtccaggatcaggtgtatcagctgtatctgcaaaccatgccggaactgtcgatgcgcaagcaccagattcatcgcaagtcggtgcctggcttcgaccctgatgccgtgcgggcgttcgcccacaacatgcagcacggctcgcaccagctggcccggctgcgatacgcccacaagctgcagggcgtgctgaccgacctgaaggacgcacagaagaagattcaggcatcccccagcgtcgacacgcgaaagatcgtggccggcgacgcaatcctggaggagcttggcaagcggcacgaatggatcatgaacccgaccgattcggcgctgaccaacctgatctcgtcgttcggcttcacctactacctaggcgccacgccggcggccgcactggtgaacgtgacccaaaccgccctggtcagctacccctatctggcctcccggcacggtggggtcaaggccatgaactacctgctggccgccagccgcgacgccgtgcgcaccgtgggcaacatccagaagaccctgaccgaccccgacgagctccgcgcctaccaggcgctggaggtcgccggcgcgatcgagaagacgcaggcccacaacctggcgggcatcgccgagggcggcatggccggctataacccggcctggagcaaggccatggagatcatcggctggggcttccacaagaccgaggtcatcaaccgcgaggcgacgggaatggccgcctaccgtctggcgcgagcggatggcaagtcgttcgacgaggcggtgaaattcgcccgagacgccatcttcgacacccacttcgactacagcaacgccaaccgtgcccgcttcatgcagagcggcaccgccaaggtgctgctgatgttccggcagtacagcctgaacatgacctgggcgctcgggcgcatggtgtggcaggcgaccaaggggcaggatccgcaggtgcgccaggtcgcccgtcgtaacttgaccggcctgctgggcatgagcgcgctgttctccggcgcgatgggcctgccgatgatgggcatgatcatgggggcgttgaacgggatccaggccaccttcggggatgacgacgaaccctgggatgccgagaccgagctgcgcgctttccttgccggcatgctgggacagggcggcgcggatctgctgctgcacgggccggccgacaagctgaccggcgcgaacatttccgcccgcgtcggactggacagcctgtggatccgcgacgctgatcgcgagctcgacggccgcggcatgttcaacaacctgctcgagcaggccgcggggccgatgggcggcgtcctgaagaacgtgctggtcggcaagcagcaggtcgacgagggccacatcatgcgcggcgtcgagaccatgctgccgaagggcctgaaggacatgatcaaggcgggccgctacgccacccagggcgtgaacaccctgcgcggcgaccccgtcgtggctgatctttcgccctgggaggttctgctccaggccaacggctttgcgccggagaaggtgtcccgccagtacgagaccacccgcgcgctgaagaactacgagcagcacatcctcgaccgccgcaagtcgctggtgaacgcctttgccatggccctgcgtaacggcgacgccagcgaccgggcttcggtgctcagcaagatcggcgccttcaacaaggccaacccggagctggcgatcacctcgagcggtctgcagcagtccatcaagaaccgcgcccgctatagcgccagggccgaggccggcatcatcctcaacccgaagctggccgcgcgtctgaaaaaagccgtgacggagtag

SEQ ID NO: 498982 - DNA, 780 bp, Stenotrophomonas maltophilia
atgggacgcaagttcattgcggtgatatctgttattgcagtttcgatgttgggtgccgctggtctgtacttggcgcagcatcactctaggcccataccaactggggctaacgagttggccgacattccccagtctgatacgcgcgccgttcggggagactctggaacagcaagccctattcgcccagcgacgagcgtcaccaaaacgggcaacactcttacacctgctgacgccgaagctgcggcggcatacgaattggttgaaatcaatttgcgctgtcagattgatcgcgaggcgtcgtccctgggagggcacgttcgaagcacaactgaggacctttgcaaggacctttcgctcgagccactaactcgtgaagaggtgttcaaggcgatcacgtacgccgctgagcacggaaatatccgcgcccagcttgattactctctttacgcttcgagaatatttgaagatgaacaaaattccttgaacccggatgtaatccgggaatacaaggaaaacacggtcaggttccttgagtccgctggaagggccggcgaatcacaggcctatgtccgattgagcgacctatacaagaacggcgcactggcctcgaaggatccggtgatggcctatgcatacgcggaagcatacttccgcacaggctcaagccgttatggggcgtcgttcttgaacaatgccaaatccggcttggacggcgcgcagttgcgccgcggcaaggaaatcgctgatcaaattctcaacgaaaggagcgcctcaaagtga

SEQ ID NO: 498983 - DNA, 654 bp, Stenotrophomonas maltophilia
atgctggaagctcttttcgtggcaacagctgaggctgctccggcggtcactgcagcggcaaacgatggcaccgactggaagtggttggtgccggtggctacgctgatcattggcttcgggctgaagtggttccaggaccacgtcacggagaaggggcggaggaggcacgacaaggacctccgacgtgagcagcgctatgacgtgctgcggatgcggcgcttggaggctgagcgcgcaaacctgctggaactccagccgctggtggtcaccttcatgcgtgccgcgaccgatgcttacaaggtgaagatgaaggctctcggatgggaaaggggggccgcagcctttttgcccgctaactcgatggaacgcgagactttgctgcagtcggtggccaaggtcaacgatgaagttcgccaagcgtcggccgcgcttatccctttgcagtcaagacttcattctgaggaagttcgatctgcgttgaacggcttgatcgatgttgtctgggcaaccatggatgccaaggccagcttgacgatgatgaggaactggaaactggtcgatcagccgcataacgaactacacacagtgatgggccggatcatcaagcagcttgaggatgagaaccagcaactcggtgatccgccggtggactga

SEQ ID NO: 498984 - DNA, 10290 bp, Stenotrophomonas maltophilia
atgaagaacgtattccgcagtctgtccctgtccgcttcgggcgccggttgggccacgcgcctgcgcaccgcgatggcgagcgccaccctggcattggcgttcctggccccgggcagctcgtttgcccaggtgcaggtacaggccggcgagcaggcgcgggccgaccaggcggcgaacggcgtgccggtcatccagatcaaccggcccaacgcgggcggcgtatcgcacaaccgcttccaggactacaacgtcgggcgcgaggggcagatcctcaacaacagcgcgagcaccgtgcagacccaactgggtggctacatccagggtaacggcaacctgcagccgggccagtcggcacgattgatcctcaatgaggtgacatccaccaacgcatcgcgcctgcagggccacatcgaggtggcggggcgctcggcggcggtgatcgtcgccaaccccaatggcatcacctgcgatggctgcggcttcatcaataccacccgtggcacgctgaccaccggcagcccggtgttcggcaacgatggcagcctgtctgcgttccgggtgtcgcgcggaacgatccgcctggaaggcaacggcctggatgccggcaacctggaaggcgtcgacctgctggcccgcgcggtgcagctcaacgcgggcctttgggcgcgccaggtgaacgtggtcaccggcgccaaccagatcgatgcccagaccctggcgacgcaggcgatcaccggagaaggcgaacgcccgcagttcggcctggatgttgccgccctcgggggcatgtatgcaggcaagatccggttggtcggtaccgaggccggcgtgggcgtgcgcagcacgggccagatggtggccgacgcaggcgacttcatcctgacccaggccggcgatgtccgcctgagcggacgcacggcggccgcaggccgcctgcagatcgaaaccgacggtgacctgaaggccgacggtacccagtacgcgcagggagatcttcagatccgtgcccggcaggcgtcgcttgccggttccacgtcggcgggcgctgcgttggccgtacgcgccaaccagaatctggacctggccggcagcgcgcaggccgcacagatgcagctggacgccggtggcacgctgaccctggctgacacggtgaagagcgcgggcagcatcgcgctggctgccgcacaggtgcagaaccatgcacaggtgaccgcaggcgccgggcttgccgtgcgcgccgacacgctggcacaggacaagggcgcgcgcctgggcgcgcaggcgctggacgtgcaggcccgccaagtggacaacgccggcctgctgctgggcaaccagggcgtacggatgcaggccgcgcagctgcacaacgccggccaggtgtacagcgacgccgacgtcgaactcgatgcggccagtatcgacaacgagggcatcatcggtgccggtgccaacctgcgtgcagcggccgaccgcatcacccagctgaagggtgccgagctgtctgcgggcgggctgctgaagatccaggcgcgccagcagctggacaacgccggacgcatcctctccgagcaggcgctggaactgtctgccggcggcgtggacaaccaaggcacccttgaggcccgccaggccacgctgacggtcgaccgtctgcgcaacagcggcacgctgcaggcggtggacctgctggcattgaagtccaacgcacgcatcgacaatgacaccaccggcagcatccaggggggcaagggcctgcaggtcgacgccgatgtgctggacaacgccggcatcatcggcagtgcagccgatgcccgtctgtccgttgccacgctcgacaaccgcaaccggcttgaagccggcggcaccctgaccctgcagggcggcgtcctgcggcagcaggcggccgccacggcgctggcacgcgtgctggccgtggacgtgcagaaggtcatcaacgacggtcgcctgcatggccagcaggcaatggacctgcgcgccactgagctgagcaacagtggcgtgatctacggtcgtgaccgctcacagctgcgcaccaccacattggacaatgccggcgtgatcgccagcgatggcgcgcttgacgtgcgcaccgacgcgctgcacaaccgcgccggcggcaacctgtccagtgcgcagtcgctgcagctggacgcggtgacgctggacaacgccggcaacgtgttcgccaaaggagcactgacggccaaggccgatgtgatcgacaaccgtggcgacctctatggcgccggcgatgtcgatgtcaccgtgcgcgattcgctggacaaccagggcagcctggtggccggccagacgttgcaggtgcggggccggaccctgcgcagcgagggtgaactgggcagcgagcgcggcaacgtgcagctcagcagtgaccaggccctggtgctgggcgggcgcacgttggcggccggcacactgaccgcgcacgcgggcggcagcctggagcagtcgggcaaggtctttgcgcagcagggcgtcgtgctgtccgccgatgccggcgtgacgctgaagggaacgatcgacagcgccgctgatctgcaggtgcgcagcgatggcgacctggacaaccaggcggcgttgttcgccagcggcgcgctgtcgctgcaggctgcgcaggcactgcgcactgcggccgacgttcaggcgcgcacggtcacgctgcaggccgcccaggccagcaatcgcgggcgcgtgctggcctcgggtgacatcgaattgcgggcggggcagatcgacaacagcggcgtgatcgtggcgggcctgctggccgacggcaaggtcggcagcaccggcagcgtcacccttgatgcgcgtcagcagctgcgcaatggcgggcagatcaacgcgggccaccagattcacctgctgggcgacagcctgctgctggagggtggccaggtctggtccggtggcaccctgctggcgcaggcgcgcagcggtgagtggcgcaatatcggcggcagcctgaccgccatcggtctgctcgacctgcgtgccaccgacctgctgcgcaatgcgggcagcctgcagggcacgcgcatcgacctgttggcggccgcgctggacaacagcgccggcgaactgctgcagaccggcaccgatccctttgaacttagcctgacaggtgccctgcgcaacaccggcgggcgcatcgccgccaatgctggcagtgtccacctgaaggctgcgcagctgctgaaccagggtggccgcatcgagcatgcgggcacgggtgtgctgaagatcgagaccggcacgctggacaacagcaatgcaggcctgatcgtcggcaacggcgaggcggacgtggccgttgccggtcgcctcgacaacagcggcggtacgctgacagcgggcaccggtgcccgcgtggctggtacggagatcgtcaacaccggtggccggctcgatgctggcggcaaccttaccgtggacgctgccggggcattggacaaccgcactggcaccatcgtgcagcgtggcgccggccagctgcaggtgctggcctcccagctggacaacagcaatggcctgctgggggccgaggacaatgcgcgcgtgaccagccgcacgggcgacctgcgcaacgtggatggcaacctgtatgcccgccaggaactcgcgctcgacgtggccggtgcgctggccaaccagcgtggcctggtccacggcggcaccgcgctggatctgcagatccgccaggcactggacaacagccagggcaacatcgaagcacagggcgctgcgaacatccgcggtgcctcagtgggcaaccgtggcggccgcatcgtggccaacggcaccgggcagctgtcgctggaatcggccgctgcgctggacaaccgtggcggcaccctgggcagcaccggtggtgcgctgacgctgaccgcaggcagcgtggacaaccgcgccgaaggcggccaggccaagctggtggccggaaccgacctgcgcctgcagaccgcatcgctggacaacgcaggcagcatggtccacgccgccaataccctgtacctggagcgcgcaggcgcgcaggtattcaacgttggtggccagctcagcgcaggcaacctgctgcggctggatcttgccgcgctggacaacagcaacggccggctgctcagtcgccagagccagctgacgctgggcagcctggccaatggtggcggcgaaatcagcgcctatgaagcactcggcgcacgcctgcaggccttcagcggcatcggccgcctgttcggcggcagcgagctgcgcctgacgctggcgggcgattacgtgcatggcaatggccagcgcctggagagcaacgggctgctgaagctggacgtggccggcgcactggtcaaccaggggcgcctggagagcaagggcacgcttgaagtctcggcggcgcggatcgagaacaccgctggcgggcagttcaacgccacggcaggcaatggcagtggtcgtgtcgcgctgagtacggccggcgatttcagcaatgccggtcgcgtggatggcgatacggtggaggtgtcggctgccaatatcaccaacaccggcaccgtgatgggcaacgcgctggaactgcgcgcctcgcgcatcaccaacggccgcgacctgggcaacacgctggtcgcacgcgattacaacgaagggctgatggcggccaccggccgcatcaacctgtatgccaactacatcgacaacctcgacggcgagctcttcagcctgggcgacatccgcctgcagggctggaacggcggcaacgcccagcagatccgcaaccgttccgggcgcatccaggccgagaacgacctgatcctggctgcactgggcgtggccaacgagcgtcgtgtgctggtcacccagcacaaggtctacagcggcaacgaaggcgctgccgacccggacagcgggacgttcagggtcgacggcatcgacggcccggcgccgccgggcaagctgtgcccgggcgactgtgccgtgctggaagtctggaccgagcacaaggacctggtgctggaaggcaccaccgtcatcgccgccagcgcggcatcgcagctgatttccggtcgcgacatgcagatgtccggcggctcggtcgacaaccggaactcggccatcgccgccggtagcaacctctcgatcaacggccgcggctcatccaacagcgaagaccccaatgactgggccggcgtggtcaacaacgaagcgctggccggctacaaggtggtccagcgcacgtcgaccatcgactacacctaccgcccttgccccagccgctgcgacttcgagatctatggcggcagccgcgcgctgggcaccagcacggtcaccaagcaggtcacgctggccggcggcaatgccagcatcaccgccggccgcaaggtgcagatcgaagcgcgcgaggtcaacaacgccgtggtcaccgcgcacagcggtggcacaccgctggacgttgccggttggcagggcaacaacgcctacgcacccgaactgggccagcagcagggcgccggcgcggtcggcggcaatgctggcgcaccgggtgcacagcagggcgtggccaccgggcctgccagcgcgcaggcgcagggtgcgggcacggccggtgataccggctccccgggccctggccgtgtcaccacggtgccgccgccgcaggtggtgggcagcccgcagaatccgctgccgggcctgtcgctgcccagtggcggcctgtacacggtcaatccgggcaaccagcgctggctggtggaaaccgatccgcgcttcgccaatttcgggcagtggatcggctcggactacatgttccagcgcctgaacctggaccccgacaagcagctgcgtcggatgggtgacgacttctacgagcagcgcctggtgatggaacagatcaccggcctgaccgggcgtcgctacctggatgccgaccagggcgatggcatgggccagtaccgtgccatgatggatgccggcgtgacagaagcggcgcgccagcagctgagcgtgggcgtggcgctgtcggccgaacaggtggccgcgctcaacgaagacatcgtgtggatggtcgcccaggaagtggacggccagaaggtgctggtgccggtggtgtacctgtcccaggccaccgccaaccgcctgcagctggggggcgccgccatcgctggcgagtcggtggagatccgcgccggcaatgtgtccaaccagggcatgatccgcgccgatgatcgattgaccatcgataccggcagcctgctcaacgatcgcggtggcatttccgcgggcggcaatgcccgcatcaccgccgtggaggacatcctcaacaacagcggcctgatccagggcggcaacgtggccctggtggccggccgtgacctgaagagtgtcagcggcatcgacgtggccagcatccgcagcggcggcagcctggcgctggaagccggacgtgacctggcactggtcggttcgcagacccgtgcccgcggcaacgcggcgctggaggccggccgcgacctcaatctcaccacgcagatgcagggtgatggaagcctgcgtcgcaccacgctggacgtgggcggcggcctgtcgctggacgccggccacgatctgaacctgacggcagtgaccgccaaggccggcggcagcgtccatgccacggccggcaacgacatcaacctcaacgcactgaccaccaccgaacagggcggctggggcagcaaccgctacacgcgcgaaaccctcaacgccagcggcatcgaggccggtggctcgctgggcatgcaggccgggcaggacgtgaacctgcaggccgcgcagctgaaggccggcgacggcctggccgtggtggccgggcgcgatctcaacctgcaggccgaaaccaccaccaacaccagccagcagcagagccgtggcaagcgcttctcgcagaccacgcagagcagggacgagaccgtgcacggcacttcgctgcaggccggcggtgacattgcgctggtggccgggcgcgatgccaacctcactgccacgcaggtgggcagcaccgacggcggcatcagcattgccgctacgcgcgacgtgaacctgctggcggcgcaggaggaccacagctgggagcaggaaaccacgcgcaggaagaagggcctgctgtcgagcaagaccaccaccacttacgacgcgacccgggacagcctggtggtgggcaccacgctcagcggcgagacggtgaccatcggcgccggacgtgacgtcgtcgcgcaggcggcgcaggtggctgccactggtgatgtggtggtggccgccacccgcgacctcaccatcggcacggccacctccacgcacagcgaagagcatgacaagaccgtcaagcgctcgggcgtgttcggcggtggtggcttcaacctgaccatcggccagagcaagctggaaaagggcctggagatcgagcagagcgcgccacagggcagcctgatcggctcaaccgatggccgggtcaacctgagcgccggcaacacgctgcacatcaccggttcggacgtgctgtcgaagaccggtacgcagctggtgggcgggcaggtggtgatcgacgcggcacagggcaccactgacgtacaccagagcaccaagcagaagagtgccggtatcaacgtcggcctgaccggcggtgtggtggatgccgccttggccgcctacggtgcggccaaggcggccggcaatgcgcaggatgatcgcctgaaggcgctgtacgcggtgcaggcggccaatgccgccgctggcgtcggtggcgccatgcagcaaggcgcttccggcgccaccgacggcgtgagcctgcgcatcggcatcggcgcctccagctccagtgccagccagaccagccacgaccagtcggcggtgggcagcaccatccgcagccagggcgacgtcagcatcgtcgccaccgccggtgacctgaacatcatcggcagccaggtgaggggtgacaacgtggcgctggccgcgcgggacaacatcaccctgcgcagcgaagcggaagaccacacgcagtcgtcgaagaacaagagcggcagcggtgagatcggcttcagcatcggcgcgcagaccggttggtacgtgtctgccagcaccgccaagggcaagggcagcggcaacggcaccacgcacgtcgaaaccgtggtggacgccgaccgcaacctgaccgtcatcagcggcaaggacaccacgctgcagggtgcccagctgagcggcgacaaggtggtggccagcatcggcggcaacctgtccatcatcagcgagcaggacaccgacgactacgccagcaagcagacccaggctggcggcaccttcgtgtacggcagcggcggcaccgtcaacatcggccagcagaaggtcgagagccacctgcgcagcgtgcaggaacagagtggcatcgttgccggcaacggtggcttcgacatcaccgtgggtggcaacacgcacctggaaggcggcgtgatcggcagtactgccgatgcgtcgaagaaccgcctggataccggcagcctgaccgttgtcgacatcgagaacgaatcccgcgccaagaccagtggcggtggcatcggcaccggtatgagcagcggcggtggcatcagtaacccgctggggagcgcggccggcgcggggctgagcctgctgggcggcaccaagaagaacgacagcagtaccacgcgctcggacatcgccgccggcaccgtggtggtgcgcgatggcaatgagagcgctttggcaggtcttgatcggaccgcgaccggctttgataccgacagcgcactgtcggccgttgacctgcgcaagatgcaggagcgtgccgaggtgatgcagctgggtgggcagctgctgttcaagggtgtcggcgacctgggcggctacctgagccagaaggcggagaccgaagaaggcaaggcgttctgggccgacggcggcaacggccgcgcactgctgcacggcatggccggtgcggcgatggccgcattgggtggtgcggatgcgctgaagggcgcggtgagtgctgccggtgcggagaaggccaagatcgcgatctcggaattcctcgagaacaacaagggcagcctgagctgggaggactaccagtcgctgatggaagtcggcagcgcgatggtgggtggggccctgggtggcagcacgggcgccaacattgcggtgaccggggatcggttcaatcggcagctgcatccggatgaggtgaagtggatcaacatgaatgctgccgcgttcgccgcccaggaaggcatcagcgaagcagaggcggtacgcaggctgaccacggaaggtgctgcgcttgttgatgcaaaggtcgcccgattggtgggcatcgagaacgttgatttggaagccactgacttcctgagcaagatgggcggggcatacgggttcggcgcgacggaggcggaatacaaaaacttcaacctctatggcaacgatctgctcaacgacgatgcactgtacaggcaggtcatcggatccctgctgtcctccggcgtatccaaggacgacatgcagctcaaattctatgatctgaacaacctgcgcggaacgaagatccggggaggtgacggctggacgatgatggggaccttcagtggcgacattggcgccgctggtaccgtgatcgccagcgtagccaagggcgacggcaacggtgctgccatcggcgcagcgtcgttcctgatcccggtgcggttgcctggagcgaagatcgttggtgaagtgggcgcggagatcgccggggccgcgaccaagcagggtgtgctcaaatctgaggagatcctgaagtcggtgcagaatgcagcggctgagacgactgagcgagcagttaagagtagtccgagctggaagggatctggcccggtagatggtgttctagccttggagccgggctctgtatcgtctacagcaatccaaaactatttccctggcacaagaagtaaggcgatcgagtttgttttcgatccgaaaacaaacaaatttgcagtgggtaagcctaaggcgaatctgggcggctcccctcatgagcagctgggcgctagtattggtgggaacccccaggaactagtagggggcatgttctccagggggaagaatggcgagataataaccaacgagcatagcgggcactactggatgaactggagtccggaggttcgcgctcagtttgaacaggcaatgaaaaattatgggattgagattaagcatggtgctggaatgtaa

SEQ ID NO: 498985 - DNA, 1788 bp, Stenotrophomonas maltophilia
atgactgcacgcaccgctccgcgctggcccgtacgctacctgctcttcatcggcggcctgggtggcctgctgtacggcatcgacatcggcatcatcgccggcgccctgccctatctcgaagcaactgccagccacgcctggcagctcagcagccagcagctcggcttcgtggtggcagcggtgctgctgggcagcgtgctgtcctcgctgttcgccggcatggttgccgacctgatcggccgtcgcggcgcgatgctgctggccggcctgctgttcaccgcctcgattccgatcatggcactggcctccggctacacgccgctgctgctggggcgcctgctgcagggcatcagtggcggtttgatcggcgtagtgattccactgtacctggccgaagtgctcagccccgagcgacgtgggcgcggtgcggcgatgttccagctgctgctgaccgttggcctggtgctggcagccctgatcggcctgtaccacgctcacgccgtggatgccgccgccgaagccgtgcgttcgctaccggtcgcgcagcaggcgcaggaactgttcacggtgaaggaccacgcctggcgcaccatcttctggacctgcctggcgccgggcctgctgttctgcgccggcatcttctggctgtccgaatcgccacgctggctggtacgccgcggccgcatcgatgaagcccgccgcagcctccagcgcgtcctgcccgccgcagatgtcgagcccacgctggcccagatccaggcgccggaatcgagcagcagcgacggcaagcgcgatccgctgctcagccgccgctacgtggtgccgttcctgctcgcctgcgtggtgctggcctgcacccaggccaccggcatcaactcggtgctggcctacgcggtgaacatcctcaaccaggccggcctgtccggttcagtggccaacggcgccgacgtggcgatcaagctgctcaatgcggtgatgaccgtggtcgcgttgctgctggtcgaccgcaagggccgcaagttcctgctgatgctcggcagtggtggcatctgcgtggcgctgctggccgcggccacgctgttcttccaggccgagcgcggccgtgccgatgtgcagccgcagctgcaggcggcggtcagcggcgacggcctgcagctggtgctggatgatgcgcagtggcagcgcctgggcgcggggatcgaccgcgaagggcggccgatgcagctgaccgtctcctatgcctacggtgatttcaccaacgtgcgcgccctgcgcagcgacaacctgaccgatcgcgagctgcgcatcgagcgcgccggcactgtgcagcccgacagtgtgattggtgcgttcttccgcaagctgcatctgaacccgttcgccgacccggccagtgccgcgcaggcgccgctgcgcatcgaacaggcgcgcatcggcccggtgccgccaccggcacacggctgggccgtggccgcctgcatcctggtgttcgtcgcgttcttcgcggtcggccccggcgtgtgcgtgtggctggcactgtcggagctgatgccgaaccgcatccgctccaacggcatgagcatcgcactgctgatcaaccagttcgtgtcgaccaccatcgccgccatcttcctgcccacggtgggccactacggctacgccagcatgttcgtgttctgggcggcctgcaccttcgtgttcttcctggtggccgcgttctggctgccggagaccaagggcaagtcgttggaggagatcgaggcgcggttcgcgggaaagcggggctga

SEQ ID NO: 498986 - DNA, 420 bp, Stenotrophomonas maltophilia
atgcgcctgctgaccttcacctgtccactttgcggcgccgcggggcagcggtttccactgctttccgcatcgagacggcaggcgaagacggcatgcaggggatgtggcgtggtgctgtgctcggatccccgcttgggcttgtatacgctctacctgttgtatacgcagatcatcgtaatgctggctgcattacccatgatctcggcctatgcctcgggccgatggttctggctggctgcgatctgggccgtggtgttgatcttgtcctgggtccccggcgcgatcaggcacgcacgaagtccgatcgtgcgcgcctggcgcgatcccgattacagctatgcgcgcaggccgggcgctaccactacaggcgccgctgcaaaccccgggcagggtagagatgtgccaggtgccagccaatga

SEQ ID NO: 498987 - DNA, 462 bp, Stenotrophomonas maltophilia
atgatccggccgatcattctgctcctgaccgcaagcatggccgcgtgtgcatcgcacccggccgatgccgtgcagtgttccgaggccacgatcacctacatcggcagtgaaactgtggataccgtggtccttggcaggttccagatcgctacggagggatcgcaggcactacggctgccactggccagcgtggatcgacaggcgcatgcacacgcggtatcgaccgatatccgcgacgaacacggtctggcctggcgtcccttcagtgttgttctggaagagcccaagccgccggctgcggacctggtggttgcacgtggtgagattgaaaccttcctgtacgacggcaagggcgccttcctgcccggtgccgtgcagaaagggcaggcgctttccatcgtcgtgcgcgatctacaaggttgcacacatcgctcgatgccgttcgctcctgagccacgttga

SEQ ID NO: 498988 - DNA, 1395 bp, Stenotrophomonas maltophilia
atgcatcgtctgctggtgtcgtcgttgttgctgtgcctggcgcccgtgatggcaacggctgccccatctgcgtccgcaccagcagccgttgtccatccgtgtgaggacgcatcgtcctcgccagagctgcagggtagcctgtgtaccgtcgtgcaggtaccgctgcaccatgccgcagccggtgggccatcgatttccctgttcctgcgtcggattccggccgaggcgtccactacgcgccggggcgaggtctggctgctgtccggtgggccgggcgagtcgggtgcctcgctgtacccgctgatcgtgacctaccagaaggccttccccggctatgacctggtcatccccgatcatcgtggcaccggccgctcggcgcgcatctgcccggtgcaggaggcgccggacagcgccaacggtactggactggctggagccgagtgggggccgtgtattggcgccatgtatgcagacatggcgcgcaccaccgccttctccattaccgaagctgcgcaggatgtttcctggctgctgacgcggtaccgccgcgagggtgaggtcatcctgtacggcgtttcgtacggcacgcagctggcgttgcgtacgttgcaggtatctccggtgccgctggatgggatgatcctcgatggactggtgcctcgcgaggacacgcaggcatgggacttgagcagacgcacggcactggtggatgcggtgggccggcaggtactgggcgccgaaggcatcgcccactaccagggcgtgctgcaggcatcggaaacagcctcgtggaaggctgctgtgcccggaggagatctgcgccgcttcctgggcgcattgttgaacttcccggcgctgcgcgaccgcattcctggcatcgtggacgatcttgcgcacgatgatgcgttctcgttgcggcaggctgtggcagatcacagcacggcactacgccagatggggcagggcggcaacaaccagccatcgctgccgttggtgatgttgattgcgacgtctgagaacaatgcacgtcccggattgagcaaggccgtggtcgacgcggaggccaaggacgcattgtttgtcagccccattccaggcctgctggtggacagccccgttccaacctacgcgaaggataccgcgttcggaaaacggcctgcggcgttgccgcgcacgctggtgatgcagggaacgcttgacccgaacacgtcctatgagggtgccagggatcacgcggaaaggttgtcgcgtgtgggatcggttcgattccacaccgtcgagcgcggcgcgcacctgctggcgtttaccgcgccgcagtgctttgcagcggccacggcggcgtttctgggccattctgacgtggcaggcgcgtgtactgagccgacgcagcgctga

SEQ ID NO: 498989 - DNA, 483 bp, Stenotrophomonas maltophilia
atgaatccctgcccgtgcggctgggccggtgaccgcagcaaccgctgcctgtgcagcgacgaacggatcaatcgctaccgcgcgcgggtgtctggcccgttgctggaccgcatcgatctgcatatcggcgtgacgcggatggacgcggtggagctgcgggagagcacgccgctgggtgagcccagtgctgcggtacgcgcacgggtggaagccgcccacgcccggcagcaggcgcgtggcgcgctcaatgcgcatctgccgccagcggcgctgcgggcgtgcacgaagctgagcgaggccgatcaggatctgttggagcaggccatcgagcgtctgcagctttcggcacgtgcgatgcatcgaatcctgcgggtggcgcgcacgattgctgatctggcgggttgcgaggtgatccagacagcgcatctggctgaggctattggttaccggcagttggaccggggaacggcgccgtcgccctga

SEQ ID NO: 498990 - DNA, 1392 bp, Stenotrophomonas maltophilia
atgagttcggagccgctgccatatcgcccttggcgtatcatctatatccctgtcgtggaacgacaaggcgggttgttccctttcttgtttctgaaaaacggtcttcccagtgcaacagcggctctatgggcgcgagcgctgagctcggaaaattggagtgactcaaagatcgaggctcaccttcgggccgttggtacgttctacgcgttctgccaaatgaagtgcggcggcgaggctccgcttaccggtgatctgtacgtgctcgtgcaagaatatgccgaggctagatttcgcggcacttggattgccggtgaagacccaacgggcctctactggaggcgggtccgaatctcaactgtgagcgaagagatccgggcgctggatcgctactccaggtttgtggccaagctgcacgactcccctgtgttcaatccggacgagcatgccgtagtcaaggtcgctcgattctatcggtctgcccgcgaagctggccggagcgatgcgctcgtccatctgagaggagtacgccgacgaagaagcaaagcagctccgacgataaatcgcagaatgaccgagagtgacaaggcggctatgcgggcgaagcatctctcgccggcggaaatgatagagacggtagagcatggggcacggtcgccaagagacaagatgttgttactgctgcttggctatgcgggacttcgcatctctgagccactgcatctgtatgtcaatgacgttgtcgagttgtttcgcgaaacgggtgcatcgaagattcgccttgagcatcccgagaatgggagttgcgtgtcgtcgactacagaggataggtctggcttcctcgcaagggtgtacaagcgcctcccgcgaacccaactgggaaggggacatcgtgagtttgcagggtggaagggaatggttctgaccgaagctgattccgcaaacagatatgctttctggctggaggagagcatcacgggcaggtattttcgccgctgccttgaagcgtacttcgatgatcacaagtcattgctcaggacggggcgccttcgccacccgtatctctttttcaacaccacgcgtaatggagcattgaactatgggcaaccattgagtctttcgtgcgcacacgagctggttgatagagcgttcaggcgtgtagggataagggcaggatcgcacgcatgtcgccaccactatggcttctatgccgctgacgtacttcagatccctcaagaaacgctgatgaggatgatgcaccacagctcgattgtcagcacagatacctactaccatgtcagcgccgcttctgttagggcgaggatctcgggaactgacatccgcagaattccatacgcgaggccagaattcccaagcagctggggtaagccgtga

SEQ ID NO: 498991 - DNA, 3528 bp, Stenotrophomonas maltophilia
gtgacacagctcgatcacgttacacaggacatttctcagctacagcactatcgtggattgggcagcagttgcgagatcgtcttcaacgcatgtccggataagttcgtcgttacgggaacgatttcgccaatcgagtggcgcgatgtcggtgtagaggttgagcgttcgatagtcctcaagcttacaagctcgatgacggaatttcgggaggataggaatgtcattcgtgcttttgacttcaaggcgtcagaggacggcacgcctggtacgctccattacctgcgccaaacctggttgttacgcgcgattggtgatcaactagaactgaagtcgggccagagtctctcccaggcgctagcgcttctcagcaaagacgaccagatccgactgtggcgtcgcatacagccggaagatctggccggggtccgagttgcttttcaggagggtcggattaagaaagtcgacttgcgtctgagcactgtgttcagctgcgaagatcctctggccatggtggatcaactcatctctctcctttcactgccggcagcgagaggtcagaagtactcgggtatacggaaagagctgatcgctggatcctcattcaagaagatcgtccatctgatcctgacaacgctctggcgccgcggccatattttttactctctcgcgatgacagagtccttggttgcagaggctaaagctgagacagggctaaccatccgtagcggttctctggtacaagttcttcaggatcctgatctttttccgaacgaactgttcaggcgcgtttgcacccttgaaatcaaggcgctcggcaagcgggcggatgcaactcagaatctgtacttgtcatggtttctcctttcgactaattgcagcgacatcggtgacatatcacctgaactgttgacagcaactcgtgatttcaagctcgcgtcctacaaatggtgggagcttctccgagtaagcttcgaatcggtgcacggctcagctagctttccagttccgcctcgatccagggtgtttggggaagttcgcactcggtcacttgagtgggtcctgcgcgaagatgcccgactctctatttggacggagctgtatgagcggatgtttgcgtcggagtacaagacgtacacccctcagcagtacactgatgctaggcacttcttccgttggcttatgactttggagtcgtggccatctcctcaggcacttgaccacaagcaggtacggaatgatgggcaagaccgtgatggcagttcatttcgagagtacttggataactacgtcacaaagacgaccaggcagaagcccggtcctttaagagcagcatccaagacaggcgcaatgcgccagctttaccgcgtaatggatttcaacaggcaagagaacttgagcgcgattgcgctcgatcagcgattgattgggtctttgcgagttgataacccagttgcagaaggtgactggatttggaagcaggccgccccacgacggactcatcgctctgctgtcgggacggacgtgctggagttctgccgagaactgcttcttgatcgcgatggcagcggtgtcccaacgtttggctggccgcagtcacagagctccctcaggcgcgactggatcgtggtcgatggagcacatagcggaaagtggccatatgaacgcagtctgcctgggggccgaattgagatatggcagcccacacgtgcgcttgcgatctacttgatgcttgagttgccacttcgcggatttcaggtcaggtggctcgactctggtctgggcgacgagtacgtgtgggatatgcgcgcggcgaggcttgtagagaacgattcggcgctcgctgaaatctctaggagctttggtgtcttccgtcccctaacgaatgacgtgctgtcgggcaacgatcagattggcatctacgtcactacaaacaagacgcagatgtggaatcccgaagattttcgcggattcactattccctggccggacgcggagatttactccatccttgatatccagcgggagtggtgcaaggttgccgcaacaatttttcatacggagaagttgaggctgtcggatgatgatctcaacatcaaagccaatgttgtcgacatccttccgggatttcacgtgctgtttcgagatgcctcaagcttcgcaggtggcaatagaccagtatcgtcggcaaagatggaggctctctgggtactgttgtgcggggaagctcaggtcgaatggagcaggagaggaacgccgctacggcttctcactcagagatcgggaggccgcgcggacgcgaagagggctattcacgaccttcactccctccgagtctcggggattacatcgctgtatctaaagggcgttccggtagagatcatcagcaagtacatagcgggtcatgcatcgatcgcgatgacactgcactatgaggcatcagatccccgggagatacgccgcaggctacatgcctatcagcatcgttctgagtcgaactctgggcgggacgatgcccgccagctgatggagcgtctcgagtcaggcgaatcgctctctcccgagcttcttaaggaggtattcggtcaggacgcattcacgcggcttctcatgtcaaacgacttcctgaccgaaagccaagtcgggatagaggcggctaagcatgtgtcagggagttgggtttggtatggggatggaatctgccccggcgctaagtgcagcgagggtgatgagctgggagggccggtaaagggcggagccaggagctgtgggaactgcaagttctttttgaccggaaccgcgttcctgtacgggcaggctcaccgctgcaatgagctcatgtacgatcttcgccgtctcggcctggagcgcgaaaattgctacgcgatgaagcgtcaggctgctgttggatcgaaggcgtacgtgaatgctcaagctagaatcgaggaaatagatgcgcacatcgagccgaagctttctgactggtgggcacggtatcagcttcttcagaagagcattgcagctacggaacgaatcgctcctcaaggaggagctcaggctctgacgagtgacgcgcctcgcgaagattttcaggtttcggcgactgtgacgaatcatgtccagcttttgaaggagttgtcgcagagttcagatatcctcaacgctggacaggagaacatggggcctgtcttggagctcaactccatcatcaacgtggtgctctccaaatgtggcatcgatcccttcttgcttggcgttccggacagtgttggacgcgcgacaaccaccgtggttgccgaggcgatgcagaatctcttccggatgcactataactgcacggacacagacgcctacagacggattcagaacgtctatgaatccgttgacgcaatggttgaccctgtactcgcggcgagtttggcgagcgtcgcagatgcgttcaagccaatgctacaagctggtgcatcgtctgcagtgacgtgggatgaagatgtcggtgggagactgctagggaagaaggcgcatgactga

SEQ ID NO: 498992 - DNA, 699 bp, Stenotrophomonas maltophilia
atgactgaccaagtcgaagatcaatggaaaagctcagaacttctgtatgagtacatctgcactaaacccgggattgacgttcggctgaaaaagtcaattgaccgaattaggtcagtctgtaatgagatcgcagaagaggcacgtcgtcacaagaagcttggcggaacattcaagcgctctccgatcttcattgcggaggttggaaggcgttgcacggaaacgtttggcggaccgtcagctgcgtcgatcgttcgcaaccgttccaaggagccgctcaaggctatctacattgagctaaggtccgaggagcttaggctagatctgcggatgccagccactgctgatccctcgcgttcagacgacacggcagttgccgcatacgtacggtcgctggagcaaaggctcagcgtgagcgagcagatggtgattggtctttcacagacactgcgtggccttaggccagtctcgctccagcaggcgctcatctccgggacgcgagaaggagattcccttgacttggtcgctggagcgcaggagaggccatccgacaccgaagtatccgagttgatacagaagttattggacgagcgccatctcagtcggttcggtcttcggttagatcgctctgtcttcaacagcgccactggggaggaactgctctcacccgaggatgtctctacccttcagcgtctgaggtag

SEQ ID NO: 498993 - DNA, 960 bp, Stenotrophomonas maltophilia
atgaagccgagcattctggcattggacctcgaagggacactcatttccaatgcgataagccagattccaagacccggcctctgtcggttcttggaggacgtccgatcgcacttcagtcagctcatgatgtttacgactgtgccggaagagcgctttcgcagcattgccgatctgttggttcgtgaaggaagcgcgcctccgtggttcgcgagcattgagtacatccattggacgggcagcacgaaggatctacggctagccacaccaaaattaggcgcggccttgctgcttgatgatcatcgcccctatgtacacccaggacaggagcatctgtgggttcagatacctctgtttgcgtctccctacccgtcagaggacgagggattagcgatcgcgcttcgactcctgcttgatcgcatccacgcaacgggcaatttcactgaagcatctctccaagaacagctaaaaccacaggcagaagcaacgggcgcaccacggcgttccgacgcctgctcatcggcccagaagatcctgtccgacgtcgccgtcaggagagatgaacttgccgcacagtggcataccgccgccgaagtcagttcacagctcggtccgtcgttgaccagtggtagcggcctagcaggtcagctgcgaagagccggccagctacttggggtctatgtaacgaagcctgtgcccggctatcgctacccagactggcagtttggtgaaaatggcgaacccgttgaatatttggcagaaatcctgtcagtactgcgtgcactcgatcatttcgagatcgagccggacaggctatttcgcagcaccggatggagtgaggcagagtggtttctctcaccgcacgctctgctcaacggcatgccacctgccgaagccctgacctctgatccagctcgcgtgctgcaggcggcccgtaccgagttcgggcaagaggactcatag

SEQ ID NO: 498994 - DNA, 435 bp, Stenotrophomonas maltophilia
atgaaaatcagtgacgctgccgccgccagcgggtgccatctggagacgatccgctattacgagcgtatcggcttgctcccgaggccggcacgatcaggcaatggttaccgggtctacggagtgccggacattgagcgcctgcgcttcattgcccgcggtcgggacttgggtttcagcctggaagaggttcgtagcctgctgcagctggccggcgacgagggcctgtcgtgcgtggatgtggatcgtctggcccgcagccacttgtccgacattcgcgcccggatggcagacttgcaacgtatggccaacgagctggagcgggtaatcgccagttgtcacggcggacagcgagctgagtgcaccatcctatcgacgctgcgccggccggcttccgaggactccttacgcgagggatcgagcaagagcgcttcctag

SEQ ID NO: 498995 - DNA, 618 bp, Stenotrophomonas maltophilia
atgagtgattgtggctgccaccacgaggcaaagaacgcgcaggaacggcgcgtgctgtggatcgctctggccctgaacgctgcaatggctgtgattggcggcatcgccggctggatcgcccattccacgggcttgcttgccgacgcactggacatgctctccgacgccacggcctacgccattgggttggtcgctatcggtcggacggcgcgcttcaaggccaacgctgcttgggtcagcggtagcgtgctgctgattctgggcgttggagtgctggtcgaggtcggccgccgcgtactccacggggctgaaccggtaagcgggtggatgatcggtacggccctattgtcgctagtggtcaatctggcggtcctacgtatgttggcgccactgaaggctggcgaagtacatctgcgggcaacgtggcttttcacccgagccgatgtggtagccaacgtgggcgtgatcctagcgggcctactggtgtggtggctggccagtccatatccggatttcgtaatcggtgcccttatcggcctctacgtgatgaaggaagcctttgaaatattgggcgacgcgcggcgggcacgcgcagacgcgcgcaagacccctgcatga

SEQ ID NO: 498996 - DNA, 1278 bp, Stenotrophomonas maltophilia
atgtctatgcgatgggcggccttggccgcgttgctgttaacgggcacagcagcgatgtctgctgcggcggccgaattgatgaccttggacgatgccttcgcacgcgtagcccaaacccatcccgaactgcgtctgctcgatgcgcgagccactgtcctcgctgccgagcgagataaggcggtacagcgcccaccgtggacgctcggtgccgaggtcgaaaacgcgctgggcaccggcgcggccggtggcttggacagcgccgagttgaccttgagcctgagttcggtgctggagcgcggcggcaagctcgacgctcgccgtaccttggcacaaagccggattgatgcgttggccgtgcagcgcgagaccgggcgcctggacttgctagccgagacggcgcagcgctacttggctgtcgttggtgccgaccggcaacgcaacctagcggacatcgatgttagccagcgccagcgaactgtggccgccgccaggcagcgcctgcaggccggcgcttcacccgagtcggtgctgctcaccgcgcaggcagcgcttgcgcgggccgagctgacgcgtgatcgggccgagcaacagcgactcgctgctcgtcagcatctggctgctttgtggggcgaacgtactcccaccttcgaagtggtcccggccgatccgatggccctgccggcgatcgcctccatgcagacgctggccgatgagttggaacggactccggaattggcgcagtttgccgacgcccgccggatcgcgcaggcacgactgcagctggcgcgttcagcggtctcaccggacctgtcctggcagctcggagtgcgccgactacaggagaccgatgacaccgcgctggtcgccagcttatccatgccgctgggcagccgcagccgcgcacagccagagattcgagccggcgaagccgagctgcaggtcctgacgatcgagcgcgaggccaagggcctgtcgctgtactccacgctggtcgaagcccatggccgttacaccgtggcacaggccgaggtggcgcgcctgcacgacgacgtgttgccgaagctggcccgagccgagcaggccgctgagcgtgcctatcgtgctggggcgatcagttacctggaatgggcacagttgcagtccgaacgcaccgccatggcccagcaacagctggacgtcgccttggatgcgcagcgcgccctgatcgaaattcaacgactgaccggccaggcgcttgttgcgccgccggctgccgcttccactggagagaccccatga

SEQ ID NO: 498997 - DNA, 948 bp, Stenotrophomonas maltophilia
atgaaccgcttttcctggactgcactgggcatggccctgatgctggcggcctgcaacgcgtcgacccccaacgaagcatccgaaggaggccaagccgctgagggcgaagagcacggcgaccacgaggaagcgccgctggaaaccgagatcgcggccaaagctgcgcaggcggcgggaatccaggtcgcgccggctggacccggtgagattgccgatgagcatgaggtgcaagggctgttgaccccaatcgatgggcgcatcgcgcaggtcactgcacgcttccccggaccggtccgttccgtgcgagtgggcgtgggtgaccaggtacgcaccggccaggtgctcgcgacagtggagagcaacctcagcctgaccacctacaccgttaccgcgccgatcaatggcgtggtcatggcacgtacggccgccgtgggcatgtcggtgcctgagggcgccccgctgttcgaggtagccgacctgtccacgctgtgggtggacctgcacatcttcggcgccgacgcccagcacatcggtgccggcgtgccagtgacggtcacccgcttgagcgatggcgtcacggcgcagaccacattggagcgcgtcctgcccggcaccgctactgccagccaaagcactattgcccgcgccaccgtagctaacaccgatgggctgtggcggccgggttcagcggtcaaggcgcgggtcaccgtggatcgccaatcggcgtcgctggtggttccgatcaccgccctgcagaccgcacaggaccaggacgttgtctacgtgcagcagggcgagacgtaccacacccggccgatcaagctggggcgccgtgacgccgaacgcgccgaagtgctggaagggctcaaggcgggtgaacgagtggtggtggcccaaagcttcctgatcaaggccgacatcgaaaaatccactgtggaagaggaatga

SEQ ID NO: 498998 - DNA, 1290 bp, Stenotrophomonas maltophilia
gtgactccgctttccttgcctacttcccgcacgacgggcttcctggccggcgcctacgccgtggtgctgggggcgttgccaacgctgctgatgatcacgatggagggcggcagcgcggggttctacctggcgatcctgctgtcgatcgtcctgctgctggtgccctcggccgctccgcgcctgctgcccggttccgcccggcgctatgcgtggatgggcatcggcatgggcgtgatgctggtcggcgtgctgatcagcctgggcgtgcatggcatctggaagggatcggaggtcgaaaaggccgcacgcctgttgtcgatgctgctgatcctgttcgccgcgctgcgggtgccgcgcaggatccttgcgcgggcgatgcttggcaccctgcccgcggtgtggtcggcagcagccatcattggctggttggcgctggagaccggcgtgcggcctgccacccagcagttcaatgcggtgacctacggcgacctgaccctgttgttcggtgtgctgagcctgatgtcgctgggcctgccggtaacccgtttcacccgcatcgaagccacgctgaagctgctgaccggcatccttggcctggtcgcattcctgtggacgcagacccgcggtggcctgctggcgattccctgcttcctgctgatcggcctgctggtgatggggcgccggcttggccggatgaagatcctgctgggcctggtactcgcggccggcgtcggcatcgtcgccacccatgatggtgcgttgcgcgatcgcatcgatgcgggcgtgagcgagtatggcgattgcagtgccgaccacctggcagatacctcggtctgcatccgccttcagttgtggaccgcggctggctacatgatccgcgagcagccggtgttcggtgtcggtggtggcgaccgcttccgccaggagctggaacgacttgccggacagggaaaggtgtcggcgatggtcgcgcgtgatttcggcgagacccacaacgacctgctgtatttcctggccacctacggcgtgctgggggggcttggcctggtgctggtgtacgtcgccccggcgctggtgttcgtgccacgcctgtggcgtggcgacgaacggtcgcggttgcatgccgcggcagggttgagcatctgcgtggcattcgccgtcttcggggttaccgaaatgatgctgcgtgacatgcggaccgcctcgttctatgccgcctgggttgccctgctgctggccctgtccgagccgcgccggtcagatcaggctgaggccagcaccgcttcgtag

SEQ ID NO: 498999 - DNA, 345 bp, Stenotrophomonas maltophilia
atgcagcacggtttgcagggccatgacacgctgctgggccgctacggtggcgaggagttcgtgctggtgctggccagcagcacgcaggcggaagcgatggcgcgggctgcggcgatccgtaccgctctgcagcagaagccggcgcggctggccaccgggccggtgacgttcactgccagcatcggcctggcgatggacgacggtcagggcgagctgtccacgctgctggcagcggcagacgcggcgctgtaccgggccaaggccgccggccgcgatcgcctggcctgcgccacgccggcggagatttcgcgtctgcccatcgccgacgacgccgtgcccgtgtaa

SEQ ID NO: 499000 - DNA, 552 bp, Stenotrophomonas maltophilia
atgaagattccctttgccgccgtactcgcgctcggtcttcttgtccccagcgccgccttcgccaagtccaccgaccgcaacgaagacatgcacatcgattccggcgcccagtccggcatgctcaccggcgacggcaagaccgtgctgtcgcagggcgtgatcatcacccagggcacgctggacctgcgttcgtccgaggccgagatctacctcaaggacggcgaggccgtgcgcgtggtgttcaccggcaagcaggccaagatgaagcagcagcttgatgacggcacctggatggatgcgctggctgatcgcatcgactacgacatcaagaccgagatcatcaccctgaccggcaactacaaggtcaccagcgcgcgcggcaccaatgccggccagcgcatggtctacaacacccgcaccggcgagatgaactccggtggtgacggcagccgcgtgcgtaccgtcatcccgccgaagaacaagaccccggccgcgcctgcggcacagcccaaggccaccacgccggcacagccggccgggagcaggaagtaa

SEQ ID NO: 499001 - DNA, 720 bp, Stenotrophomonas maltophilia
atgctcgtcgccaagggcctgcgcaaaaagtacaagcagcgcgaagtggtcaaggacttcgggctgaccctcgatgcgggtgaagtggtcggcctgctcggccccaacggtgccggcaagaccacctgtttctacatgatcgtcggtctggtggccgccgatgccggcagcatcgtgctcgacgaaaaggacatcaccggcgacccgatgtacacccgcgccaagcagggggtgggctacctgccgcaggaaccgtcggtgttccgcaagcttaccgtggccgacaacatccgcctggtgctggaactgcgcgaggacctggactcggccggccgcgagcgcgaattgaacggcctgctagacgaactgcagctgggccatgtcgccgaccagctcggcgccagcctgtccggtggcgaacgccgccgctgcgagatcgcccgcgcactggccgcacaaccgcgcctgatcctgctcgacgaaccgttcgccggtgtcgacccgatttcggttggcgagatccagcgcatcgtcacccacctcaagcagcgtggcatcggcgtgctgatcaccgaccacaacgtgcgcgagaccttgggtatctgcgaccgcgcgtatatcctcgccgagggcagcgtgctggcccagggttcgccggaggcgatcctggacaacgccgatgtacgccgcgtctacctcggggattccttcaagctgtga

SEQ ID NO: 499002 - DNA, 1422 bp, Stenotrophomonas maltophilia
atgaagactcggctgcagacatcgttgggacagcaactggtgctcacgccccagttgcagcaggcgatcaagctgctgcagatgtcggccaccgagctggagctggagatcgcgcaggcagtggaaagcaacccactgctggactgggccgacagcaacgacagcagcgccgccaatgaaggcagcgatggcaacgacaacgaagcgcctgcagagcgcagcgatgagggcgacgactgggcgccgaccgaactggactggacgacgaccggcagcggtggcagcttcgatgatgacgacgacaacggcagcgccgccgagcgcgtagccgaaaccgaaacactggccgaccatctgctgtggcagctgcatctgtcgcatctgtcctcgcgtgatcgcagcatcggtgccgcgctgatcgatgcactggacgacgatggttacctgcgcgagccgctggccaccatcgctgaaaccctgttgccggcgatccacgccgacgaggacgagatcctcgccgtgctgcaccgcatccagcgcttcgatccggtgggtgtggctgcacgcacgctgggcgaatgcctgctgctgcagctggatgtgctggccggcgacacgcccggcctgctcctggcgcgacagattgccgcaggacccctggaacgtttgccgcgcagcggcgtcaccgggctcgcccatgagttgaagctgccgctggacgaggtcgagactgccgtggcgctgctgcgttcgctggacccgcgcccgggcacgcagatcgcgccgctgtcgcaggacacctatgtggtgccggatgtggtggtgtggcggcagaacggcgtatggcgcgcagcgctggccgcgcatgccgggccgaaggtggtgatccaccgcggctacgaacagctgatccgacgttgtggcgacgccgatgccggctacctgcgtgcccagctgcaggaagcgcgctggctgctgaaagggctgcagcagcgtggtgaaaccctgctgcgcgtcgtgcgcagcctgatcctgcagcaggccggcttcctcgaattcggcgagcaggcgctgcgtccactgaccctgcgcgagatcgccgccgagctcggcctgcacgaatccacggtctcgcgcgcgatcgcccgcaagcacgtgcgtaccccgcgaggcactctgccgctgcgcgccttcttcgcctcgggcatcgataccgagagcggtggcgaagcgtccagcaccgccatccaggcgatgatccggcgcctgatcgacgacgagaacccgcgcaagccgctttctgacgccaagctggctgacctgctcaaatcgtcgggaattccagtagcgcgacgcaccgtggcgaagtatcgtgaagccatgaacatttccgcctcgcacgaaagggtcagaatcgcttga

SEQ ID NO: 499003 - DNA, 318 bp, Stenotrophomonas maltophilia
atgcgcatcgaaacgtttggcaaagatgtcgaagtcaccccggccctgcagtcctatgttgaggagaagctggcccggatcggaaagcacttcgaccagcactgcgaagcgcgggtgaccctcaagctgcagaagaccgaacaccacgtcgacgccagcctcaacattcccggccagaccctgcacgccgaggccaatgcccagacgatgtatgccgcgatcgacctgcttgcggacaagcttgaccgtctggtgatcaagcacaaggagaaaaaacagcagcacgcaccgctgccggtgggcgacaatggtggctga

SEQ ID NO: 499004 - DNA, 453 bp, Stenotrophomonas maltophilia
atgcccctgactgacctcctggcggccgtgcagacccagctctgcacggccaccgaccgtgacagcgtcctgcaggccgccgccgggttgctggcctgccgccaggccaacgccgaacagatctatctgaacctgtgccagcgcgaagcgctgggcagcacggccatcggccacggcatcgccattccccacggccgcgcgccaaccctggaccgcccccgcggcgccctgctgcggttggccaccccggtcgatttcggtggcgaggagccggtggacctggtgttcgcgatggccgtccccgcccactacacccaccagcacctgatgctgctgtccgagctggccgagctgttctcggcgccggacatccgccaggccctgcgcgaagcgggcgatgcccgggcgctgcgcgaggcgctggacatgaccccacctgcgagtgccgcatga

SEQ ID NO: 499005 - DNA, 951 bp, Stenotrophomonas maltophilia
atgaataccagcatcaccgcccgtgaactgttcgaacagcagcgcgagcggctgggactgcgctgggctgccggcaagtccggcgagaagcgcgagctggaggccggcaacacggtctcgcggcgcccctcgctggccggctacctcaatgccatctatcccaacaaggtgcagatcctgggcaccgaggaactgtcctggctggatgcgctggaaccgcgccagcgttgggagaccatcgaaaagatcatgcagtcgcacccgctggcgctggtgctgacccgcaaccaggcctgcccggaagacctgcgcgctgccgcggacgaatccggcacgccattgtggctgtcgcccaagcgcggccacgaactgctcaaccacctgtcctaccacctggcgcggacgctggcgccgcgggtgatcctgcatggcgtgttcatggagatctattccatcggcgtgctgatcaccggcgaagcgggatccggcaagagcgaactggcgctggaactgctcagccgtggccatcgcctggtggccgacgatgcacccgaattcacccagatcgcgcccgatgtactcgatggcacctgcccggagctgctgcaggacctgctggaagtgcgcggcctgggcgtgttgaacgtgcgcgagatgttcggcgacacggctgtaaagaagaacaagtaccttcggcttatcgtccacctgaccaagccgatgaccgaacccaccccgcatggctacgagcgcctgaccggcgattcgggcacccgccatgtgctggacctggacgtaccgctgatcaccctgccggtgatgcccggccgcaacctggccgtgctgaccgaggcggccacccgcctgcacatcctgcgcaccaagggcatcgacccggcagccatgttcatcgcccgccacagcaacctgctggaacggcgaacaccctga

SEQ ID NO: 499006 - DNA, 885 bp, Stenotrophomonas maltophilia
atgagcaccgtcaccccctccgccccgaccctgatcatcgtcagcggcctgtccggctcgggtaaatccgtcgccctgaagaccttcgaggaccaggactactactgctcggacaacctgccgatcaatctgctgcccgacttcgtgcgcagcctgctgaccaaccacgacggcagcgcaccacggcgtctggccgtaggcatcgacgttcgcggccaggccgacctgagccagctgggcgactggcggcagctggcggccgacgccggcgtggacgtgaaggtgctgttcttcgaggccagcgacgaggccgtgctcaagcgctacgccgacacccgtcgccgccatccgctgagccagctgggcctgtcgctgcctgaagccatcgcccgcgaacgcgagttgaccgcaccgctgcgccgcgaggccgatgcggtgatcgacaccagcagcctcaacgtgcatcagctgcggcggcggatcatcaccgagttcacgatggaccatgccaccggcctgtcgctgctgttcgaatcgttcgcctacaagcgcggcgtgccggccgaagcggacttcgtgttcgatgcgcgggtgctgcccaatccgcactgggacccggacctgcgcgcgctcagcggtcgcgaaccgggtgtacgcgactacctggaagcgcagccggacgtgcagcgctacctggcccagctgatggacttcctcgatacctggctgccgaagctgagtgatggcacccgcagctatgtgaccgtggcgttcggctgcaccggcggcaagcaccgctcggtgttcctggccgagcgtctggcccggcatgcccgcgagatgggctgggaagacgtggcgacgtaccaccgcgaacaggattga

SEQ ID NO: 499007 - DNA, 393 bp, Stenotrophomonas maltophilia
atgacctgtggcattctcctcgtaacacatcctggggtcgggaccgccctgcttgacgtggcgacccggctcctgcggcagttgccgctgaaaaccgaagctttcgaagtaccgttcgacgcagacctggacgccctgctcccgctcgcctcggccgccctgcggcgggttgacgggggtgatggtgtgctgatcctgaccgacctgtacggcgccagccctgccaaccttgccgggcagctggcccggctggggaccccggttcgccgggtgtcggcgctgagcctgccgatgttgctgcgggtgatgaattatccggaacagggactggatcaactgcccgccacagccgcggcgggtacccgtaatggagcgatagtcgacgatgcttga

SEQ ID NO: 499008 - DNA, 270 bp, Stenotrophomonas maltophilia
atgcttgaacgagaactcaccgtgagcaaccgcctgggcctgcatgcccgggccaccgccaagctggtgcagaccctggcgccgttccgctgcaacgtgaccatggccgccaaaggccgtgagatcaacgccaagagcatcatgggcgtgatgctgctggccgccggccagggcaccccggtcaccgtgcggatcaacggcgaggacgaagccgccgcgatggaggcggtggtcggcctgttcgaacgccgtttcgacgaggacagctga

SEQ ID NO: 499009 - DNA, 1770 bp, Stenotrophomonas maltophilia
gtgccacgcgcacgcgccggccaacccccttccggccagcggccggtactgctgctggccgggcatggtgccgcccgcggcacggcaatgggccgcgcccgcgtgcgcctgccgcatgcactggaagtggccgagcagcgcgttgccgcccaccaggtcgaggccgagctggcgtgcctgcatcgcgcggtggacgccgcgcggtcggagatgcacgagctgcgccagcgcctgcatggagcgctgaaccaggaagtgggtgagttcctcgacctgcatgcgctgctgctggacgatcccgagctgctgtatgggctggacgaactgatccgcagcggaccgtacagcgccggctatgcgttgcgcctgcagcgcgaccgcctggccaaggtcttcgacggcatggacgatgcttacctgaagagccgcatggacgacctcgaccatgtgatcggccgcattcatgccttcctgcagcccgaacgcccgccagcggtgaaaggcctggccggcgagatcctggtctgcgacaacatcgcgccctccgaactggcacagctgcaggcgcaaggcgtggtcggcatcgtcaccgccgccggcagcgcgctctcgcacagcgcgatccttgcgcgcagcctgcacctgcccttgatcgtcaacgtgccgcagctgctcagccgcatcgccgatggcgacgtgctgatcatcgacggcgccgacggcagcatcaccgccaatccacaggccgacaatctgcgcgactaccgcgcacgactgaaggaacacgcgcgcgaacagcgcgagctcggccgcctgcgcagcaagcccagccgcacccgcgaccaggtcgacatcgccctgctggccaatgccgagtcgctggaggacgtgacccaggcgcatgcgctgggcgcccacggcctgggcctgtaccgcaccgaattcctgttcctgcagcgcaacgagctgccggatgaagaagaacagttccagacctaccgcgatgcggcactgggcatgagcgggcgaccggtgaccatccgcacccttgatctgggcgcggacaaggccgaccgcaccggcctgaccctgagcaacgaagaaaacccggcgctcggccttcgcggcgtacgcctgtcgctggcacggccgaaggtagccgacacccagctgcgcgcgatcctgcgcgcctcggcctacggcaagctgcgggtgctggtgccgatggtcagcacccgggaggaactgctggcagtgcgccgccgcatgctcaagctgaccgaacagctgcgcggcgaaggccacatggtgtccgaccacgtgccactgggcgcgatgatcgaagtccctgctgcggcgctggcgctggaaagcttcatcgacctggtcgatttcctgtcgatcggcaccaacgacctggtgcagtacctgctggcggccgaccgcaacaatgaagcactgggcgagctgtattcgccgttgcacccggcggtgctgcggctgctgcagatggtgatcgagaccggcgcgcgccaccgcatcccggtggcggtctgtggcgagatggccggcgatgcgcggatgaccccactgctgctggcactgggcctgaccgagttcagcctgcacccgggcacgctgctggaagtacgccgcgcggtccgcgaggccgacctggccatgctgcgcgcgcgcgcaccgaagctgctggccgcgcgcgaccgccgcgcgatcgagcgctggctggcgctggtggccgaaacggcctga

SEQ ID NO: 499010 - DNA, 1362 bp, Stenotrophomonas maltophilia
atggctgaagctgtacgccacgacaagactgcgcgccaactgcggatgctgtccgatgcactggacagcggccggctgggcccggtgcgtcgcctggtcaacaccctggccccggccgagatcggcaacctgctcgaatcgttgccgccgggcaagcgcgaggtggtgtggggactggttgatccggaagacgacggcgaggtgctggtccacgtcggcgacgacgtgcgcgaaagcctgctcgcggacatggacccggacgagatcatcgccgcggtcgaagacctggacatcgacgatctggccgacctggtcgaagacctgccggacacggtcatcgacgaagtcctcaagtcgatggaccgcgagaaccgcgagcgcctggaacaggtcctgtcctatcccgaggacagcgccggtcgcctgatgaatccggacgttgtgaccgtgcgcgccgacgtcaatgtcgacgtcgtgctgcgctacctgcgcctgcgcggtgaactgcccgaccacaccgaccacctgttcgtggtcagccgccgccatcagtacctaggccgcgtgtcgctggcggcactggtgacccacgaggacaccaccccgatcaatcgcctgatcgacgacgagcagccagccatcgacgtcggcgagagtgaccaggaagtcgcccgccagttctccgaccatgactggatctccgcgccagtggtggatgacaacaacatcctgattggtcgcatcaccatcgatgacgtggtcgacatcatccgcggccaggccgagcaccaggcgctgggcgccgccggtctggacgaggacgaagatctgttcagcccggtctggcgcgcgatgcgccgccgcctgatgtggctgtcggtgaacctgtgcacggcctttctggcctccagcgtggtcggccacttcgaaggcaccatcgacaaactggtggcgctggcggtgctgatgccgatcgtcgccggcctcggcggcaacgccggtacccaggtgctggcactgatggtgcgcggcctggcgctgggccaggtgggcgcctccaacgcccgcaccctgctgtggaaggaagtacgggtcgcgctgttgaacggcgtgatgctgggttcggtgctgggcctgatcgtgctcgcctggttccactcgcccgggttgtcggcagtgatcgccatcgcgttgacctgcaacctgttgtttgctgcgttggccggcgtgctggtgccgttgacgctgaaacgcttcggcttcgacccggcgctggccagcggcatcttcctgaccgccgtgaccgattcgatgggcttcttcaccttcctcggcctggccaccctggtgctgctgcactga

SEQ ID NO: 499011 - DNA, 267 bp, Stenotrophomonas maltophilia
atggcaacgacaatcgaaaactacttccagcccggctggcgcgaccaccagcacacctgcccggcctgcgaatggaagggcagctcgcgtgccatggagatggagctggacgaggacgccaccgagtacgactgcccggtctgcgagaacccactgctggtggtcctgcacccggacattgcgcaggtgcaggccgccgccgccgagggcaatgccgaggcacaggagcagttggagatcatcgccagcttcccgcgcccgcagtga

SEQ ID NO: 499012 - DNA, 798 bp, Stenotrophomonas maltophilia
atggtccgtttgctgtcgcgctggctgtcactgctggcccttctgatgatgagcggttgcacttcgctgccggacaacgcgcgtggccgcttcgaagcacgtgcggtgaaggtggacgggcaaacggcttactaccaggtgttcattccggccggcgtgcaggccgccgctcccacccaccttccggtcgtcctgttcctgcacggctcgggcgagcgcggcgccgatggcgtcaagcagacccacgccggactggggccttacctgcgtgcgcatcccgatttccccgccctggtggtgttcccacaggtgccgggccacgaggaatggagcggccgcaacaaccgtgcggcagtggccgcgctggacgcgacgatcgccgaattcggcgccgacccggcgcggcaatacctgaccggcatgtcgatgggcggctatggcagctggaacatcgcattggatgacccacgccgctttgccgcgatcgtccccgtttgcggcgcggtgctcgccccgcgtgcggtacgcccgaccctgttcgtcgagcaggtcgcgcacgaagcggacccgtacgcggtgattgcccagcgcctgcagcacacgccgatctggatcttccacggcgcactggatgacgtggtgccgccggacgacgaccgcagactgcatgccgcattccagcgcgccgccgcacgcgacgtgcgctacaccgaatacccggaaggcaaccacaatgcctgggacgccacctacgccgacccggcaatgtgggaatggctgttcgcgcagaagcgctga

SEQ ID NO: 499013 - DNA, 492 bp, Stenotrophomonas maltophilia
atgagccgcgcacgcctacgccttggccgccattcccggatcggacaatcctacatcctgaccaccgtcatccaggagcgtcgacgctacttcgatgatgccactgcggcacaggaggtgatggatgtgttccgtcgcattgatgctgagggcctgacgcactcacttgcctatgtggtcatgccggaccacatccattggcttgtggagatccgtgcgttctcgctggactacatcatgcaacgcttcaaatcgagcagtgcattgcggatcaaccgcatgctgggtaggacaggaccattctggcaatcgagctatcacgatcacgccattcgttctgaagaatcactgtttcgccatgcgatgtacatcgtcgccaacccggtcagggcgaacttggcgagctgcgtgggagagtatccgtatgcctggtgccgatgggagatcgatgagaggtaccaggcaatggattatcccgaagcggagaggtag

SEQ ID NO: 499014 - DNA, 951 bp, Stenotrophomonas maltophilia
atgaccgcccagcaaatcgatgcctccggatgcctgcgccacctgctgaccctggagggcctgccgcgcgaaacgctgcttcagctgctcgaccgcgcagggcagatccgcgatgccgcagtgggccgcgtcggcaacaagcgccaggtgctggccggttcggcggtgtgcacgctgttcttcgaaccgtccacgcgcacccgcagttcgttccagctggccgcgcagcggctgggggcggacgtgctgaatttcgacgcctccacctcctctacccgcaagggtgagaccgcctgcgacacgcttcgcaacctggaagcgatgggcgtgcgcggcttcgtggtgcgccaccccgatgacggcgccgtggccgcactggccgatgcggcaggcgagggcaccgcgctgatcaatgccggtgacggccgcagttcgcacccgacccagggcctgctggacatgctgaccctgcgccaggccaagggcccggatttctcgaagctgaaagtcgtgatcgtcggcgacgtaaagcactcgcgcgtggcccgtaccgacctgcatgcgctgcgcacgctgggcgtgggcgagatccgcgtgtgtggcccgcagtcgctgctgccggacgacgagaccctgaagggctgcgtggtcggcgatgatttcgatgcgatgctggaaggcgtcgacgcgctgatgatgctgcgcctgcagcgcgagcgcatggaagaaggcctggtgccgtcgctggagcagtaccacgcgcagtacggcctgaccagcgaacgcctggcgcgtgccggcaaggatgcggccgtgttgcacccgggcccgatcaaccgtggcgtggaagtgaccgatgacgtggccgacggcccgcagtcgtgggtgctgcgccaggtcgccaacggcgtcgccgtgcgcatggccgtgctggaaaccctgctgggctga

SEQ ID NO: 499015 - DNA, 495 bp, Stenotrophomonas maltophilia
atgtctgagcccatcacgcccgcgccggattctgctgccccggcgatccgtcgtgatggcaccgttctgggtttcgatgtcggctcgcgacggatcggcgtggccatcggcagtgccttcgccgcgcatgcgcgcgcggtggccgtggtcgatgtgcacggcaacggcccggactggaccgcgatcgaacgcctgctcaaggaatggaagcccgacggcctggtggtcggcgacccgctgaccctggacggccaggaccagcccaaccgcaagcgcgcgcagggcttcgcccgccagctgcgggagcgcttcaagctgccggtggtgatgatcgacgagcgttccagctcggtcgaggccgcacgccgcttcgccgtcgagcgcgccgaagggcgcaagcgccgccgtgatgcggctgccctcgatgccgtcgccgcagcggtgatcattgatcgctggctgtcgtcgccggacgacgccacccccattccctga

SEQ ID NO: 499016 - DNA, 567 bp, Stenotrophomonas maltophilia
atgcctgtaacgccgacctcccttgccgatcacctgctcgtcgcgctgccgtcgctgctcgacgcgaccttcgcccgcagcgtcgcgctgatctgccagcacgacgagaacggggcgatgggcgtgctggtcaaccagccttccgagtacacgctgggtgaagtgcttgcacagatggacatcaccaccggtgatggcgacctgcaggcgcgcatggtgctcaacggcggcccggtgcatcccgagcgcggcttcgtcatccatgacgacgcgcgggcgtgggattccagcctgaccgtgggcgacggcctgtacctgaccacctcgcgcgacatcctcgaagcgatggcgcgcggcgaaggcccggccaatgccgtggtcaccctcggctgtgccggttggggcgcagggcagctggaaagcgagctgtccgagaacagctggctgaccgtgccggccgatgccgagctggtgttccagctgccgctggagcagcgctggcagggtgcggcctcgcgcatcggcgtggacctgttccggctgaccgactacagcggccatgtctga

SEQ ID NO: 499017 - DNA, 1800 bp, Stenotrophomonas maltophilia
atgcagtcttcaacgcctttgaccctgccggcacgcagcgccatcgtcctgcttgccctgctgcagggcctgatgctgtatgccgcgcaggaactgtccgacgcgtggccgttccgcgatatcggctggcgctactgctggtacgcctgggtgctggccattcccagcgcggtggcgctgagcctgatggagctgggccagcgccgcctgtggctgcaggccgtgctcggctcgacggtggtgctggcgctggccgcctggatcggctggaacctcaatggcgagaccgcactggaatcgggcgcgttgcagcttccgttgaccctgggcattgccgttgcggtgttcgtggtcctgccctggtggcagttccagctgcagcacgggcactggcgtgccagttaccccgagctgttcgagcgcgcctggcagaatggtttgaccctggccctggcggcactgttcaccgggctgacctggctgctgttgtggctgtggtcggcgctgttccagctgctcgacgtgaccttcttccgcgacctgttccggcaggacgcgttcatcgcactggccaccggcagcctggccgggttcggcgtactgatcgggcgcacccagcaccgcgccatccagatcacccgccaggtgctgttcgcgatctgccgtgggctgttgccactgctctcgttcatcgccgtattgttcgtgctgagcctgccgcttaccgggctggaaccgctgtggaagacccgctcggccgccggcctgctgctggtgatgtcgctgctgctggtgacgttcaccaatgcggtctaccagcagggggaagacagcgccccctacccgctgctgctgcgccggctggttgaagccagcctgctggcactgccggtctacgccgcactggcgctgtacgcactggggctgcgcgtggtgcagtacggctggaccgtggaccggttctgggcggtactcgtcgcagtggccgtggccggctatgccgtgggctacgcgctggcggtgctgcgccggcagcgccgctggttgcagatgctggagccggtcaaccgctggatgtgctgggcggtgctggcactggcattgctgggcaactcgccgctgctggacccggtgcggctgaccctgtccagccagctggcgcgcctgcgtgcggacccgcccgcgatcaccagcagtgacgtcaacgtgctgcgtttcgatcttggccaccgcggcgtgcgggcgctgcgcgagctgcagcgtgatccagccatcaccgccgatgccaacgcgccgcaggtgattgcggctgcgctggcacgtacctcacgctgggatgacggccaccgcctcgacaaggggccgcaggacgtcgtggccctgcagcgcgcgctgaagctggccaagggatccagctcaccaccggacgattggtggcaggcactggccacgcgcgcgatcgatggcgaatcctgcgcccagagcgagcgcgactgcctgatcgtgcatcgcgacctggacggcgatggcactggcgaagtgctgctgtgcgagctgtacacccaccgtgggccggactgcgtgctgtacgcacgtggcagggatgcccactggcgccgggccggttcgctgttcggcaccgtcagcggccaggccgaggcgatcaaccaggccctgcgtgacggcaaactcacgctcgtgccaccgcgctggccgatgctgtccatcggcgggcaccctgcgctggccatcgatcccgaatccgaatccgaacccgaatccaacgagccttccccatga

SEQ ID NO: 499018 - DNA, 546 bp, Stenotrophomonas maltophilia
atgagcggctactgcctcatcgccccgggccatccggtgcacgactactaccacgccaacgagtacggcttcccgcagcgtgacgagcgcgagctgttcgaacggctggtgctggagatcaaccaggccggcctgagctgggaaacgatcctgaagaagcgcgagggctttcgcacggcctatgacggcttcgatgtggactgcgtggcggcgtacgccgagcaggacatcgagcgcctgctgtcggacgcaggcatcatccgcaaccggctgaaggtgctggcggccatccacaacgcgcaggtgatccagcagctgcgggccagccatggcagcttcgcggcgtggctggacgcgcaccacccgcgcagcaaggcccactgggtgaagctgttcaagaagaccttccgcttcaccggcggcgagatcaccggcgagttcctgatgagcctgggctacctgcccggtgcgcatgccgaggactgcccggtgcatgcgcgactgctgacgctgtcgccgccgtggctgagggccgccgcccgctga

SEQ ID NO: 499019 - DNA, 756 bp, Stenotrophomonas maltophilia
atgcagatcgtgtctaataccgctccccacctgctgttccccacccgtatgtcccttccctcccatggccccgcgccgtgcgacgacgctgacggccacctggtcaccgccggtccgctgaccccgccgcccgacagcgccggcaccaccgccgacgaaaaagccctgcgccactcgatcgccgaggacgtgcaaggcatggtgctggccacgatggtggcttcgctgggcctggccatcttcgccaagggcgggctgatgatcggcggcatggcgggcatggccttcctgctgcactacgcgatgggctggaacttcggcctggtgttcgtgctggtcaacctgccgttctactgggtggcgctgcggcgcatgggctgggaattcaccctgaagaccttcgccgcggtcaccgcctgtggcgtgctgaccgacctgctgccgcgctggatcgacttctcgcacatcaacccgctgtattcggcgatcgtcggcggtgcgttgtccggcctgggcatcctgttcttcatccgccatcgtgccagtctcggcggcatcggcatcctggcggtgtacctgcagcgcacccgtggctggagcgcgggcaaggtgcagatgtcctacgacgcctgcctgatggtggccgcgttcttcgtgttgtcgccgtcgaaggtgctgtactcggccatcggcgcggtggtgctcagcctggtgctgatgttcaaccaccgccccggccgctacatgggcgtttga

SEQ ID NO: 499020 - DNA, 450 bp, Stenotrophomonas maltophilia
atgcaggtcacgctggaagcgatcactcccgacaactacgaggcggtgtgcgatctcgaggtcagcgaggcgcagcagggtttcgtggccagcaatacctggtcgctggtgcaggcggcattccatcccggctaccagacccgcgccatccgtgccgatggcgagtgggtcgggttcttcatgtgggtgccggagacgccgcagcggatgtcgatctggcgcttcatggtcgatcaacgctggcagggccgtggcatcggtcgacgtgcgctggaactggcgctggcgcagatccgggccacgcccgggctggccgagatcgagatctgctacaacccgcgcaatccggtggccggcgccttctatggcagcttcggattcgtcgagaccgggatggacgacgatggcgaggacatgctggccgtgctgcccatcgcagtcccggaataa

SEQ ID NO: 499021 - DNA, 213 bp, Stenotrophomonas maltophilia
atgagcactgacaccaagccgaaaggcccggcctcgtacttcccctccatcgagaagacctacgggcagccggtgacgcactggttcgggctgctggcggggaagaagggcctgaaacacatggaactggtcagcttcctgaaaagtgagcatgggctgggccatggccatgccaacgcactggtggcgcatcacctggccggcaagggttga

SEQ ID NO: 499022 - DNA, 897 bp, Stenotrophomonas maltophilia
atgccccgcgaaaacctcaacgacctgcaggccttcgtccacgttgcccgcgagggcagcttcaccaaggccgccgcccagctgggcgtgtcccagtccgcgctcagccatgccatgcgcggcctggaacagcgcctgggcgtgcgcctgctgacccgcaccacccgcagcgtgtccaccaccgaagccggtgcccgcctgctcgacaccctgggcccgcgcctggccgagatcgaggacggactggccgcgctggccgaataccgtgaacgcccggccggcaccatccgcatcaatgccaccggccatgccgccgagtacatcgcgtggccacggctggcgccgctgctgcagcagtatccggacctcaaggtggaactgaccgccgactacgggctggccgacatcgtggccgagcgctacgacatcggcatccgcctcggcgaacgcctggcccgcgacatggtcgccgtgccgatcagcccgccgctgcgcatgcgcgtggtcggtgcacccagctacttccgccagcacgtggtcccacgccatccggacgagctggcagaccacaactgcgtgaccctgcgcctgcccacgcatggcgggctgatgccgtgggatttcggccaggacggcaacgaactgagcgtgcgcgtgagcggccagtggaccttcaacaccatgggcatgacccgcgccgctgcgctggccggcagcggactggcctggctgccggaagaccaggtgcagccgatgctggacgatggccgcctgcagtcggtgctggacgactggtgcccgcacttcgatggctactacgcgtactacccgtcgcgccgccacgtcacggtggcgatgcgcacggtgctggatgcgctgcgcgggccgatggggtga

SEQ ID NO: 499023 - DNA, 1143 bp, Stenotrophomonas maltophilia
gtgaacaccaccgcgaccaccatcgatttcacttcgttcctcaagctgatggcgcaccagcgcgcctcggacctgttcatcactgcgggtatgccgccggcaatgaaggtcaacggcaagatctcgccgatcacgcagactccgctcacgccgcagcagagccgcgacctggtcctcaacgtgatgaccccggcgcagcgcgaggaattcgagaagacccacgaatgcaacttcgccatcggcctgtccggtgtcggccgcttccgcgtcagctgcttctaccagcgcaaccaggtcggcatggtgctgcgtcgcatcgagacgcgcattccgacggtggaagaactgagcctgccgccgatcatcaagacgctggcgatgaccaagcgcggcatcatcctgttcgtcggtgccaccggtaccggtaaatcgacctcgctggcggcgatgatcggttaccgcaaccagaactcgaccggccacatcatcaccatcgaagatccgatcgaattcgtgcacaagcacgagggctgcatcatcacccagcgcgaagtcggcatcgataccgacagctgggaagccgcgctgaagaacaccctgcgccaggcgccggacgtgatcatgattggcgaggtgcgtacccgcgaaggcatggaccacgccatcgcgttcgccgaaaccggccacctggtgctgtgcaccctgcatgccaacaacgccaaccaggcgatggaccgcatcgtcaacttcttcccggaagaccgccgcaaccagctgctgatggacctgtcgctgaatctcaagggcgtggtcgcgcagcagctggtgccgtcgcccgatggccgctcgcgcaaggtggcgatggagatcttgctgggcacgccgctggtgcaggactacatccgcgacggcgagatccacaagctgaaggaagtgatgaaggactcggtccagctgggcatgaagaccttcgaccagagcctgttcgagctgtaccaggccggcgagatcagctacgaggacgcgctgcgttacgccgattcgcagaacgaagtgcgcctgcgcatcaagctcagccagggcggcgacgcacgcacgctgtcacagggcctggatggcgtggagatctccgagatccggtga

SEQ ID NO: 499024 - DNA, 1038 bp, Stenotrophomonas maltophilia
atggatatcgccgaactgctggcgttttccgtaaagaacaaagcgtccgacctgcacctgtccgcaggcctgccgccgatgatccgcgtcgacggcgacgttcgccggatcaacatcccagccctggaccacaagcaggtccatgcgctggtgtacgacatcatgtccgacaagcagcgccgcgattacgaggaattcctcgaagtggacttttccttcgagattccgtcgctggcgcgcttccgtgtgaacgcgttcaaccagaatcgtggcgctggtgcggtgttccgtaccattccgtccgaggtgctcaccctcgaggacctggcctgcccgccgctgttccgcgaagtgatccagcagccgcagggcctgatcctggtaaccggcccgaccggttcgggcaagtcgaccacgctggcagcgatgatcgactacatcaacaagaacgaatacggccacatcctcaccgtcgaggatccgatcgaattcgtgcacacctcgcagaagtgcctgatcaaccagcgcgaagtgcaccgcgatacgcatggcttcaatgaagcactgcgctcggcgctgcgtgaggacccggacatcatcctggtgggcgaacttcgtgacctggaaaccatccgcctggcactgaccgcggcggaaaccggccacctggtgttcggcaccctgcataccagttcggcggccaagaccatcgaccgcatcatcgacgtgttcccggccggcgaaaagccgatggtgcgctcgatgctgtccgagtcgttgcgtgcggtcatttcgcaggcgctgctgaagaaggttggcggcggtcgtaccgcagcgtgggaaatcatggtcggcaccccggccatccgcaacctgatccgcgaggacaaggtggcgcagatgtactcggccatccagactggccagcagtacggcatgatgaccctggaccagcacctgcaggacctggtcaagcgcagcctgatcacccgaaaccaggcccgtgagtacgccaaggacaagcgcctgttcgagtaa

SEQ ID NO: 499025 - DNA, 678 bp, Stenotrophomonas maltophilia
gtggccactcccctgccccagatcctgagcaacctgcatgccgccgccgaggccgctggcaggcccgacccacgcctgctggcggtgtccaagacccagccggccgaggccgtggccgcgctggccgcgcagggccagcacgccttcggcgagaactacgtgcaggaagcactggccaagatgcaggcgctgcagcacctggcgctggaatggcacctgatcggccacctgcagtcgaacaaggccgaggccgtggccagccatttcgactgggtgcagagcgtggaccgccccaagctggtgaccgcgctggcacgccatcgcccggccgcgcgaggcccgctgaacgtgctgatccaggtcaacatcgacgacgaatccagcaagcatggctgtgcaccggaagaagtggatgcactggccgcagcgattgccgccgaacccaccctgcgcctgcgcggactgatggcgattcccgcgccatggcccgaagccgagcgccgtcgggatgcattcgtgcgcatgcgcacacttttccagttgctggctgcccagcacgcgcagatcgacacgctgtcgatgggcatgagcagcgactacgccgaagccatcgccgagggcgccaccctggtgcgcatcggcaccgccctgttcggcgcgcgcccgcgcccggcctga

SEQ ID NO: 499026 - DNA, 822 bp, Stenotrophomonas maltophilia
atggcagctgattccatcaccttcatcggcggcggcaacatggcgcgcagcctgatcgccggcctgatccgccagggcgtgccggccgcgcacatccacgtcgccgaaccggtggccgaactgcgccaggcgctggccgccgacttcggcgtgcaggtgcatgacaacgcgagcgatgccgccgcgcagggtggcacctggctgctggcggtgaagccgcaggtgctgcgcgaggtctgccagtctctgcaggcgctggcacaggcgagccgaccgctggtggtgtcgattgccgccggcatcaccagtgcgcagctgcagcgttggctggggggcgacctggcagtggtgcgcgcgatgccgaacactcctgccctgctcggcgcaggtgtgaccggcctgttcgccacgccgtcggtggacacgcagcagcacgcgcgggccgagcaggtgctggccagtgccgggcgcacggtgtggatcgacagcgaggggctgatggattcagtgactgccgtttccggcagcggcccggcctatgtgttcctgctggccgaagcgatggaagcggcgggtattgcccagggcctgccggccgacgccgcgcgcacgctggtggtgcagaccctgctgggtgcctcgcgcatgctggatgaggctggtgaaagcccggcggaactgcgccgccgcgtgacctcgcccaacggcaccacccaggccgcgatcgagagcttccaggccggtggcttcgaggctctggtggatacggcactgcgcgctgcgcaggtgcgtgggcaggaactgtctgcggcgaatgattga

SEQ ID NO: 499027 - DNA, 876 bp, Stenotrophomonas maltophilia
atggatacccttcgctgcatgcaggctttcgtcgcggtagccgagtgcggcagctttgcaggggccgctgaacagttgcaggtctcggcggtgatggtcggcaagtacatccagcagctggaggcgcacctgggcaccgcgttgctgcaacggaacacccgccgccagcgcctgaccgaagccggcagcgcctacctggccgggtgccggcaggtgctggagcaggtgcagcaggccgaggccgacgtggccggcctgcaggtgcaaccgcgcgggctgctgcgggtcagcgcacccaccacctggggcagctgcgtgctggcgccacaactggccggcctgctgcgcgcgcaaccgcagctgaacgttgaactggatctgagcaaccgccgtgtggatctgatcgaggacggcttcgacgtggcgatccgggtcgggccactgccgtcgcaggaggtggtggcgcggccgctgccaccgtatgcgatgagcctgtgcgcggcgccttcctacctgcgccggcgcggcacgccgcgtacgcccgccgatctggaagggcatgactgcctgagccacctggcctggcgcggtggccacggctggcagctggccaacggtgaacaggtggactgggaagcgcgcctgacctgcaatgatggtgttgcactgcgcgaagccgcggtggccggagcagggctggtgctgcagccgaccgcactgctggccggggagattgcagccgggcggttgaagccgctgctgcgcgactacctgcccgaaccgcggccgatgcacctgatctacctgcccgaccgcaggccgcgcccgcggttgcagtgcttcgtcgatttcgtcatgaccacgttggcgcaatga

SEQ ID NO: 499028 - DNA, 603 bp, Stenotrophomonas maltophilia
atgaagatcctcctcgttggtgccagcggcaccctcggccaggcagtcgcccgccagctcggacaacagcatcagattctcgccgccggccgcaacagtggcgaactgcgcgtggacctgaccgacgacgccagcgtcgccgaactgttctcgcgtaccggcccggttgatgcggtgatttccaccgccggcaagctgcacttcggtccgctgcaggacatgacgccggcgcagttcaaccttggcctgcaggacaagctgctgggccaggtgcggctggcattggcggcgcagcaccatctcaacgccggcggctcgatcaccctgaccagcggcatcgtcagtgcacagccgatccgcgatggcgtcaacgccacctcggtgaatgccgcgttggaaggcttcgtgcgtgccgccgcgttggaactgctgccgcgtggcctgcgcatcaacgtggtcagcccgaacgtgctgatcgaatcgatggcggcctacggaccctacttcccgggctttgaagcggtgagcgcgcagcgcgcggcgctggccttccagcgtgcagtggaaggcatccagagcggcgagacgatcacggtctggtaa

SEQ ID NO: 499029 - DNA, 435 bp, Stenotrophomonas maltophilia
atgatgtcccaggaactgagcgtgggcgaagtcgcccagcgcagtggcgtggcggtttcggcgctgcacttctacgagcgcaaggggttgatcagcagcctgcgcacttcgggtaaccagcgccgctatagccgcgacgtgctgcgccggctggcggtgatccgcgtcgcgcagcgcgtgggcatgccgttggaagcggtcggccgtgccttcgaaagcctgcccgaggggcgcgcaccgaccaaggccgactgggccaggctgtccgcgcgctggcgcaccgagctggaagaacgcatccacatgctgcaactgctgcgcgatgagctcaccggctgtatcggctgcggctgcctgtcgctgcagcgctgccgcctggccaacccgggggatgtgcttggcgaacgcggcgacggcccgatgcgctgggaatga

SEQ ID NO: 499030 - DNA, 1422 bp, Stenotrophomonas maltophilia
atgctgctatcttcgccgccagttgacaagcgcggcccgcatctgacccgtatgcccccgaccctctcgcccgccgccgcccacctgccggctgacacctcgatcctgtccgcacgctatcgcgcgaccaccctcggcatggtcgcgctggtcgggctgcacgccttcgaggcattggccgttgcggccgcgatgcccaccgtggccgaggcgctggatggcctgcgcctgtacgcactggccttcggcggtaccctggccaccagcgtgatcggcatgaccctggccgggcgctgggccgatcaccatggtccggcacggccgctctggtacggattggcctgcttcgtgctgggcctgttgctggccggctttgcgatgcgcatgggcatgctggtggcgggacgcctgctgcagggcctgggtgcgggtgcgatctcggtctcgctgtacgtgatggtcggccgcagctacccggagcacctgcggccgaaggtgttcgccgccttctcggccggctgggtggtgccttcgatggtcggcccggcgttgagcggcctgatcgtgcagcacctgggctggcgctgggtgttcctggcggtgccgttgctggcggttccggcaggcctgctgctgcgccccgcgctggcacgcatgcagcccagtccccccagcaccgccgacgatggacgcggcaaggtggtgcgctgggccagcggcgcctcgctggccgcgttgctgctgtacttcggcggtcagcaaccgggcctgcctgccctgctctgcatcggcgtggcggtgctggcgctgctgttctgcgtacatcgactgcttccgcccggaacactgatcctgcgccgtggcctgcccagcgtaatcgcgctgcgtggcatcgcggcagctgccttcttcgcctgcgaggcctacctgccactgctgctgcagcgcgaacgtggcctttcgcccagctgggccggtgccgtactcagtctcggtgcgctgggctggttcgccggctcgtggctgcagggccaccagcagcgtggctggtcacgccagcagctgctgcgcgccggcacgatgatgatgaccgtcggcatcgccgccacgctggccgtgctgttcaacgcggtgccactgccggtgtcgctgctcggctgggccgtgaccggcttcggcatgggcatgatctacgccagcctgtcggtgttgacgctgtcgttgtcggcgccgcgggagcagggtgccaacacctcggcactgcagctgagcgaggccctgtcggtgaccaccgcgctggcggtctccggcgcattgttcgcgttgttcgtggaaagcaccccgcacaccggctacctgctgtgcctggccatcaccttcggccttgcgctgttggccacggtgatcgcgcgacgggtgtag

SEQ ID NO: 499031 - DNA, 2022 bp, Stenotrophomonas maltophilia
atgacccgattcctcccacgccgctggcagcgcctgctgccggtgttgttcgctgccttcctgctgctgggtagcagcggttgcgcgatggttaccgtcaagcaggtcaagtccagcgattcgctggtcaacaagcgtgccgacgtgctcaacacgggcaagctcagcccggccgcgcgcgagacgctcagcgcggcaggcctggacgagtcgcagtgcgaaaaggacttcctggtctgccgcagcacgctgctgatgaccgacgacctcaatgtcgagcagcggttgtcggcgctgtccgaactgtgggtgaaggccgcgctggcgatgacgccgaagaagacggctgccggcgatccgccgatgagcgatgcggcgttggatgcctggctggaagcggcgcgctatgcctatgcctacctgttctacagcggccgctcaccgtccgaccgtgccttcgaggaccgccagacgcaggtgcgcgactactacaactacgcggccgagaaggcggcagtggtgctgttcgtgcgcgcacgcgccgctgcgctggccggcgaggactacacgaagccgctcacggtcggcagctggtcgctggcctccaactaccagcagctgaacctgaagagcattcccgcgcagctggtgccggccggcacggtcagcttcgtcggcctgcgcagtacctatcgccgcgatggcttcggtgccgagctggtgatggtgatggacccgccgaagctggttgcaccggtgatcgcacccgagggccccaaggccgaggcgccgcaggaggatgaggacgacgcacgccgtggccgccgtcatcgccatgacgattcggtgcccgagttcagcgagatgtcctcgatcaacgtcaccgcactgctgcgtttcgagggcagcaacctggacgatgtgatgcgcacgcgccgggtcgagctggacgcttattcgcccgaagccaccgagcgcatcaccctgcatggcgagcaggtgccgctggccggcaacttcaccgccgcctatggcctgtggctggcgcagagcggtttcgcccggcaatcgctgcgcaccctgttcggcatgagcgagggcatcggcgaaccgcacatctacctgatgcaaccgtgggacccgaatcgtcgcatcatcttcatgctgcacggcctagccagcagcccggaagcctgggtgaacctggccaacgagatcatgggcgaccccgagctgcgccagcagttccaggtgtggcaggtctactacccgaccaatgcgccgatcgcgttgaaccgctacgagatcgccaatgcattcaacgacacgctgaagcacttcgatcccaacggcagcacgcgtgcatcgaaggacatggtctacatcggccacagcatgggcggcgtgctggcgcgcctgctggtcagtgactcgggcgacgtactgtggaatgacctgctggccaactacgacctgaagggcgagcgcctgaagcgggtgcagaacaagctggggccgttgctgcatttcaaggcgcagccgaacgtggaacgcgcgatcttcatcgccgcgccgcaccagggcaccgacattgccggcaacaaggtcgggcgcctgatcggtcgcctggtacgcctgccgctgaccatcctcggcaaattcgaggatgtgttcctggcactggcgcaggccgaacagcaggtcgacggcacggccaagccgaagatcccgaacagcatcgacaacctcaaggccagcgatccgttcgtgaaggccgccgcacagctgccgatcgaagcgggcctgaagtaccactcgatcatcgcccagcgcaaaccggaactgccggtggacaaatccgatgacgggctggtgccgtactggagtgcgcacctgccgggtgcgttgtcggagaaggtgatcatttccggccacagcgtgcaggagaccccgcaggcggtgctggaagtgcggcgcatcctgcatcgggacatcgatgatgtgggggccggtacgcggtaa

SEQ ID NO: 499032 - DNA, 975 bp, Stenotrophomonas maltophilia
atggcgctgctggcgctgtgggtgaccgggctgctggcctatcagttgccggggccgggctggctggctaccggcgtcgccgggctgtggctgctggtagcgctgtgggtgtcgtggcgggtcgcgcggggccgtgcctcgcgccgcctgggcctggcgttcggggcatcgctggcgctggccggcctgtggtggctgctgctgaccccgcgccaggaccgcgtgtgggccgatgacgtggcccagcgcctgcacgtggtgtctttcgatggccgccacgtcgtgctggacaacgtgcgtgatttcacctggcgcagcgaaaccgactacgacgcccgctgggtgcgccgcgagtacgacctggaccagttgcgctcggccgatctggtgctgtcgtactggatgggcccggccatcgcccacaccctgatctcgtttggtttcgaggacggccgccacgtggtgttctcgctggagatccgcaaggagcgcggggaatcgttctcggcgctgggcggcttcttccgcaagttcgagatgaccctggtagcttcggaggagaccgacatcatccgcacccgcaccaacgcgcgcggcgaggacgtctatctctaccgcctgcatggcatggaccgtgcgcagctgaaggagctgttcgcagcgtacatcgcgcaggcccgcgaactggatgccaagcccggcttctacaacacgctgaccagcaactgcaccaccatcgtcttcgacctggcccggcacatcgcaccgcgcctgccgctggattaccgcctgctgctgtccggttacctggccgagtacgcgcaggaggtcggcgcgctcgctccaggtgtgccgtacgccgagctgcatgacaagggccgcatcacccagcgtgcgctggacctgggcagcggcgaccacttctccaccgtaatccgccagggcgtgcccggcaccgagcaggacccgcagtaa

SEQ ID NO: 499033 - DNA, 405 bp, Stenotrophomonas maltophilia
atgggcatcacttccgtggccggcgttccggtccaaccccagcaccgcgcaacctgccactgcggcaccgtcgagctgctgctggacctgccggacggcatcgtcgatccccgccgctgcgactgctcgatgtgccggcgccggggtgccatcgccgccagcgtcccccgccagggcctgcaggtgctgcgcgggcagaaccatctgcggatgtaccagttcaacacccatgtggccgagcactacttctgtggcgtgtgcggcatctacacccatcaccggcgccgctccaaccccgaccagtacggctacaacgtggcctgcctggaaggcatcgacccgttcgcgttgggggtgatcccggtcagcgatggggtcaaccacccatcagaccgcaccggctag

SEQ ID NO: 499034 - DNA, 1518 bp, Stenotrophomonas maltophilia
atggccccggtttcgatgctccctgtacctgtccagacgcagcagcgctggaccctgcttgccgtctgcctggccgcactggcgttgccgttgtccttctcggccggtgccgtcgcggtgcccgcgctggcccgtgccgtggcgtcgtcgccgagcgtgctggcctgggtgaccaatgccttcatgctcaccttcggcagcctgctgctcgctgccggtggcctggccgaccgctatggccggcggcggttgttcctgctgggcacggcaggcttcaccgtcgccacgatcgtcgtctgcctcgcgcccacgctgctgtggctggatctggcgcgcgggctgcagggcgttgccgccgcagcggcgttggcgtccggcacggctgcgctcgcgcatgcctggcaggggccgatgcgtggccgtgtgttcgccctgctgggcgccacattcggtgcggggttggcgctggggccgctgcttgcgggtctgctgctgcaggcattgggatggcacagtgtgttcgccgtcggcggcgtgctgacattcgccgccttcgtactgggcgcgcgtgtgttgcccgaaagccacggtgaacgcgggcggctggatgtcggcggcatgctgggcttcagcctgatgctggcagcgttgaccctggccctgctgtggctgggcgagttcggcctgcataccgtgcgcgtgcaactggcgctgttggcgacgctgctgctgggcgcagcgttcatctgcatcgaacgactgcaccgctcacccctgctggacctctcgttgttctcgcaaccggcgttcctcggtgtccagctgctgccggtcgcaacctgcttcggctacgtggtgctgctggtggtattgcctctgcagctgctgggagtgcacggacagagcgcgaccctggtggggctgcagatgctggccctgtccgcgccgatgctggtgctgccgatgctggctgcgcgctgggcggagcgcgttggaagtgcgcggctgtgcacgctgggactgctggtctgtgcctctggcctgtacctgttgtcgcgccatgcatcgcagccgtcgccttcgcagtgggtgccgtggctgatgctggtcggtgcagggacggccttgccatgggggctgatggatgggctgtcggtcagcgtggcgccggtacagcgtgcgggcatggccgccggcatcttcgggaccgtgcgtgtagccggtgaaggcatcgcattggccgcagtcactgccttgcttgcgctgctgatcggccatcagctgcagggcgcgtcgccggcatcgctggcgcgtgccggtgcctatctggccaccggggcgcgggaacaggcgcaggcactgctaccggcgatgagccgcatgcagctgcagcacgccagtagcgaggcgctggcaacactgctgcgtgtactggcgctgctgaccgccgcatgtgctgcgttgttgcacctgttgctgcggaaacgtaaagacgcgttggtcgggcgtactgcgtag

SEQ ID NO: 499035 - DNA, 945 bp, Stenotrophomonas maltophilia
atgccccgcatggactccatttctgccctgctcgccttcgtccgcaccgcggaggccggcagcatcgtcggcgctgcgcgtgtacttggcctgtccgcgtcggcggtcggcaagcgcatcgcccgtcttgaacaggagctcggcgcccgcctgttccaacgcaccacccgccgcgtgcatctcaccgacgaaggcgaactgctgctgcagcgctgccggcgtgcactggacgagctttccgaagcacaggcggacctggcgcagcgacagcacgcccccagcgggctgctgcgcatcggcctgcccaccatcgggtaccgcttcctgctgccggtgctgcccggcttccagcaacgctatccgcaggtgcagctggaactggacttcaacgaccgcatcgtcgatgtggtcagcgaaggcctggacgcggtgatacgcagtggtgaactggccgattccagcctgaccgcacggcgactgggcggctttcgtttcatcctctgtgcggcgccgggctatctgcaggtgcatggaacgcccggcgatgtgggcgacctgcgcatgcataccgcgctgcgtttccgttaccccaccaccggaaagctgcatccctggcagctgccgggcatcgaaggcgatgcgggggcacgccttcccacggcgatgacctgcaacaacatggaggccgtgctggccgctgcgatcggttgcatgggcctggcctggatgcctgacttcctcgctgctgacgcgctggccgatggccgcctgcaacgggtactgcctgcgctgcccacgcaccaggggcagttctcgctgctatggcccggtgggcgccatcccagtgcacgcctgcgggtattcatcgactatgccgttgcgcatcttttccggggcgccccggaaaaggggacggaggggattaagtcgtttcaggcacagtag

SEQ ID NO: 499036 - DNA, 864 bp, Stenotrophomonas maltophilia
gtggaacggtcggcgagtggttggatcaatggcttcatcggtgtggtgatcttcgccggctccctgccggccacccgcttggcggtgctgcagctggacgccggattcgtcaccgctgcacgcgcgaccattgccgccgtgctcggcctcggcctgctccttctgctgcgccagccgttgccgcggcgcaatgacctgcccgcgctggtagtggtcagcctgggggtggtggtcggctttccgctgttgaccgcgctcgcgctgcgccacgcatcgtcggcacacaccatcgtgttcctcgggctgttgccactgagcactgcggtgttcggcgtactgcgcggtggcgatcgaccgcgcccagccttctggttgttctcgctgctgggcagtgcctgcgtggtcggctatgcagtgcgcaacggcatcgaggcgtccttgcaggcagacctgctgatgctggcggccatcgtggtgtgcgggctgggctatgccgaaggcggccggctcgcccgtcatctcggcggctggcaggtgatcagctgggcgttgctgctggccttgccggtgatgctgccgctgacggtgctgatgcgcccgtcctcgttcactgcggtcggtgcctcggcgtggtgggcgctgggctatgtggcagtgttcagcatgctgatcggcttcctgttctggtaccgcgggctggcgcagggcggcatcgccgccgtcggccagttgcagttgctgcaaccgttcttcggcctggccctggccgcgctgctgctgcacgaatcggtcagcctcagcatggtgctggtgaccgtggtcgcggtgatctgcgtcgccggcgcgcgccgcttcagccgctga

SEQ ID NO: 499037 - DNA, 1380 bp, Stenotrophomonas maltophilia
atgccgcgcccgcttacccgcatcgaatcggtcatccagaccgtccgcacccgcatcagtgcacgggtggatggtcccggctcacgcctgccttcggttcgtgcgcaggctgcgacgatgggggtttcggtctccaccgtggtcgaagcctacgagcgcctggcggccgaaggcctgatcagtgcgcgcgcaggctcgggcttctacgtcagtggcccggccgcaccgctggcgctggccgaaatggagccgcggctggatcgcgcggtggatccgctgtgggtatcacggcaatcgctggaaacgcccgcgggcgacctcaagccagggtgcggctggatgcccagtgactggctgtatcacgatggcgtgcgccgcggcctgcgccggctggcgcgtgccgatgccatgcaactggtggactacgccgccccgctcgggctgcccgcgttgcgccagctgctgcaaaggcgcagcgccacgcttggcatcgatgccccggtggagcagatcctgctgaccgaatccggtacgcacgcggtcgatctgctctgccgtttcctgctcaagcccggcgactgcgtgctggtcgatgacccgagctacttcaattaccacgcgctgctgaaggcgcaccaggtgcaggccatcggcgtgccgtacacgcacagcggcccggacctggaggcgttcgcgcaggccctgcaggcacattcgccgcggctgtacatcaccaattccggattgcacaacccgaccggcgcggtactttccgcaagcaccgcacaccgcctgctgggcctggccgaacgcagcgaactgatcatcatcgaggatgacatcttcgccgacttcgaactgcagccggcaccgcggctggccgcgctcgatgggctgtcacgggtgatccacgtcggtagcttctccaagacgctgtcggcagcgtcgcgctgcggctacatcgccgcgcgccacgactggatagaggcattgaccgacctgaagctggcgaccagcttcggcggtggtcatctggccgcgcagttgatgcacatcgcgctgaccgacagcggttaccgccgccacatgcagtcgatacgttcgcggctggccgatgcacgccggcacacactgcggaaactgcagacgctgggcatcatgccgtggctgcagccggaagccggcctgttcctgtggtgccagctgcccgatggccgcgacgccgccgcactggcgcggcaatgcctgcgcgaaggcatcgtgctggcgccgggcaacgcgttcagccagtcgcagcgcgcggccgactatgtacgtttcaacgtttcgcagtgccaggacccgaggatctggcaggtgctggcgcgcgcgctgcgttga

SEQ ID NO: 499038 - DNA, 945 bp, Stenotrophomonas maltophilia
atgctcaacctcaacgatctggccctgttcgtgaccgcggtggagcagcgcgggttcgctgcaggcgggcgccatctgggcctgccgcgctcgaccctgagcaagcgcgtggcgctgctggaagaacagctccaggtgcggctgctgcagcgcagttcgcgccgcttcgcattgaccgaggtcggccaggagttcttcgagcgcgcacgcgcagcgttgtctgaggtcgaggccgccgaggccatcgtccgcgaccgccaggccgaacccagcggcaccgtgcggatcagcgcttcgattccggtggtgcagggggagctcgccgcgtgcctgcccgcgttggcccgccgctatccacggctgcgtatcgaagttgaagtgagtgatcgtttcatcgacctggcgcaggaaggcatcgacatcgccctgcgcagccacttcggtccgctgccggattccgggttggtgcagcgcatgctcggtagcgaacgcatcgtgctggtggcgtcccctggttatctggcagccgcgccggcactggacacgcccgaacagctacgcgcgcatgccggcctgctgaccgcgcgccatgcaacgcgctggacgctgcacggcgccgacgcccgcaccgtgcaggtggagccgcaggtggcgctggtcggcaatgaatcgcagctgctgatcgcggcggcagaagcgggtcttggcatcaccgtactgccacacagcctgtgtgctgcggccatcgccgccggccgcctgcagcaggtgctgccggcgtggcatgccggcgaagtcaccaccagcgtgttgctgccgcatcgtcgcggccagttgccgggcgtgcgcgtggtggtggatgcgctggtcgcgcattaccagctcaacgcagcgcgcgcgccagcacctgccagatcctcgggtcctggcactgcgaaacgttga

SEQ ID NO: 499039 - DNA, 699 bp, Stenotrophomonas maltophilia
atgaccccgatcctcttctacggcgtgccctcgggctgctcgttcggctccatcgtcgccctggaatggctgcgccagccgtatcacctgtgccgcatcgacatgcccggccaggtgcagaacgaagactaccgccgcctcaatccgctgggtgaaaccccgaccctgcgcaccgcgcagggcgagctgctcagcgagagcctggccatcctcaaccatctggccgcgaagggcatcgcgcaggggctgggcttcgcacagggcacgcccggcttcgatcgcctcaaccaccggctggcctatctcaacaccagtttcttcggtgcctacgcgccgctctggcacgcactggagcatgcgcaaggcgatgacggcgaggcgctgcgtgcctatggcaccaccaaggtgcgccacgcccaccaggcgctggagcagatgatcggcacaggcccgtggctgctgggcgaacagcgcagcttcgccgatgcgtacttcgccggcatcgcgcgctggaacgactatcaccaggtggtcgatcgtcgcgagttccccagggtgcagcagctgttcgagcgcctgcaggacgacgccggcgtgcagttcgcccacgccatcgaagcgcagcagccggcaaccagcagcggtggcttcctcggcgaggtgcggctggaagacgtgcttgaggcagcagcggcctga

SEQ ID NO: 499040 - DNA, 675 bp, Stenotrophomonas maltophilia
atgtccacgttctccgatccgcaggcggtggcccgctatgccgaagcgccgctgcgccaggtgcccggtttcctcgcgttgcagcagatgagccgcctgctgctggccgaacgcgttcccgcgcagggccgtgtgctggtgctgggcgccggtggcgggctggagctgaaggcttttgccgaggcgcagccgggctggcagctgctgggcgtggatccggccgcgccgatgctggccctggccgagcagacgctgggtccgctgatgccgcgcgtgcaactgctggaaggctacatcgacgatgcgcccgatctgcgcttcgatggggccagctgcctgctgaccctgcacttcctcgatgccgcgcagcgcctgcacacgctgcgcgagctgcacaggcgcctgcaacccggcgcgccgctggtggtggcccaccacagcgtgccgcaggaaccggccggcaagctgcgctggttgcagcgctacgcagcgttcgccgaagcctcgggcgttgcccacgccgatgcacagcgcgcgatcgaggccatcgccgagcggctgccgctgctggcccccgaacaggaagtggcgctgctgcaggaggccggcttcgacggcgtggagctgttctacgcaggcttcagcttcaagggctgggtggcgtacgccgggtga

SEQ ID NO: 499041 - DNA, 648 bp, Stenotrophomonas maltophilia
atgtcccccaccgttcaccgcaagctgcgcatcagcgcggaccagtacaccggccagaaagtggtcgaccagcagttccacgagtgcgatttctccggtgcggacctgaccggcaccgagttcatcaactgcagtttctacgatgccgacagccgcgccggctgccgcttcaatggcgccacgctgaaggaagccagtttccgcagctgcgatatcagcatgtgccatttcaatttcatcaaagcgctgggcctggagatcagcgagtgccgtgcgcagggcgcggatttcagcaacgccagcttcatgaaccagatcaccacgcgcagctggttctgcagcgcgttcatcaagaagtcgaacctgcgctatgccaatttctcgcgggtaacgctggaaaagtgcgagctgtgggaaaaccgatgggatggcgcgaatgtgagtggcgccagcttcgccggatcggacctgtccggcggccagttcgagggcatcgactggaacagcgccaacttcaccgactgcgacctgaccaactcggagctgggtgagctggacctgcgcagcaccaacctgcgtggtgccacgctggacgtgcagcaggtggcgctgttgatgcagcgcatcggcatcaccgtggtgccgtag

SEQ ID NO: 499042 - DNA, 777 bp, Stenotrophomonas maltophilia
atgagctccgatcccagccccctccccgcccagcgcacgcgccagatcctcgaggaactgcgccagcagggccgcgtggtcgccgccgaactggcgcgccgttatgccgtctccgaagattcgatccgccgcgacctgcgcgagctcgccgcccagggcctgtgccagcgcgtctacggcggcgccgtgctgccgccgcccaaggaacggccgctgcgcgagcgcctgacccgcgaccgcggcgacaaggccgagctggccgcccgcgtctgcgcgctgctgcaacccggccaggtggtactgctcgatgccggttcgaccaatctggcgatcgcccagcagctgccggccgctctcgggctgacggtgatcaccaatgccccgcagatcgccaccgccgccagcatgctcgaaggcacttcagtgcagctgatcggcgggcgcctggccagcggtggcggtgcggtcggtgccgaggcgttggcccaggtgcagcgcctgcgtgccgacgtgtacctgcccggcccctgcgcggtggacggcgacaccggcgtgtgggcgatggatgcggaagaagccacgctgaagcgcgcgatggtggcctgcagcagccgtgtcatcgtcgccgccaccactgaaaagctcggggcccgcggcaactggcagatcgccagcctggacgagatcgacgacctggtgctgaccaccaccgcaccgcccgccttggcggctcgcttccacgccgccggtatcgcggtgcaccccacgcctccctga

SEQ ID NO: 499043 - DNA, 1134 bp, Stenotrophomonas maltophilia
atgtcccttgccaaccgcgcgcgtgccgaacagcacgcgacccgcgctgcgttcttcattcccggcttcgccaccgcgttgtgggccaccctggtgccattcgccaaagcgcgcaccggaatcaatgacgccacgctggggctggtgctgctctgcctcggtgccggctcgctgctggcgatgcccttgtccggcgtgctggccgcacgcctcggttgccgccgggtgatggtggccagcagcctgctgatctgcctgaccgtgcccggcctggcgctggcgggttcggcctggacgctgggcgtggtgctgttcgtgttcggtgcggccgtgggtgcgatggactgcacgatgaacgtgcaggccgtcatcgtcgagcgcgaagcacggcgggtgatgatgtctggcttccatgccttcttcagcatcggcggcttcctcggcgcggccagcatgaccgtgctgctgtccgcacagttgccgcccttggcatcggtgctgatcggtgtcggcaccatgctgctggtgacgctgttgtcggcgacctactggcacagcgaacgcatgccacacgacacaccgatgctggccctaccgcatggcatcgtgctgttcatcggcgtgctggcgttcgtcgccttcctcggcgaaggtgcgatgctcgactggagcgcggtgttcctcagcgatatacgtcgcgtcgatgccagcctggcaggcatcggctatgtgaccttcaccctgaccatgacggtcgcgcgcctgttcggcgatgcactggtggcacgcgtgggccgccagcgcgcgatcgtgttcggcgcgctgctcgccgctgccggcgtgctggtgctgaccctggtcacgccgtggcaggcatcattggcgggctatgtgctggtcggcctcggttgcgccaacatcgcgcccgcgctgttctcgctggccggccaccagacccgcatgcccggcgcgctagccatcaccgccgtttccacgctgggctttgccggcatccttgccggaccggcgttgatcggctttgccgccaatcatttcggtctgattgctgcgttcatcggtgtggccacggccttgttgctggtggccgtgtccacacgttggctgcgggtgtga

SEQ ID NO: 499044 - DNA, 1281 bp, Stenotrophomonas maltophilia; identical to SEQ ID NO: 498802

SEQ ID NO: 499045 - DNA, 1506 bp, Stenotrophomonas maltophilia; identical to SEQ ID NO: 498801

SEQ ID NO: 499046 - DNA, 2139 bp, Stenotrophomonas maltophilia
atgaaaacgaaccccaactccgcgcgcctgcgccgggcgacgctgcctgccatgtgcgcgttgctcctgcacaccgcctctgtacttgccgccgatgcggcaccaccgaccacgctggataccgtgcgcgtggtcgatacccgcagcggcgagctgtcttccacctccagcgcaggctctgcgttgggcctgagcgtgctgcagacaccggccagcctgacggtgatttcgcgcgagcagctggaacagcgcggcgacaccaacctcaatgatgcgatcagccgcgccggtgcgatcagtgcgatgccgcacccgggcaacggcctgagtgcgctgtccagccgtggcttcaccgatggcgcttccgtgatgcgcctgtatgacgggctgcgccagtatggcggcgtgggcatcacctttccgttcgatacctggtccatcgagcgcatcgaagtgctgcgcgggccggcttcggtgatccatggcgacggtgcgatcggcggcgtgatcaacatcgtgccgaagaagcccacgcgtggggcaatcgagaacgagatcagcgcaaccgtgggcagcgaggacaccgcgcgcctcggcttcggcagtggtggcgcgctgacgcccgagctggcctaccggctggatgtgagtggcaactacagcggtggctgggttgatcgcgggcgcagtagtgatgccaccttctccggcgcactgctgtggcaaccgcgtgcggatctgcagctgtcgctcacccatgcggaaggctatcagcaaccgatgcgctacttcggcacgccactggtggatggccgccagctggaagcgctgcgccaccgcaactacaacgtggaagacagcgacatccgctaccgcgaccgctggacccagctcgatgcgctgtggacgccgaacgcaagcgtcgaatggcgcacgcgcctctaccagatcgacagccagcgcgattggcgcaatgccgaagcctacgtctacaaccgcgctaccggcttgatcgatcgctcaggcaataccgagatcacccacgaccaggaccagaccgggttgacctcgacgctgagggtacaggggaacattgcgggcctggccaacagcttcgccgtgggcctcgatgccaacctcgcgcacttcaagcacaccaacaacacctatgccggcagctcgggcccggtcgatccgttcgatccggtgccgggccagttcaccagcgacgcgccgaacctgccgcgctaccgtaatcgtgccgagcagtacgcgctgttcgtggaagaccgcttggcgctgagcgagcgctggtcggtgctgggtgggctgcgccacgaccgcgcgcgcattgatcgtaccgatctgatcagcggccagaacgcgttctcgaagacctaccgcagcaccggctggcgtgcaggcacggtattcgcgctgcagccgacgttgaacctgtatgcgcagtactcgcaggcggcggacccggtgagtggcctgttgatgatcagcccggccaacggggccttcgacctggccaagggccggcagatcgaggtgggcctgaagcaggccttcgatggcggcgagtggacgctggcggcgtaccgcatccgcaagaccgggctgctcagccgcgatccgctggtgccggatcgccgcgtgcaggtgggcgcacagacctcgcgtggcgttgaagcctccttgaactggaacttcgcgccgcactggtcgctcgatgccaacgccacggtgctgaaggccgagttcgaggacttcctggaaaccaccggttcgccggcggtgctggtatcgcgcgatggcaacgtgccgccgaacgtggccgagcgcctggccagtgtgtggctgagctggcagttcgcaccggactggagtgcggcgggtggtgtgcgttacgtcggcaagcgctacgccgacaacgccaacaccttggagctgcccggctacagcaccactgacctggcactgacctggcaggcggcaccgcgcacgcggctgtcggcgcggctgttcaatgtgttcgacaaggcgtactacgccaccgcgtactacaccagcacgcagtggctgctgggtgcggaccggcgcgtcgaattcaccgtcgaccatcgcttctga

SEQ ID NO: 499047 - DNA, 387 bp, Stenotrophomonas maltophilia
atgctgctggtgctgcttgccccgctggtgagccgctggctggcgcatggtcacgtagcagcggctgtgccggtagcggcgatggaccattcccagcatgcgcagcatgcgatggagggccatcacgaccaccacgcgatggcgatgcagcagggcgaggtcgcaaagaagccgcccgccgatccacacgccgagcatgagatgggcgtggactgcgactactgcctgatcgccgcgcggctgatcaccctgctggtggcggcattgctgctgttggcaccgatggtatcgatatgccgtgcgctgcgtggtgcagtgcaggcgttgccgcagcgggtcagcggcacattgggagcgcgcgggccaccggccttcatggctgcctga

SEQ ID NO: 499048 - DNA, 255 bp, Stenotrophomonas maltophilia
atgtctctgaacagcaacgacgctggcttcaccgaacgcatcgccggtttatcggccgagctcgccgtgctggtgagcctggtggagaaccacatccatctgcagctggctgatctggccgactcgggtgatgtggatgcacaggagcgattcgcggtagccgatccggagcgctggttggagaacgcccgcaacagcctgcaggcgggtgtcatgttcctggagcgcgcggtgcagcagccggcgcggttctag

SEQ ID NO: 499049 - DNA, 225 bp, Stenotrophomonas maltophilia
atgacggacaccatcgacgaagcgcaggaaatggaagcgcgccacctgcaacgcgccttggcccagcacgcaacgcgggccagcaacgttgcccctctcactcccatgggggaatgccacaacccggactgcagcgaggacttcgacaacgatccggcaagactgttctgcgggcctgcctgtgccgagcgtttcgaagccatccatcaacaccgcaacgcatag

SEQ ID NO: 499050 - DNA, 2337 bp, Stenotrophomonas maltophilia
atgcacacaccgcatcccacgcaggacatcgttcccgcgttcctgcaggccatgcacgcgcacggcatcgtgccggacgcgcgcggccgcgacgcgctcaacgccgatggcacgctggtgcgcttccatgtggaaggcgaccgtcgtggcacgcgcaatggttgggcggtgttgtttggagaccacgtgccggccggcgagttcggcagctggcggaccggcacccgccatgcctggtgcgcgaaatcgccgaccgcgttgagcgccgccgagcagcgtgccatcaggcaacgccaggaggcggcccgcagcgagcgcgaacggcatcagcgcgaacgcgaggacgccgccgccaaggcggccaacgtgctgtggaaccgtgccattcctgccgatgcccaccacccgtatctcgtacgcaagggcatccacgcacatggcctgcgtgtggcgccatggccggtgcgcaacagcgatggccttgtcttccgccacatcgacagcgccctgctggtaccggtgatgaacagcgcgggccgtatcatctcgttgcaggcgatctttccccgcgtggatccagcacttggccgcgacaaggacttcctttccggtggccgcaagcagggctgcttccatgtcatcggcaagccggttaccggccaaccgatcgccattgcagagggctatgccaccgccggatccatccatcaggccacgggctggtgcgtggtggtggcctgggatgcaggcaaccttggcgcggtcgcccgagcctggcgcggcgccatgccggacgcgtcattcgtgctgtgtgccgacaacgatcagtggacgcggcagccgctggacaaccctggcgtcaccctggccacgcaggctgccgcggacatcgatgcccgcgtggtctggcccgagttcgccacgctgcatggcgacgatgaccgccctaccgacttcaacgacctgcatctgcgcgaggggctggacaccgtgcgtgcccagttgttgcccgccatgccgccggcagggggcgacgacgtggcgctggacgatgcgccgtcatcggccagcgcgcgctaccaggtgcctggcaacctgtccgcattcgatgccttcaccccgtttcccgataccaacgcgcgcgggcggccgttgccaaccgcccgcaacctggccgagctgtgccgtcgtaccggtgtgaccgtgcgctacaacgtcatccgcaaggatctggagattctggttcctgggctgcagacgaccgtggacaacgccaaggaggtcgcggcgggcgaagtgatggattgcatgcaccgcgccggcatggccaccgccagcttcgagaccaacctgtgccaggtggccgaagccaatccctacaacccggtagccagctggatcacctcacggccgtgggatggtcagtcccgcctgcaggcgttcttcgacaccgtgcaggaagccaagcccacgcacatggccgacggccgcgtgctgaaggaagtcctgatgcgacgctggctgatctccggcgtggctgcggcgtttgagcccgatggcgtggtcgcgcgcggcgtgctgacgttcgtttcgaaacagaacctgggcaagacacgctgggcgcggcagctggcgccggtagagctgcaactgatcgccgacggggtggtgctggatccggccaacaaggacagcgtcaagcaggtcatctccagatggatcgtcgagctgggcgaagtcgatgccaccttccgccgtaccgatatcgcggcactgaaatcattcatctcgcgcagccatgacgagatccgtcgcccctacgcgcgcaccgaatcccgctatgcgcggcgcaccatcctgtttgccagtgtcaacgacgaacgcttcctccgcgatgccaccggcaacacccgctggtggaccgtgcacgccgtggcgctgggcgaaccggcgcggatcgacatgcagcaggtctgggcagaggcccatgcgttgtactgcagcggcgagacctggcacttgagtgccgaggaactggatgcgctgaatgcaaccaacagcgaacacgaacccatctcgccgatcgccgaactgatcgatcgccatttcgactggtcgctccctgccgaacactggagcgcgcattaccgcgccacagagatcgtcatcgcggtgggcatcgacaggcccaaccgtcgcgaggtgaacgaggccgccgcctacgtggtcaaacgccatggcgtacgcacccgcgtggtgggcaaggaacgcgccaaagtctggctgatgccagagcgcagacgcactctcgccgagcatgcggcaggcccgttctag

SEQ ID NO: 499051 - DNA, 276 bp, Stenotrophomonas maltophilia
atgccacgcatccatgatggtcgcgacgttgacagcagcagcgacgactggcgcctgcactgcgaagcacgtcgcctgctgcaactggacggctaccggcgcgtgggcaccgacgggcgctggacgacggtcagtccgcgccggcaccgccaacagtatctcgagggtgtcctggccgcacgcggcccggttgagcgtgagcgcctggcagcagcggcattgcggctgtggatcgccagcccgcccgcccaaccgaaccatgacgtaagtagatga

SEQ ID NO: 499052 - DNA, 228 bp, Stenotrophomonas maltophilia
atgccccgtccccgactgcatgccttcgaaggtgagcagctgaccgtgcagcagatccaccagcgggtaccggtgctgtccgagcggaccatccgcgaccaccttgctgccggccggcgtacccgcaccgccatgttgtgctttgacccgatcgccgcagcggcccggggagggcgcatcacccagcgcatcctccgcgcccgcagcgtcgtcggtcgcgattcctga

SEQ ID NO: 499053 - DNA, 639 bp, Stenotrophomonas maltophilia
atgattcccgcctccctcgacagcggtcatcgcctgattgccgacacactggccgcgttccgtgccggccctgcactgggcagcgttgccctgcggccggcgccgcgcgcgcgcgtaccgctctacatcggcatcgccggcagcaagcgctcgggcaaggacacactcgccaatggactggcgtcggcgttgtcactgccatgcgacagcttcgcggccccactgcggcaattggtcgcctccctcctcgggctctccctgcacgaactggacagccgcaaggaggacgccatcgactggctggccgaactcaccccgcgccacctgatgcagaccgccggtaccgagtgggggcgtgaccgcgtccatcccgagctgtgggtacgctcgctgttcgcacgcctgcccgagggcgggctggtacccgacgtccgcttcgccaatgaggcccgcgcgatccggcgtcgtggtggtgtcgtgatccgcgtcaatcgcccaggccatcgcagcagcgaccctcatgccagcgagcagccgctgccgcatgagctggtcgacatcgaagtcgacaacgacagcaccccggccgatctggtccgcagatcgctggaccagctgcgttcgcgcggtgtgatctga

SEQ ID NO: 499054 - DNA, 384 bp, Stenotrophomonas maltophilia
atggaggtcgaacagttcacgtcgacgcgcctgaaggccatcgagttgttcaagtcccagcccaagggcagcaaggacaccgtgagcctggatgcgatcttcatctcgctgtgcacgctggccactgcccgggcaggcgctggcagcgcccagcaggcgcgtaccgtggcccgcccgggcaaccagcagccgcccgcgccatggttcgtcgaaacccttgcggccctgaagggcaagggcgagtcgatcaccgtggcgcgcttcctgatgttcgccaaccgcttcccggtcaagcgcatggaccaggtcaacgcggcacgctggctgcgcgacgccgggtacatcccccgcaagaccggcggcaacctggtgttcgatctttga

SEQ ID NO: 499055 - DNA, 450 bp, Stenotrophomonas maltophilia
atgccactgaagacatcctccatgaacgccctgcccgacagcatccagaccctggccgaggtcatcggcgaatccgcagccctcacgctggtgcgtgcctggccgccgaccacctccagcaccaccggccgtcaccgcgtcatcgtctacgtcccctccaccctgcccgaccagcaccggctgatcgacatccttggccacgacgtcgcccagcggctggtcgcgcacttcggcggcgaactgttgttcctggcatcctgcttcgctgccggcgcgcacgaacgccgtgaacagattgcccgcgcggtcgccagcggcatgccacgcgaccatgtcgcgcgtgagttcggcgtctcacagaccaccatcaagcgcgccctgcgcggtgcgcgcaccgcgttgccaccggctgtccacccggccctgctcaagggatacgcacgcgcatga

SEQ ID NO: 499056 - DNA, 351 bp, Stenotrophomonas maltophilia
atgaacgagagcgacctgctggccggcgtgccggattgggccaagtacctgggcgggacctcgggcgtgctgatcgcggtgtcgctgtggctgcgccagtggctgtcatcggccaaggtcgaccgcaccgccgatgaagccaccagcaacaccctgcgcacccttcaggaacagctcgcggccgaacgtacacgcgccgatgggctgatgcacgagcgcgaggcaatggcccaggagatcgggcagctgcgcggtgaagtcagcgccctgcgtgcacagatcgcccagcagagcgtacagatagacgctctgttgaacctggttcgcaagcagccgggggccgccgcatga

SEQ ID NO: 499057 - DNA, 486 bp, Stenotrophomonas maltophilia
atgaccgccgctgcagccagcgccctcggtggcgccaacgtcgccgcattcctggacatgctggcggtgtccgaaggcaccgatatacccagccagcgttcgcgtgaccgcggctacgacgtcatcgtcggtggccagctgttcaccgactaccgcgaccatccccgcgtgctggtgtcgttgccacgctatggcatcaaatccagcgccgccggccgctaccagttcctgcgcagcacctgggatgacctgcgcgcgcgactgggtctgcctgacttcgggccagtctcccaggaccgtgcagcagtcgccctgctgaaacagtgcggtgcctacgagctgatccggctgggacgcttcgatgccgccgtcaccgcggcccggcgcatctgggcatcgctgccgggcgccggctacggccagaaggagcacgcactggaaacactgcgcgcggcgtaccgtgccgccggcggagccctgcagtga

SEQ ID NO: 499058 - DNA, 378 bp, Stenotrophomonas maltophilia
gtgacgcccgcggcactgaggttgggcatcgggctgctggtccttgccggcagccacgcgagctgcgcctggctgggatggaccctgcgcgaccgcgctgcggaccttgccgttgccaccacccgggcaacgcagcaggaggcccgcaccgatgcagtccagcgcgcgaaccagcaggccctcgccaacagcgctgcaggcgcgcaggccgaatcacagcgcctggcccaccaggcccggcacaccgaacagttcaacaccctgcaacgggacatcgagacccatgccaagactcctggtcgtgatcgcggcgtcgctgacgctgagttcgtgcgcatctggcgcgaggccaacgccggccacgccctgccgcgctga

SEQ ID NO: 499059 - DNA, 555 bp, Stenotrophomonas maltophilia
atggcgaacgatctcttccctcccacgctcgatccgctgattgctgcgatcgaagccgcgatccgcgcacgctttccggggtttgcaagcgtcgaattccatcgcgacgccaacgctgaggggatgcccctgccggcctgcctgctggcgatgacccgctgtgaccgcagcagggacaacaatgatggcagtggcctgctgcaggccacgctacgcttcgaagcgcgcattgcgctgccggcgaccgatgcaaccacagcgctgcagctgcgcaacgcggccctcgccctggcgacctggctgcaccagctcggccgcttccccggcgttgccagcggtgcgatcgatgtgattgcagcattgccggaagaccccgcggcggcacagccgggcctgcgcacctggatcgtcgagtggtcactgccggtcgcgctgggcgacaacccttgggacgacgctggcggcgtggtgccgcaggcgtgctacagcttcgcgccggagatcggccgcgtccatgagtcccgctaccagccattgccggagcgcgcaccatga

SEQ ID NO: 499060 - DNA, 591 bp, Stenotrophomonas maltophilia
atgagcgccgaacacgcgcggttgatcggcaacctgctgatgatcggtgtggtacgcgaactggacgaggcaaacggtcgcgttcgcgtcgatgccgacggcatgcttaccgactggattccctggctggagcgccgcgccggaccgggcatgcgcagctggtgcgcacccgaacccggcgagcaggtcgtactggcgtgcccctatggcgacccgggccaggcgctggtactcggcagcctgtaccaggaccgctttccgccgccggccgactcgcgcctgcggcagcgcaccgagttcgccgacggcagcagcgtcgagtacgaccgggaaaccaccacgctcaacgtccatgtcggcagcggcaaggtcatcgtcacctgcgcgaatgcacaggtgatcgccagcgaatcgatcgtgctcgatacaccctcgatcaaggcgaccggcgatctggatgtcagcggcgcgatcagcgccggcaaggacatcagcacaccgggcgaagtcaaggccggtgccatcggcctgaaggcacacacacacaccgcacagggcccaaccgccccgaccacgccggcccaggcctga

SEQ ID NO: 499061 - DNA, 339 bp, Stenotrophomonas maltophilia
atgcgaggaatcgacgccaacaccggcaaatcactggatgggctcgcccatctccaccagtccgtgcgtgacattctcaccacgccccttggctcccgcgtactgcgccgcgaatacggttcacgcgtattcgaactgatcgatgcgccgaccaaccgctcgctgcgcatggacctgatcgcggccaccgtcgacgcgctggcgcgatgggaaccgcgtctccacgtcgagaacgtcgacgtctccctccccgcccccggcgtgatgatcctggcagtgaccgggatccacctgccggacggcgaggccatcaccatcgaaggaatcgaggttcgctaa

SEQ ID NO: 499062 - DNA, 897 bp, Stenotrophomonas maltophilia
gtggcatccggctcgttcaccagtgtcaatctgtcccagctgcctgcaccggcggtcatcgaagtgctcgatttcgaagccatgttcgatgaatcgctgaccgcactgcaggccctggatcccaccttcgacgcgctgctgccgtcggacccggccttcaagatcctggaggtctgcacctacctgcgcctgcttgatcgccagcgtgtcaacgacgccgcgcgtggcgtgatgctggcctatgccggtggcagcgacctggaccacctcgccgcgatcttcggcgtcgcccgccaggtgctcgacccgggcaggccgcaggaaggcattccaccgcgatatgagagcgatgaggacttccgccgccgcatccagctgggcccggaagggttcagcgtggcagggccggaaggtgcctatgtattccatgcgctgagcgccgacccgcgcgtgctcgacgccagtgcgaccagtcccgcccccggcgaagtggtggtctcggtgctgtcgcgcgaagcggatggaaccgccacccagggcctgctcgacatcgtcgaggcgaagctgagcgccgatgacgtgcgaccgctgaccgaccacgtgctggtgaagccggccacgatcgtcacctactcgatcgacgccacgctgttcacctttgccggcccggattcgcaggtcgtgcttgccgaagcgcgcacccgcctggaccgctacatcagcgagtcacatcgcctcggccgcgatgtcacccgttcggggttgttcgccgcattgcatgccgagggtgtgcagcgcgtggagatcgtccatccggctgcagatgtggtggtggaccgaacccaggccacccactgcgccggcgtgaccctgacccacggcggcaccgatgaatga

SEQ ID NO: 499063 - DNA, 780 bp, Stenotrophomonas maltophilia
atgaatgagccgagcacgcgcctgatcaacgcgcgcctgcgcggcgcgatcgatggccgcaaccgcaccttccgccaccccggcggcgcgctggcgagcctgcaggcggtgtaccgcaccgatgcacgggggcggcagccgctgcagggcagcgtcatcgagggcagcagggtcaccctggccactgcaccggcgcccggcgaggtcatcgatggtgacgcccaggtggtggtgccctcggcggcaaacctgctacccaccaacgccacccatgccgagcgcgcgcttgcccgcgccatcgttgcacgtccgttgccggtggacatcaccgcgctgtgggatgccgaccgctgtccgaccgcactgctgccctggctggcctgggcgctgtcggtggacgaatggaaggcctactggcccgaagccgtgaagcgcgcccgggtgcgtacggccatcgccatccagcgtcgcaagggcaccgccggcagcgtgcgcgacgtggtggccgccttcggtggatcggtgctgatccgcgagtggtggcagctgcagcccaggggcgcgccgcacaccttcgaagcggtgatggccatcgccaaccaggatggccagtccgccacggcgatgttcgtcgaggacgtcatcggcgaaatcacccggaccaagccggtgcgctcgcatttcacctttacccagggcatgcaggccgacgccgccatcggcgcacttgcagccgcccacgccacggccttccgccgccttcaactgatcggagagtaa

SEQ ID NO: 499064 - DNA, 2202 bp, Stenotrophomonas maltophilia
atgcgcctgaaaatcaccgatgccggcttcgccaagctggtcaatccgccgaacaccggcaccaacgccgtcctgatcacccagatcggcctgacctcgaccgccttcgtgccgtcggcggggctcactgcgctgcccggcgagatcaagcgcgtcgccaccttcggcggccaggccgtgggcgatgacaccgtgcacgtcaccatccgcgatgacagcgccacctcctacacgctgcgcggtttcggcctgtacctggccgacggcaccctgtttgccagctacggccaggccgatccgatcatggagaagtcggccgcatcgatgctgctgctggccaccgatacccgcttcagcgggatcgacacgacgcagattcagttcggcgatgccggctttctctatccaccggccaccaccgaggtcgtcggcgtggtcgagctggccaccagcaccgaagtcgaagatgcgaccgacacccagcgcgtggtgaccccgcgtggcgtgcgtgcgtacaccgacaagcgcttcggcgccagcgccccgaccgcgctggcgaagacgctgctgtctgcggcgaacaccgcggcggcgcgcactgcgctggaactgaagagcgccgcgctgaaggacaccgggcatggcaacggcctggacgccgacaccctggacggcaagcacgcctccgagttcgccctggccggtgacttcgccaccgtgggccacaagcatgtgattgccgatgtgaccgggctgcagtcggcactggatggcaaggcgtccaggggcggcaacacgttcaccgaccagcagttcatcagcggcacgtatccgttgctgggcttcggtgccgccggtgccgaacagtccttcattggcggctggggaaattccagcctgtggcgcgtgtggagcgcggaccgcagcgccagcagcgagataaccatcaagcatggtgatggcccgcgctggaatggatcgatgatgtggcatgccgggaacttcgcgcctgaagcgaagatggacaagagtggcgggacgttcactggacacgtcggcgtgaatggaaactcgcttcgttcctatggatggaatggtgtggccaacgacggcgtactcgtgctcggcgataccaactcctacattttcaagaacggctcgaacttcactttcgccaacgcggcaggcggatacaccgccatgctcaacgcgggcggcactgtttggaccagcggcaatttcgatccagcaagcaaggtaagcaaagccggcgacacgatgaccggcgagttgaagaatctctcgcacatcaccgctggcccggcagccagcaataaagttcgcatcactgtttccggggacggcttcccgtgcatcatgggtaccaacccagctgtcgatgcatatgtgccgatgaactactacggcacgcggcacaacttcaactccggaattttcgcgagcgggccgtcattgttccgtgctgcgggcgattcccagccaggcatccgattccactcgcagactctcaacggctatccacgtacaacgattgaagccgtcaccggtgacagcagcagcttcgcggaaatgcatgcgatcagcaacggcttccacttctacaacccctcgttgcgacgtggtatccgcatgtccaactcgggacaagtgaccactacgccggagttcactaaccccgccaccggcatcacaggttttggcttcacttcggagggttcatttggcggcggattcggcatgctggacaactccatccagggtggatggtggatggccgccggcaccatgcagtggggcatcagcacctatccgaacagcatgggtgcagcaatgatccttggtggtaacggcgcgctcactacgacgggtggttacgacttcggatcttcgcgcaagctgaagaacatcgatggcgaactctcctacggtctggctgttgtagagaagatggaactggcggccggtcactacaagcccgaatacaacgacgacggtcgccgtcgcctgttcttcgtcgccgagcagctggccgaactggtgccggaagcggtcgacctggaaggcgtcgagttccagggtgagcgcgtggcatcggtcaagctcgaccagctgctgccggtcatggccaaggccatccaggaactggccgccgaagtgcgcgcactgaaagcggagcgctga

SEQ ID NO: 499065 - DNA, 660 bp, Stenotrophomonas maltophilia; identical to SEQ ID NO: 498800

SEQ ID NO: 499066 - DNA, 1203 bp, Stenotrophomonas maltophilia
atgaccgaatttctccatggcgtacaggtcgtcaacatcgataccggtgcccgatcgattgccatcgcctccagcagcgtgatcggcatcgtcggcaccgcaccgctggccgacaccgaagcgttccccttcaacacgcccgtactggtgacctcgccgtcgcaggccgccaagctgtcggcgaccaccggcaccgatgccggcaccctgcccggtgcgctcgacacgatcttcgaccagtccagtgccgtcgtcgtcgtcgtccgcgtcgagaagggcgccaatgaaagcgccaccctggccaacgtgctgggcggcgtgaacgcccagaccggcgcctacgaaggcgtgcatgcgctgctggccgccaagtccatcgtcggcgtcaagccgcgcatcctggtcgcacccggcttcacccatgtgcacccggccgatccggccaagccggaggccgtgctcgccaacccggtcgtagcggaactgctcggcatcgccgacaagctgcgcgcagtgatcatcaaggatggcccgaacagcaacgacgacgctgccaagtccaccgccgccctgactggctccaagcgcgtctacgtggtcgaccccgcgctgctggtgcagtccggtgatgccatcgtcacccgccatgcctccggtgccgtggccggtgccatcgcccgcagcgacaacgagcgcggctggtgggcgtcgccgtcgaacctggaactcaacggcgtggtcggtaccgcgcgtgcgatcgacttcggcctgtccgatgccaccagccgcgccaacctgctgaaccaggccaacgtagccacggtcatccgcgaaggaggcttccgcctgtggggcaaccgcaccaccagcatcgatccgaagtggcagttcgtgtgcgtggtgcgcaccgccgacatcatcgccgacagtctggaagccgcccacctgtgggccgtcgaccgcggcatcagcaagacctacgtcgatgacgtgcgcgagggcgtcaatgccttcctgcgcggcctgaagacccagggcgcgatcctcggcggcaactgctggatcgacccggaactgaacgcagcggacagcgtggcccagggccgcttctactgggatttcgacttcactccgacctacccgggtgagcagctgaccttccgcatgcacatgaacaacaactacgtctcggagatcttctaa

SEQ ID NO: 499067 - DNA, 504 bp, Stenotrophomonas maltophilia; identical to SEQ ID NO: 498799

SEQ ID NO: 499068 - DNA, 291 bp, Stenotrophomonas maltophilia; identical to SEQ ID NO: 498798

SEQ ID NO: 499069 - DNA, 2463 bp, Stenotrophomonas maltophilia; identical to SEQ ID NO: 498797

SEQ ID NO: 499070 - DNA, 468 bp, Stenotrophomonas maltophilia
atgaaacgcgaattcgtaaccggcactgtggacaagctgctgtcgcagttcaaagccaatgactccggcaacgccccggtcctgctgatgctgggcggcttcaagttcagcctcaacaccgcggtcttccgggagatccagcaatccaacgagtatcgctggcaggcgcaggaccgcatcggccagatggcggccctgcagtacaccggaccgggctcagccagcatgaccctgccgggcgtcatctactaccagttccgcggcgccggcaatgagctctcacagctgcgcaagctggccgcgcagggcacgcctcatcgactgctgaccggcaaaggcggcaacctgggcctgtgggtcatcgagaagatcgatgccaccgccagcgagttcaccgccgacagcgcgatcctgaaacaggaattcaccctttcactgcggaagcacagcaatggcacgaacgtatag

SEQ ID NO: 499071 - DNA, 216 bp, Stenotrophomonas maltophilia; identical to SEQ ID NO: 497915

SEQ ID NO: 499072 - DNA, 1074 bp, Stenotrophomonas maltophilia
gtgggattgaacatcacaccggccttccgcgtggtggccaacagccaggacatcaccgacaagatcatggcgcgcttcaagtcgctgcgcatcaccgacgagaccggcaacacgtccgacacgctggaactgcagctggccgaccacgatccgtccgatccgatccagctgccaccggttggcgcggaactggaggccttcatcggctatgacggcgaagtgcggcgcgtaggcctgtacatctgcgacgaggtggagatctccggctttcccggcagcatgacgctgcgcgcccgggcggcaccgttcgagaccagcaaggggggcaagagcgacctgcagacgcagaagacacgcacctggaagaagggcaccacgatcggcgacatggtgcgacgcatggccggcgagcatgggctgaacgcagcggtgagcgcatcgctggcgtccatcgtgctgccgctgacggtgcagtcgcaggagtcggacatgaaccttctgctgcgcctggccaaacagcacgatgccatcgccaagcccggaggcgggcgcctggtgttcgtgaagcggggcgaatccaccagcgccagcggcgagcgcattcccgatgtcaccctcaccccggccgatggcagcgactaccgggtaaccctcgccgcacgcgaagacgccggtaccaccattgcctactaccgcgacgtgcgcagtgccaagcgccaggaagtgaaggtcggcagcggtgaaccgatcatgcgcctgcgcatggcctatgccgaccggaagagcgcagaagcagcggcgcgcgccaagcatcgcgaacaggcacggcagacgcggacgctcagctacaccctgcccggccgcgaaacactgatggccgaagccaccgtggtgatgcaggggttccgcgagggcgtggatggccagtggttggtcaagcgtgccgagcacagcatcggcagcgagggctatgtcacccgcatcgaatgcgaacaacccaacagcgccgacgcagtgaaagcggccagcaatgccccggccagcgaaggcgaacaggtcggcagcgaggtgtag

SEQ ID NO: 499073 - DNA, 381 bp, Stenotrophomonas maltophilia
atgccgctcgcccgcatcgatcttcgcaaaggtaaatccgccgactacctgcaacgtgtcggcgaagccatctaccaggccatgcgcgcggtgggcgtgccggagaacgaccgcttccagatcttccagcagcacgacgccggcacgctgatctacgaccccggctatctgggcgtggaccgcactgacgatttcatctgcatccagatcacctggaacgaagggcgtacgctggagcagaagaaggcgttgtacgccggcatcgccgatggactgcacgcggcggtgggcatccgccgcgaggatgtgttcatcaatcttgttgaagtaaagaaggagaactggtccttcggtaatggcgtggcgcagtacgtgagttga

SEQ ID NO: 499074 - DNA, 354 bp, Stenotrophomonas maltophilia
atgagtgccagcaacccccgccagggcatcctgtccctggccgtgaaggacaaagccgcgctgtacagcgcgtacatgccgttcgtgaagaacggcggcatcttcgtgcccacgcccaagcgctacttcctgggcgacgaggtgttcctgctgctgaccctgcccgattccagcgagcgcctgccggtggccggcaaggtgatctgggtgaccccggccggcgcgcagggtaaccgcaccgccggcatcggcgtgcagctcgccgacggtgccgaaggcgagggcgtgcgccacaagatcgagaccctgctggccgggcttaccggctcggacaagccgacccacacgatgtga

SEQ ID NO: 499075 - DNA, 957 bp, Stenotrophomonas maltophilia
atgagcacgttttcgccctggcagcagcgcgcgttcgaccagaccgtggccgcgctcgatgcgggtcgcctcggccatggcttgctgatctgcgggccggccgggctgggcaagcgtgaggtggcgctggcattggccgaccacgtgctggcgcgcggggatgccgcgcacgccacgcgcacgcgccagctgatcgccgcgggtacccatccggacctgcagctggtcagcttcattccgaacaagagcggcgacaagctgcgtaccgagatcgtcatcgagcaggtgcgcgagatcaccgacaagctggcgctgaccccgcagtacggcgtggcgcaggtggtgatcgtggacccggccgatgcgatcaaccgctcggccgccaacgcgctgctgaagacgctggaagagccgcagcccggccgctacctgtggctgatcagcagcgacccggcgcgcctgccgcagaccatccgcagccgttgccaacgcctggaattcaagctgccgccgcagcacgaagcgctggcctggctgcagcagcagggccacagcgaagcatcggcgcgcgaagcgctggaggccgcccgcggccatcccggccaggccgacaactggctgcgcgaagacggcctgagcctgcgccgcgaagtcggtcgagatctggaacagctggccgccggcaagaccggcgcggtggagctggcgcagaagtggtgtggtgacgacaacgcggcgctgcgcatgcgctttgccgccgacctggcgctggcccaggccagcaccgatgccttgaccacgccggagcgattgcacaagcttgcagcctggttcgatgcggccaaccgcacccgcgacctgctgcgcaccacggtgcgtgcagaccttgcggtggtcgagttgctgctggcctggaacaaggtgaacgagcggcctgccgcaaggggaaatcgatga

SEQ ID NO: 499076 - DNA, 666 bp, Stenotrophomonas maltophilia
atgagtcccgcgctgcttcgccacccgcgtttcgtcagcctggaaggcggcgagggcgcgggcaagaccaccgccatcaatgccatccgtgactgcctgcgcagccacggtcatgaggtggtactgacccgcgagccgggcggtacgccgctggccgagcgtatccgcggcctggtgctgaagcccgatgccgagatcgccgccgaaccgctcagcgccgaagccgagctgttgctggtgttcgccgcgcgcgcgcagcatgtgcgccaggtgatccaaccggcactgcagcgcggtgcttacgtgctgagtgatcgcttcaccgattccagctacgcctaccagggcggtggccgtggcctcgacccgcagtggattgccgatctggagcgccgcgcggtgggcctgctgccgggcctgaccctgctgctggacgtggacgtggccgtcggccgggcacgcgccaatggccgtgacctgtggccggaccgcatcgagagcgaacaggatgatttcttccagcgcgtgcgcgaagtgttccgcagccgtgcgcagcaggatccgcagcgcttcgcgttgatcgacgccggccaggtacaggcgcgcgtcgccgctgatgtagttgcgcgtgtcgagcgctggctgcaggacggggagggcgcatga

SEQ ID NO: 499077 - DNA, 1062 bp, Stenotrophomonas maltophilia
atggcgggagccaagcgcgggtgtctgttcgtggtaacgctggtggtggtgctgggcgccgtcgtggccggcgtgggcgcgtggttcttctaccagcagacgcgtttcgccgatgccccgatcaccccgactgccgagagcatggtcatcgccagcggcgatggcatgaacagcgtgctgcgcaagctgcgcgatgccggcgtggacgagggccaggacacccagtggcagctgctggcgcgccagcttgatgccgccggcaagctgaaggtgggcgagtacgcgctcaatggcgagctgaccccgcgcgagctgctgctgcgcatgcgcgccggcaaggtgctgcagcaccgcgtcaccatcgtcgagggctggaatatccgccagctgcgcgccgcgctcaagcgcgccgagccgctgctgcacaccaccgacaatcttgatgatgccgcgctgatgcagcgcctcggcttcggtggccagcatccggaaggccgcttcctgccggagacctatgtctaccagcgtggcgacagcgatctggacgtgctcaagcgcgcccatgccgcaatggaaaaggcgctggacgaagcgtgggaaagccgcgcgccggacctgccgatcaacacgccctacgaactgctgacgatggcctcgatcatcgagaaggaaactgcgctggccagcgaacgcccgcagattgccggcgtgttcatgcgccgcctgaagatcggcatgcgcctgcagaccgacccgaccgtgatctacggcctcggtgccgcgtatgacggcaacatccgccgtcgcgacctgaccaccgatacgccgtacaacacctatacccgtgccggcctgaccccgaccccgatcgcgatgcccagccgcgacgcgctgatggcggccgcgcaacccgcggcgggcgacgcgctgtacttcgtcgccgtgggcgatggcagcggcgcgcacgtgttctcgcccagcctggaccagcacaacgccgcagtcgcccgctacctgcagcagcggcgccagcaacgtacccaggagaccccggcgcaatga

SEQ ID NO: 499078 - DNA, 1365 bp, Stenotrophomonas maltophilia
atgacccacgcaccgctgatccacccgctgccgcacccgatcgatctgctggccctgcagcagtacgacccggcgcgcttcccgctgctgatggaatccaccgcctcgggcaccgcccagggccgctggagcctgctgctggccgcgcagggcgatggcctgcggctggatgccgacggccaggtgcgcgaccagcacgacctggtgcagcccggcacgttcctgcaggcactggatcgcgcctggcagcatgagcgcctgccgcatgacggcagccacagcctgccgttccgcggcggctgggcgttgatgctcgattacgaagtggccagccagatcgaaccagtgctgccagcgcgtgctcgcggggacggtcgcccgaccgcgctggcgctgcgctgcccggcggcggtgctgcatgaccaccacaacgatgccagcttcgtcatcgccgaagccggcgagcaggcgttgctggatgcgctggtggcactggcctcggccgcgctgcccgaagccgggcagggctggcagccaccgcaggcggtcggcgaggacgcgccgcagcgtttcactgatggcgtgcgccgggtgatcgagtacctgcgcgccggcgacgtgttccaggtgaacctgtcgcggcgctggaacgcgcagttcgctgcgccggtcagcccgcaggcgctgtacgcacagctgcgtcgtgccaacccggcgccgtttgccggcctgttcagcgcgcacggccgccatgtggtcagttcctcgccggagcggctggtgtcggtgcacgccggccatgcgcagacccgtccgattgccggtacccgtccacgcttcgaaggcgacgacgatgccgcgcgcatccaggagctggtcggccaccccaaggagcgtgccgagcacgtgatgctgatcgacctggagcgcaacgacctgggccgcatctgcctgccgggcaccgtggtggtcgatgagctgatgaccgtggagagctacgcgcacgtgcaccacatcgtcagcaacgtcagcggccatctgcgcccggaggtcacgcccggcgaggtgatcgccgccacgttcccgggtggcaccatcaccggctgcccgaaggtgcgctgcatgcagatcatcagcgagctggagcaggtgccgcgtggtgcctataccggcgcgttcggctggctgaaccgcgatggcgacctggacctgaacatcctgatccgtaccgccgaagtggatggccacgaggtgagcttccgcaccggcgccggcatcgtggtcgattcggacccggacaaggagctggacgagacccgcgccaaggcccgcggcctgctgcgcgcactgggccagcaggggtag

SEQ ID NO: 499079 - DNA, 1263 bp, Stenotrophomonas maltophilia
atgaagcgtcgcgtcgtcgtaaccggcctgggtatcgtctcgccgttgggcaatgatctggccagcagctgggaaggcatcacccacggtcgttcgggcatcggtccgctgaccaacgttgctgatgcctacgtgaatcggttcaccaccaagattgcaggtgaggtcaagggattcgacatcaccgccgacaatgaactgttcggcaagttccgggtcagcggcaaggatgccaagaagatggacccgttcatccattacggcctcggtgcctcgttcatggccctgcatgattcgggcctggagatcaccgacgccaatgccgagcgcatcggcgccatcgtcggcgccggcatcggcggcctgctcggcatcgaagagcagaccatcgagttccacgagggcaagaagatctcgcccttctacgtaccgaagaccatcatcaacatgctgccgggccagctgagcatcatcaccggcctgaagggtccgtcgttctcggcggtctcggcgtgcgcgacctcgaaccactcgatcggtaccgcgatgcgcatgatccagtacggcgatgccgacgtgatggtggtcggcggtgccgagcgtggctcgtcgccgaccgcgctgggcggcttctgcgcgatgaaggccatgagcacccgcaacgatgctccggaacaggcctcgcgcccgtgggacaaggaccgtgacggcttcgtgctgggcgacggcgccggcatcctgatcctggaagagtacgaacacgccaaggcacgtggcgcgaagatctactgcgaactggccggcttcggcgccagctccgacgcgtaccacatgaccgcaccgagcgagaacggcgaaggcgccgcgcgctgcatggtcatggccatgaaggacgccggcgtgaccccggagcaggtgggttacctcaacgcgcacggcacctccacgccgctgggcgacctgggcgagaccatggcgatgaagaccgccttcggcgaccacgcctacaagatgatggtcagctccaccaagtcgatgaccggccacctgctgggcgctgccggcggcgtggaagcgatcttctcggtgatggcgctgcaggacaacgtcattccgccgaccatcaacctgcagcagccgggcgaaggctgcgacctggactacgtaccgaacgaagcacgccaggccaaggtggacgtggtgatgtccaatggcttcggcttcggcggcaccaacggcacgctgatcttcaagcgtgtctga

SEQ ID NO: 499080 - DNA, 240 bp, Stenotrophomonas maltophilia
atgagcaccatcgaagaacgcgtcaagaaaatcgtcgtcgaacagcttggcgtcaaggaagaagaagtcaccaacagcgcatcgttcgtcgatgacctgggcgctgactcgctggacaccgtcgagctggtgatggccctggaagaagaattcgagtgcgagatcccggacgaagaagccgagaagatcagcaccgtgcaggccgccatcgactacgtcaaggcccacgtcaaggcctga

SEQ ID NO: 499081 - DNA, 744 bp, Stenotrophomonas maltophilia
atgagcaagcccctgcagggtgaaatcgcactggtcaccggcgccagccgtggcattggtgccgccatcgccgatctgctggccgcccagggcgccaccgtcatcggcaccgccaccaccgaatccggcgctgccgcgatcggtgagcgcctggccgcccacggcggccacggccgtgcactgaacgtgaccgacgctgccgcgctggacagcgtgctggacggcatcgccaaggagttcggcccgatctcgatcctggtcaacaatgccggcatcacccgcgacaacctgctgatgcgcatgaaggacgaggattgggcgtcgatcatcgacaccaacctgaccagcgtgttccgcaccagcaaggcggtgatgcgcggcatgatgaaggcacgcaagggccgcatcatcaacatcgcatcggtggtgggcgtgaccggcaatgccggccaggccaactacgcggccgccaaggccggcatcatcggcttcagcaagtcgctggccaaggaaatcggttcgcgcggtgtcaccgtcaatgtggttgctcccggcttcatcgacaccgacatgaccaaggcgttgccggaagaagcgcgcaccgcgctgatcaacgacatcgccctcgaacgcctgggttcgccggaggacatcgcccatgcggtggccttcctggccagcccggctgccggttacatcaccggcgaaaccctccatgtgaacggtggcatgtacatgccgtaa

SEQ ID NO: 499082 - DNA, 945 bp, Stenotrophomonas maltophilia
gtgaccgtatccaccctcgcttttgtcttccccggccagggctcgcagtctgtgggcatggtggccgagctggccgaactgcacccgcaggtgcgtgaagccttcaccgaagcatccgatggtgccggcgtcgacctgtgggcgctgtcccagggtggcccggaggaaatgctcaaccgtaccgaatacacccagccggccctgctggccgcgagcatcggcgtgtggcgtgcctggaacgccgtgggcggtccgcgcccgtcggtgctggccggccacagcctgggcgagtacaccgccctggtcgccgctggcgcgctgagcctgcatgacggtgcgcacctggtgcgcctgcgcggccagctgatgcaggaagccgcaccggccggtgtcggcgccatggccgccgtgctcggtgctgaagaccagctggtgctggacgtctgcgccgaagccgcgggcagccaggtggtggtgccggccaacttcaattcgccgggccagatcgtgatcggcggcgacgcagatgcggttgaccgcgcgctggcgctgctggccgagaagggcgtgcgcaaggccgtcaagctggccgtgagcgtgccctcgcacaccccgctgatgcgcgaagccgccaaccgcctcgccgaagtgatggccggcctgaactggcacgcgccgcagctgccggtggtgcagaacgtcgatgcccaggtgcatgacggcatcgacgcgatccgcaccgcactggtgcagcagttgtaccagccggtgcagtggaccggttgcgtgcaggcgctggccgcacgtggcatcacccaggttgccgagtgcggcccgggcaaggtgctgaccggcctggtcaagcgcatcgacaaggccatcgacggccgttcactggccaccccgggcgacttcgaagccgcccacgaggcatggtcggcctga

SEQ ID NO: 499083 - DNA, 783 bp, Stenotrophomonas maltophilia
atggttgagcccatcgtcatcgaagggcagcgcgcctggctgaagcagtacggcaagggaagccgcgcagtggccctgggcctgctcaatttcgttgcccgccgtttccatctggacgccctgcggccaccgccgcaccgtggtggtgatgccgcgcgagaaaccgaagcccgtcgcctgggagaactgcaggcgcagggcgtgaacgtgcccgacgtgctgggcagcggccacgccgcgctggtgatcggtgacaacggcagttcgttcaatacctgcctgcgccaggccgatgaggccggccgcgaccggctggtgatggcggccatgcaggccatcgccgaagcgcatgcgcgcggcgcctatttcggccagccgctgccgcgcaacctcacctgggatgggcagaaggtgggcttcatcgacttcgaggaagatccgctggaagtgatggatctgtccgaagcgcaggcccgcgactggctgatgttcggttacggcgtggccaagtactacgccgaccgccccgagcagctgcaggcgatgatggccgaggcgatgggcgaggcccaagcgcctgtgcgcgaacacgtgcacgcggtcagcggccgcctgcgcagcctggcccgggtctgcatgaagctgggccgttcagcgcgcgcgctggcgcattcgatcttcatcgcccatggcgccagcacggcgggcgtactgatgctggtgggcctgtgcgtggacttcctcgccgacggcgacctggacgtgctgcagctgttctgctga

SEQ ID NO: 499084 - DNA, 978 bp, Stenotrophomonas maltophilia
atgagcaagcggatctattcgaggatcgcgggcaccggtagctatttgccggaaaaagtcctgaccaacgccgacctggaaaaaatggtcgaaacctcggatgagtggatccagtcgcgcaccggaattcgtgaacggcacatcgcggccgaaggcgaaaccaccagcgacctcggctaccaggccgcgttgcgcgcacttgaagcggccggtatcgacgcttcgcagctcgacatgatcgtggtcggtacgaccacgcctgacctcattttcccctccaccgcgtgcctgatccaggccaagctcggtgttgcggggtgccctgcctttgacgtcaacgccgcctgctcgggcttcgtgttcgcgctgggcgtggccgacaagttcatccgttccggcgactgcaggcacgtgctggtgatcggcaccgaaacgctgacccgcatggtcgactggaacgatcgcaccacctgcgtgctgttcggcgatggcgccggcgccgtcgtgctcaaggccgacgaagaaaccggcatcctcagtacccacctgcatgccgacggcagcaagaaggagctgctgtggaacccggtgggcgtctcgaccggcttcaaggacggcgccaacggtggtggcaccatcaacatgaagggcaacgacgtgttcaagtacgccgtcaaggcgctggactcggtcgtggacgagaccctggctgccaatggcctggacaagtccgacctggattggctgattccgcaccaggccaacctgcgcatcatcgaagccaccgccaagcgcctggacatgtcgatggaccaggtggtggtgactgtcgacaagcacggcaacacctcgtccggctcggtgccgctggcgttggacgccgcggtgcgttcgggccgcgtcgagcgcggccagctgctgctgctggaagccttcggcggtggcttcacgtggggttcggccctgctgcgctattga

SEQ ID NO: 499085 - DNA, 195 bp, Stenotrophomonas maltophilia
atggctgtgcagaaatcccgtgttaccccgtcccgccgcggccagcgccgttcgcatgacgccctgagcgccaagcagctgtcgaccgacccgaccaccggcgaagtgcacctgcgtcaccacatcactgccgacggtttctaccgcggcaagaaggtcatccagaccaagacctcggccgtcgaagaagattga

SEQ ID NO: 499086 - DNA, 471 bp, Stenotrophomonas maltophilia
atggtcgtagcgcgaaggcgcttcgacggccaggtctccctggctgaattgacccgcctgcaggggctggtcgcagataccgacggcgagtgttcctactcgcttgaattcggtcgcgacgaagtcctgcgggtatcctatgtggaactgaccatcgacaccgcgttgccgctgacctgtcagcgcagcatgcagcgattcctgttgccggtgaaggtgacccagaggcttggcctgatccgcgacgaggacgaggaatcgtccctgccggaggagtacgaggcgttgctggtgccggaagacggccagctgcgtccgctggacctggtcgaagacgagttggtgctggcggtgccggtggttccgctgtcgcccgacggtgaagcagtcgacaaggactgggcgccgagcgaagaagaaacaaagaaggccaatccgttcgcggcattggcggcattgaagaaacaatag

SEQ ID NO: 499087 - DNA, 570 bp, Stenotrophomonas maltophilia
atgtcactggtcctggcctccacctcccgctaccgccgcgagttgctgcagcggctgggcctgcccttcgactgcgcgcgcccggaggtggatgaaaccccgttgaacggtgagacgccgctggcccttgcaacgcgccttgccacggccaaggcaaccgaagtcgccgcccgctaccccggcatctgggtgatcggctcggaccaggtggcggacctgaacgggcggccgctgggcaagccgggcacggccaaggcggcctgcgcgcagttggcggcgatgtccgggcagacggtacgcttccacaccgccatcagtctcacgcaggacggagaatcattcagcgccgtggatctgaccgaagtccgtttccgcacgctggggcaggaggagatcgcgcgctacgtggccgccgaacagcccctggactgcgccggcagcttcaagtgcgagggcctgggcatcagcctgttcgaagcgatcgacaaccgcgacccgaccgcgctgatcggcctgccgctgatcgcgctgtgcgggttgctgcgccaggcagggttcgcggtgccctga

SEQ ID NO: 499088 - DNA, 1842 bp, Stenotrophomonas maltophilia
atgcagggcgaacagcgcgcgcggacaatatttctctggttatggacgctggtcacagcggccaagctggtagtggctgcgcggctgccactgtttgttgacgaggcgttctattggcaggaaggccagcatctggccgctgcgtattcggaccttcccggactgaccgcgtggttggcgcgcctgggtgtggagatcggtggccaccatgtgctcgcgttgcgcctgccgttcctggccatcggcgcgctgctgccgttgctggtggtgcgcacggccacgcgctggttcggcaatgtggccggttggcaagcgggcagcctcacgctgttgatgccgttgtcggcgacgctgggcctgctggcggtgccggatgtgcccatggcactggccgcggtgatctgcctgcacgccggtgcgcggctgctgcacaacgttgatgcatcgtcggcgatgaagcttgcgctgggcctgtcgatcggtgcgctcagtcactaccgtttcatcggtgtcatcggcgttggcttcatcgcgttgctggcgctgccgcaggggcggcgcatgctggccgatccgcgcgtatgggtcgcgctggcggtgggcgtgctggcgtggctgccgttgctggcatggaacgcggacaaccacgacgccggcctgaagttccaggtggtcgagcgccatccctggacgttcgaatggaacgggctgtggttcctggtgatccagcccatgctggtcaccccgatcctgtgcatggcgatgtggaaggtggcgctggccggtacccgcaggggcggcggcacgcgcgtgcagtggcgctacttcggcctggtcgggggcgtatccacgctgggcatcttcctgctgggcttcttcaccgacgtcgagcggatcagtttccattggccgctgccgggctacctggccctgctggtggcggtgccggtggtgctcaacggctggccacgctggctgcggcgcaccggctggtggctggcgggcgcaggcatggtgctggcgttcggctattacctgatggcctccacgcctgcgttgcgcgagcagctggcaggcagcaagtactacccgcgcaatttcgctggctggcagccgttggcgatggcggtgcgcgaagagttgcagcagatgccggcgggcacgcgggtgctggcggggaacttcaaggtgggggccgagctgggcttccagctcggcaatggcgatatcgaagtgctgccgcatccgctcaacgacaagcatgggcgcaccgcgcagctggcgcagtgggaactgctgcatgagggcaagcgctcgacgccgatgctgctggtgctttcacccagcgaccagcgttatcgcgatctgctggcgcgctatcacgccatctgcggacaggtggggccgctgccggcgccgcgggtggtcagcagtgaccatggtttccagcgtttcctgctgttccggctgccggcgcagcgcgcgccgggggcgtgcgtgactccggcaatggcgtggctggatacgccttccaacggcgaaaaggtgtctggcacgctggcgatcaagggatgggcgttcaaggatggtgtcggcctggcacgggttgaggtgctggtcgatggccgctcgatgggggatgcgcgctatggccgcgcattcgacgtgcgccagacctggccggacagcaccgatccgcagcatccggcggtgggcttcgatgcttcattggacacgagcacgctggcgccgggacgacattggctgggcctgcgcctgcacggtcgcgatggcagcgtagaggaatggcaggagcagccgttcgaggttcgcgggcgctga

SEQ ID NO: 499089 - DNA, 954 bp, Stenotrophomonas maltophilia
atgccagcctcgtcccccaatcccagcatgctaaccgatcaactgcgccaggccctgcgggaggcacaggatcaggtaaacgcactggtgctgggcaaggtgccggaagtcaggctggctttcgtcgccctgctttccggtggccatctgctgatcgaggatctgcccggcctgggcaagaccacgctggcacatgcgttggccagcagcctgggcctcagtttccagcgcgtgcagttcacctccgacctgctgcccgccgatgtactgggcgtttcggtgtacgaggccggcagccgccagttccagttccacccggggccggtgttcacccacgtgctgctggccgatgagatcaaccgtgcgccgccgcgcacgcagagcgcgctgctggaggcgatggccgaacagcaggtcaccctggatgggcagacccatcccctgcccgatccgttcttcgtgatcgccacgcagaacccggtggacctgtccggtaccttcccgctgccggattcgcagctggatcgtttcctgctgcgcctggcgatgggctaccccagtgcgcaggccgaacgcgaactgctgcgtggtacagaccgccgcgacctgatcgcacgtgccgtaccgaagctggatgacacccaggtacgcgcgctgcgtgaagccgtcagccaggtccatgccagcgatgcactggtcgactacgtgcaggccctgctgacccgcagccgccagcacgccggcgtgcgcgtgggcctgtcaccgcgtgccggccttgcgctgctgcgcgcggccagggcgcatgcacttctgctgggccgcggccacgtggtgcccgaggacgtgcagaccctgttcgtggcggtggccggtcatcgcctcgtggccgaagccgagtccagctcggggccggcactggcacgggccatcctgcagaccgttgcggtggattga

SEQ ID NO: 499090 - DNA, 945 bp, Stenotrophomonas maltophilia
gtggccacgcgctgggcacgactgcaactgctggcacgcccgcgcaggcctgaagcactgccgcagcgcctggaccgccatcgcatctacgtgctgcccacccgtttcggcctgttcgtcgccgcgctgctggcggcgatgctgctgggcgcactgaactacaacaacaacccggcgttgctgctggccctgctgctggcggcagcggcgatcgccagcgccatcgccgcgcacctgcagctgtccggcgtacagatcgacgcgatctccgccgagccggttcctgccggacaaccactgcgcctgcgcgtggacctgtcactgcgtgatccgcgcgcacgccacggcctgcacctgcagcttggggacagcgaggcctggacctcgctgcctgcacacggccgcggtgaagtggagctgcacgttcccagcgaacgccgcggctggctggagctcccgcgcatccgcctctccaccacccagccactgggcctggtgcgggcatggtcgtgggtctggccggaacaaccgttgctggtctatccgcaacccgaggcgctggcccctgcactgccggaaagcggcaacgatccgctgcacacgcgcgcccatgccagtggcgaggaactgcatcagctacggccctatcgtgcgggcgatgcgccacgcagcatttcctggaagcactcggcacgccgcgacagcctgctggtgcgcgagtacgaaaagccggttggcatcgaagtcatcctcgattggcgcacgctgtccccgctgggccatgaagcacgcatcgcgcgtttggcgcgatgggtcgacatggccgagcgcgaaggccgccgctacaccctgctgctgcctgcacacccgccgttcgggccaggccagggcgccggccaccaccacctgtgcctgcgtgcactggcattgatgccgcatgactga

SEQ ID NO: 499091 - DNA, 1308 bp, Stenotrophomonas maltophilia
atgctctatcaactgcacgaactgacccgcaacctgctcgccccctgggtgcaccaggcccaggccaacgccaggttcttcgccaaccagggccactggtggtcgcagatgcccggcgctgatcgcctggcggcggtcaatgaactcttccaccgcatcggcaaggattacgagaagcccgagtggggcatcaacgaaatcgacgtcgatggcgaacgcgtgccgatcgtcgtgcacgaggaagtaagcaagccgttctgcaagctgctgcgcttcaagcgccacagcaatgaagccgaccagctgcacacgatgctcaaccagccgttcgtgctggtcgttgcgccgctgtccggccaccatgccacgctgctgcgcgataccgtgcgcacgctgctgcgcgaccaccgcgtgtacgtcaccgactgggtggatgcgcgcatggtgccggccagcgaaggcgaattcggcctggacgactacatcgcctacatccaggaattcatccgccacctcggcgtggagcgcctgcacgtggtgagcgtgtgccagccgaccgtaccggtgctggccgcggtttcgctgatggccagccgtggcgaaccgacgccgcgcacgctggtgatgatgggtggcccgatcgatgcgcgatgcagcccgaccgcagtgaacaacctggccacgcagaacccgctgtcgtggttcgagaacaacgtcatccacaccgtgccggccagctatcccggcgccggtcgccgcgtgtacccgggcttcctgcagcacgccggctttctgtcgatgaacccgagccgccacttcagttcgcactgggatttctataccgacctggtcaagggcgacctggaagacgccgacgcgcaccgtcgtttctacgacgagtacaacgcggtgctggacatgccggccaggtactacctggatacgatccgcgtggtgttccaggacttcctgctgccgcgtggtgagtgggtggtcaacggcgagaaggtcgatccgtcggcgatccgcgataccgcgctgctgagcatcgagggcgagctggacgatatcgccggcctcggccagaccgaagccgcacaggcgctgtgcaccggcatcactgcggaccgccgtgagcatttcatcgtcgaaggtgccggccactacggcatcttcagcggccgtcgctggcgcgaagtggtgtacccgaaggtgcgcgatttcttcgccgcgcatgccgaagcaccggcggcgaaggccacgaagaagaagagcaacgtcaccccgttgcggcgaaaggcgggctga

SEQ ID NO: 499092 - DNA, 990 bp, Stenotrophomonas maltophilia
atgaacgacccgagcctggcaggccgcgccctgcccacgaccatcccgcagtacctggcgcagctgcgtgcggcgctggaaggtgccgacccggcgatggtgcaggacgcgctgtacgacgccgaggaatacctgcgctcggagctggcggcgcagccaggccgcagcgaggccgaggtgatcgccgacgtcgctggcagctatggcgcgccggacgaagtggccgagatctaccgcgagaccgaagtgacggtgaaccgcgcgctgcgcacgccgcgtgcggataccgcaccggtgctgcgcgcagcggccgaagccagtggcgtcgagccggccgcaccgccgccggcgccggtgcagcgctcgctgctggcgcgtttcttcggcgtggtgaccgatccgcacacctacggtgcgctgttctacatgctgctgtcgctggctaccggcatcttcttcttcacctgggtggtgaccggcctgtcgctgtcgctgggcctgctgatcctgatcgtgggcattccgctgaccgtgctgttcttcggctcggtgcgcgggctggcgctgctggaagggcggctggtggaagcgctgctgggcgagcgcatgccgcgccgtccgcgttacaccgatcgcagccgcacctggctgcagcgcatcggcgacatgttcaccgatggccgcacctggctgaccctgctgtacttcgtgctgatgctgccgctgggcgtcacctacttcaccctcgcggtgacgctgctgtcgctgtcgctgagcctgatctgggcgccggtcgcggcgatcttcagtggcgacattccgggcgtgtacgtcgatggcgtgaacgtactgccgatggctgcatcgccgctggtggcgatcacggttgctgcggcgggcgcgctgctgctgctgctgacgatgcatctggcacgcggcatcggcaagctgcatgggctgatcgccaagaacctgctggtgcggttgtaa

SEQ ID NO: 499093 - DNA, 366 bp, Stenotrophomonas maltophilia
atgtccgaggacgatgtccagctgaagaagttccagaaggagctcagcgccggaacggtgtcgctggccctgctggcggtgctggcccgggccggggagccgctgtacggctacctcattgccaaggagctggagcgggtgggcgagggcgtgctgagcggcaagcagagcgcgctgtacccggtgctgcggaatctggaggctgccggtctgctggaaagccacgtggagccatccagcagcggtccgccgcggcgctactaccgcatcaatgaacgtggccgcgaggtgctggcgcagtggcgccacgcctggcaggccacccgcgattccgtcgattccgtgttggagggggtaccgcaatga

SEQ ID NO: 499094 - DNA, 2046 bp, Stenotrophomonas maltophilia
atgctggacgggtggatcggtaccgaagcaggagagctttcagacgagtccgcggttgagatcatcaaaaactggatgtcgctctcgttacagcgatccgagggcatctcggatatccatgcaaagacagggatacagaggaagcgactcgtcaagctcttcagcttgcattgtcaagacactcctctgccagaggaaatcaaaaagatctccgccgctaccggctatcctgcccacgatcttgtagtacaggcggccgactacctttgcccaactgtgctggacctcactccttcagaaaaaacggttgtacttccccgagcatcgcgcaatgcgctgaagctttggctccgctccgcgcgccgcgataatccaagaggccgcttaacccagatggagctggcggaccgcataggacgatcgcatatgtcagtggcagcatgggagaacccgggaatcagcagaattcctaagtacaaggatatctgtgccatcgctgaggcatgctgcgttgaaccccctggtcccgatttcgacgtgcgccaggggcgggccattcaagctgaagtgatagcgtccatggcttctccgacggatctatacgaggagattctattcaacggttgtctgttaagccggcgcgcgcatgcgccctcccatgccgagcgaaatgcgcaggtcttcagggcccgctatggcgggcagggagattccgagagcacattgagtgccataggggagattcatggaatcacccgcgagcgcatccgtcagatcgtggacaagcagctgtccttccttccgacgaccaccgtcctaacagcgcagttcgatgcactagcagaggcgtgtcaggagctgggagctgttgcagttccagaggctgaagagcggttgcggagtctcttgggtgggacactgagcttgcagggcgcaattgactacgggcgcgaggtgctcgggcgatctcttcccgttcagatcattcagatcaagaagggagatccggtggtccttcctgggcagctgcccacgtggtttgtggcggggatttcgcagtccaaggcggcgatccggcattgtggtgccgcccagatcaatctcgtctgggccttgaccatgcgccagcacggagattggatcgctcctgatgagttccgctcaatcatcgctcatgccccaggattcgagtgggtcgatgacgatcaagcctggtattggtttggtgttgacgggagcgcgaatcgagtcgtgaaccgggcgatcgatatcctctccaatgcaaagggtgcacttgacatcgaggtcatttatagcggcgtaacacgctattcacgtggcgcctcatctgatgttgcagaagatgccggcatttggccgccaatggaggtcgttcaaagggttctcgccaagacgcctgttctagtctgccaacaaggcgacgacttccggctggctaaccctggtgcgcctcgtgagggcaagaagggagttgcacaatcaatcgttgaggaactcaagcttcgaggcgggctggcctctcgcagcgaacttcatcaatcattggtcgtaaatcttggactcaacgccatctccttctctgttgccttggcttgctcgcccctcttgcgccaagttgatcgaggcatctttgcaattcgaggctggccgattaacgctgcacgcctgaccgaggcgcagggccgggtaggaactagtagtggaccactggtcaaccatcgggaggtcagcgtctccagctccggcgacgttagctgggtcaacacggttagcaagagctcgctgagtaacctctacgccggcgtgcccgccaaggccttcctgcatttgggagagggcgactatgatgcaggtggcatcatgctcacactgaccgagaccaggatggttggcttgatcaagtatgtggtttcgttgggaggcactgccgggacggcatacaaagtaaccgccaatggcaggaccagaagggcgctcgtcgaagtcatgggggcgacagaggatgagtttgaagagggtaactga

SEQ ID NO: 499095 - DNA, 948 bp, Stenotrophomonas maltophilia
atgtcttctgatttcgctccagtcccgccacggccgaagggttgggacgacctctttgagattacccatgggcttcatggaatccctatcgaggagatagaacgcgggagagtcgattatgagtacacattcagctccaacgatcttcgcccctgtggccggctggggtgcgagcaaaagcactgtcatggctggcttgtcgccttggctggagggcgtttcgtcaacattgggaacgactgcgcgttgaagtacgcccaggcgggtttatggtcgtcaagcatcaggaactatagagagcaggaagcctccagagctcgggcggtcgcgcttgtagaggtgagagagcaagcgcaggggaagcagtattggttggacaattctcctgaagttgatcgtgcaatcgcgctgctccagtcattctcagttcaagcccgcggcgggcttcttaaggagcttgaacggcgcgccgagcgtgggcacgtagacatagagagcgaacgacggctgaccgatgatgaagttcagttgcgacgggcgatgcttgctggccgccgaacagaagatgagccaatgccgtatttgcccactgtggagagggtcgttgtagggcgcattgaggggctcgagtgcttcaagggcaacggaaatccggaacggttaaggatggaccttcagcggttggtcgagacattgttgaagtggtctcccgcacagaaggatcgcagcgcccaacgcgccctgcttcaagcgacccgtgatctggcgccactgagcaatcgcttgaattccagcattgttgcagctgggcgattctttaccgaatccaatcttgagacgctgatgcgcctggaaattatcagatctcagggcattcagtcgatcaaacttgatggagtcggcggcgttatcatttctcgcctgccgcactggagacaggccgcctag

SEQ ID NO: 499096 - DNA, 627 bp, Stenotrophomonas maltophilia
gtgagcacaatcaccactacaccgcccaaaatcaccattgcggtgcgtcgtctgaccgattccgtcgtacttggcgcagagccgatctatctccccgtccggcctgaagccgacgcgatcgtgcatgagtgctttcccaatgtgcaggccaagatcgcccgggatggcggccagatgctgtgcggttggcagctttgggagtggccggatgtgctggtggaggcagagttccatgctgtgtgggtcagcccgtgcggggagccgatcgacgtctcgccaaagcccgaaggtgaaacgcgcatactgttcgttccggacccgggcaggcgctacgagggcttggccatcgataacgtccgaatgccgctgagcgacgatctgctgatcaggcatttcatccaaatgtccgaggccatcgtgggggtcatgaatcgaggcaagcgagcaacgcagtacggccacgtcagcgttcccgccaatgagattcagccgcttctgcaggcaagagctttcctggggcaatcactcgccgcagggctccgcgagcatacgccgtgcctatgcggcagcggccgcaagtatgcgcgttgccatggtagccacgtagaggccttctttggctcttga

SEQ ID NO: 499097 - DNA, 192 bp, Stenotrophomonas maltophilia
atggttctggccgggcatttgcctgagtggctcccgctggacatgacgcaatcgagggctgctattcgccactccggtgcggcgcagctgaatctggtctgggcgctcaccatgcgccagctcggcggctgggtcaaaacgaggcaggcagtggtcatggtggaatccgtaggttcagaaggaactccctag

SEQ ID NO: 499098 - DNA, 1440 bp, Stenotrophomonas maltophilia
atggcctggaacgacgatatccaagggcagccggcagtgccacgcatgataggggctgacctcagcccctatccctacatctccggctacggattggctcaacgcatcacggcgtttgccctccccgccggtgtggagctgacggcccttggcttcaggaatcgaaaggggatggatgttctgattgcgacccagcgattgggcaagccccgatcgaacttcctttggagcttggcgttgaccgacacgaaggtgggggcatattgggccccggaagtctggtcgccaaccgactgcccaggattgttctctcggcatccgagaccgcttcggcaatgctgggagtgcgctgagcacggataccacagtgcgctgttccagcttccctccatcactcgttgcccctggcatgggctgcggctcagctgtacctgcccgcagtgcggtcaaacccagttcgcccgcttcaatgataaaaatgcgctgggtgtctgtgcctgtggatacatcgcgatgaacgcccggactgcgcttgcaggcatgcgcagcttcccaacgtatcaatgcgcttcgtgggccgaggtctacttggagtgggcccagcgtcagcgggaaagacgagttctctatgtgcccgaatccaaccaggcatgggatcaggcctatgccgcagtggctgccccgcctgcctatcttgtcactcgggagctgcctgcctctagaacggcaccgacacatttcgtgtttgaaggcgttggcgcagatcctgaccacgattgcctgtggggcttctcgcacctgggtggcccccaagtcttccgcttgacgcctttgcccaaaggcgtcattgaccggctggcggccatcacggatcaggccgttgcggaagtggcgaaacaggagcgcgaaatggtgccaagcgaaggtcacgctcgcccgctcgattcaacgtcagcgtcgccggccagagatcgcacattccttatcggcccctatggcctgtcggagagcggtcatgcttggctcagcctggcggtagtggacaaggagctgacgattgcctgcggaaacgccctactgcacttttctgagaaactgcgcacgtctcttgaactgcatctgtctccgcaggcgagcgtggcgtcggtgcttggttccatcggcggccgcaggcaccttgtggacgcaatgatggattgcgtatgtcgtgcttatgaccaaggtcttagatcgcggctgtgccaccccacacagaagccgaagaatgcgcaggccagcactctggaggttccactgattgaactgcagatccgtgatggggccattgccagggttcaggtggcgtgggcgccctctccttcggaaaaacgggcgccaagcctgccggcgccctgtgacattcgcgaggtttcaccgaggtcgaaaccgaattcggcgtag

SEQ ID NO: 499099 - DNA, 1005 bp, Stenotrophomonas maltophilia
atgaaacacacccacagcaatccgctgattgcctcccaccatccgttgctggtccccgatggttaccagatcaacaccaagcccaccgagcggctggccaatttcattcgtaagaacatctttgaaggacaccacgggtgctcggcctatggaggcggcggcgtggggaaaaccaccgccattgcctacctcaccgacaatgcaccgcgctggctgattgacagcgacaaatccccgatgggtgtggcgatgcggatggtcatggccagcggcattcgtcgcacggaccgcgccttctggtcgaccatgaatgatcggatggggatcggtagctcaagcgcaacctcagcagcggcagggatggccaagctcaggaacctgatcagcagccgctgcggccaagccggcgtgagcaggatggtcctgttcatcgacaatgcgcagcggatcaccgaggccgagtacgagtacctggaggatctggacagtatggtcagagaggaccggctgagcctgttcttggtgctgatgcgccagagtgacgccgaaggcgtggacgtgggcgatgactggcgtgatcgtgcaacccacagcatccggcgctggttcatggccaccgccccctttggcccattgatgggcctggatgaggccaagcatgccttgggcggttacgacagcagttggtggccaacgcctgacatgccctacagccgctacttcgcccgctccgccttcgacggcggctggcgcctggcgatggaggccccgctgatctggcaggtgatgggagagcttcgaaagaagggaaagttgccggagagccaggcctggccgatggcaacgttcaccttgatggtgcgtcatttgctccacgacattgcatttcggcagaaggacttcacaggcttcaccgccgaccaggtggccaccgccctgcagaactgcggctatctgcggttggagtacgtccgggcgcgcatgcgtatgcctctgacgagctga

SEQ ID NO: 499100 - DNA, 1854 bp, Stenotrophomonas maltophilia
gtggctaatcctccctatctctacgatgcccaggagctggccacgtggtaccggccgaatgtgaatgaggtgcgggaagaagaccgcgactcctatcgccgtgctgaggccgcgctgctcggggtggtcaccgggcagctctcccttgcgcgggcggccaagctgcacggactgtgtcgtaaacgcctaaggcggatggtagcccatgcgccgggcgtccatgccgacggcatggccaacggatttcgcgtatgtgtgccctacggcacctatcagcgcatgccaggagcatcaggcgaggtgtctgttcctagcagtggcgggcccggaagcatcgctcagctgcttcaggcgctgcctgcagtgcgtgacctggtggagcgcttcacagacccattgccgccagggcgtgcaccaagggcattctcccgcctacatgagcgcatttgcgcggaactgcgtcgactggatctctctgaccactaccccctgaacacgcctgaccatgggcgcagagccctgctcgactacctgcgtcgtgaccggcttgccgcggtcgtgccggggacgctggagctggagcctatggctgtccataagctggaagacgccttccgaggcaggctgtttgatcgtacggagttcgacgcgcaccgcatcgatgtcgaaggcaccttgagtgttgagcttccggatggcggggttgcagagcggcccatcactaccctgtggcttctggtagaggtggaggtgcgctccagagccattgtctcgtggtccctgcgcgttggtcgtggctacaacaacctcgatgtggccacctgcctggcatcgggacttcgcccgtggtcgcctcgcgagctcaccattcctgatctggcctatgcgcccggtgcgggaatgccaacgggactggagccggcattggcctccaggcgctcgcgctcgatcgccctggacaacgccttggcccactcagccctggagctggaagcttcgatgtgtcgctcccgcggtggcgtgatcatcttcggccgcgcccacgagccccgatctcggcctattgtcgagcagctgttctcgcgcttggagcgcggagcactgcgccggatccctggcggctttgagcctgccaagtccctaaatgaaagcaggcgacggataagcaaagtccctgggaatgagcactacttcaatctgggcgcattcgaagagctgcttgacgtcatcatcgcaaactacaacgctacgccgcacccagcgctggggagcctgtctcctcttcagttcctcaggacccagccctgctcggcctttgctttcagtcccgatgtcgccgagcaggacgccgcggacctgtgcacggtcctggttccgttggtcgtgcatggcaacaggccccagggtgtgatgccccacgtcaactacaaatatgtcaaataccgtggacccggcctggatgggcgctgggagctgatcggcaagacggtgctcgctcgcgtcaatcgcaatgacctacgtacgttgacattgatgaagagcgtcaccgctccgttgtgcggtgtacgcgctgcagacccttgggcccgcacggcacacgatgagacgacccgatctttgatcatgcgatggatcaagaatcgcgacgggttcagcgttgccggtgctgattgcgcagttgtggcctatgtgggcttcctcaaaagcaggatgcagacctcacagctggcggtcgatcaattggcgcgcatggacgcggcgacacgcccagtgtctcgccaggctgttgagcctgactgctacagcacggctatcacgatggcaaccgacggctggatcagcctggatgaatag

SEQ ID NO: 499101 - DNA, 720 bp, Stenotrophomonas maltophilia
atgactgcaggagcagcggccaccgcctcgggcgtggccacgtcacatcacgttgacgcttcactgaactacacaccccgtccgctcaagcgaggccagcgtagccggcgcgaggttttcgtgttccagtccccgcgcaatggccgcgtggtcaccgtcgccgacgccagtgcgtttgcctacgcccttctgctcgagttcgatccaaccgtgcgaacctacgtggaaaggccgcggcagcttcaagtaacgagcaagagccgcatagacctgagcttctggtcggagcgaaatgacggcaccgagcgatttgatctgatcataccggccgcccgtactctgcagagcaccacaggctcaatggcgctgccgggaaagcaggagctcatcgagattgggactcgcaacggggtcaatctgacactggttaccgagcacgagctgacctcccagttgtcccagatcgccgttgcctacgagctgttgccactggtatgggatagcgcccgtataagcgcgcgggctgcgatcgctgagcaggtaaaagagctgcttaagcgcgccgctcgtctgagcctgctcagcgttgcagctgccctgccctatacctccaaccaggtgcgagccacggtggcctggatggttcaccagggcgtggtccacctgatcgaccatacccccggcgcttcggacgccgtactggagctcgtccgtggctaa

SEQ ID NO: 499102 - DNA, 1362 bp, Stenotrophomonas maltophilia
atgtgcgatggcaaaaacaggaacgggcaagacccctcgagcgagggcctggcggaaggcgtcggaagagctgtagcccaaggcttgccgcagatcatcctggccaatcattggtccatagcgctgcagcaaatcctgctccagcaagcgagccagtgggtccacgatcgtgtcacgctcagtcatggcactagcgtagtcattgcattggcttttgcacagatggcaagctggagtaaatcgttactctatttccacaccaagatgtctgctaagccattgaaaaggataaagccttatcacgaagcccggctagaaaacatgctgtgttttgcccaatccgatcgccccagatcattgaagaaggcgttgaacgtccttagagctggcgtttggtttgaagggctacgcatacgcctgcaccaatccaccgcctacggcgtcggacagcgactgcagccacacacctaccgtgatggcttgtatcaccacaacgtgtgggccaagtacgctgtggggaagcacctcccaagtgctgagacggtctatgcctgtgaacagcaggtcccgcgttctagctacctgctggaggatccgagctgggacctgctggatgtgagtcggccgatcggtggcgacggtgacaagctgctgaagcgactgcggccatcgatccaaagtgccctattcgaagaacgggcattggcgatggggcgctatgttcggcgcaccgccccggtccagccgctaatccgccttgaggggcaggcagacctgcaggcgatcgctgctgccgtcgtactcgttcgggaagcccatgaagcgggtgatgcgtcgcgtgcgtttgacatcggacgttcattgcatggaatcatgctgatggccgccactgtgacgggcttgcgagcgatcgcaccggaacttttcgagtaccttatccgatatgttttcccaatggcctctgacacgttcgttgagttcgaactggaccggggagtgctcaatgcccaggcagattggctgcgcagcaccatccttcacatgaaagccaatggctggacgggctacgtccccggcggcccaacgcgggagcttcgccgactgctctcggtcgactacggctttgaccttcgctttggattggggccgagaatcaaactgaaggtgccgttcgaagacgccagcgaagacgtgcgacggtccgtcagtttcaataacgttgcctgggagtgggcaacctcggtactagcaacgggaagaaggcaagctctgctgcccgaagacgcgattattcgcttgatggctgcccacgaagagccaggtggcgccaaggcgcactcccatccgatggagagtgcgtag

SEQ ID NO: 499103 - DNA, 246 bp, Stenotrophomonas maltophilia
gtggccaagacaatccatcgcaaggaatacgccgccctgattgagaccgtcagagacgcgcgcttggctgctggccttacccaagtacaagtgtccagcaagctggggcgcagccagtcgttcattagcgatgttgagacagggaagcgcagggttgacgtcgtggagcttagggacatagcgcgcctgacaggcctatccctgggcaagctcattgccgactttgagaagcgactcaaagactga

SEQ ID NO: 499104 - DNA, 801 bp, Stenotrophomonas maltophilia
atgatcaaagaacaacgtcgacgcgacgcagctggctggggcaggcagggcttgctgcttgctctgacggtcctagttgccgcctgcagcggtccagtagacaggaagttggtcactgacggcacgcaggagcaatacagagcgtcgattgacgcgattgacgccgagctgagtgcccatgagcgggatgccttcaactgggccgttgccgaccttgatctggctgagctgaacaaggcctacccgaatgcatctataagacaggtggttagggggcacatcaagcagattagggatgcccatccaaaagaaattcttgctctgcaggagcaggccaacacacagcgtccgacgatcaccgaactagaaagagtgcgtgcgagtggcgcaacgttacggatcgaggacagcttctttggcccgaagccggtcattgaggcgcgaattgccaatagctcaactttggcgctcagccaggccagctgggcggcgacgctctacatcaatggcgaagctcagcccacggcaaagtcgcgggtgcacagcgacttccgatcgattgatggcctcaagccgaaccacggcgtcacggcgcgcttcaatgttggcttcgtaaaaggtgatgatgcgtggtcgacactggcaattcgacaagcgtcttcaacgcgagtcgagctcgaactaattcctcagacggctttggacttcaatgacaagccctacatagctgccaactatagggaaaagatccattctctggagaatcagcttaagcaagccgagaagttctcagatatctga

SEQ ID NO: 499105 - DNA, 435 bp, Stenotrophomonas maltophilia
atgcgaccgaccatccttgctctcgatctcgaggggacgctgatctcaaatgctgtcagccagattccacgcccagggctttatcagttccttgaggtcgctcatgaactcttcgagcatctggtcatctacaccacggtccctgaggcagctttccgcaggatttcgcggctgctggtcgaggaagggagcgcgccaggctggttcgctgagttgccatatacattctggggaggggcaacgaaggacctccggtatgtgtctccgatcctgggtgcagcgctgttgctggacgatcactcggactacatccatccggggcaggagcgctattggattgaggtctctttgttcggcgctccatatgacgcggatgacgccggcctggaagtggcccttgagatgctgaaggaacgattggttgttccgttgtag

SEQ ID NO: 499106 - DNA, 858 bp, Stenotrophomonas maltophilia
gtgatatctgaagatcagatggacgcgaactcgcctcgctgctatgctggtgaactaggcgagcgatctgagagacaagtggcctatgttgtcacccaaccgaccctcatttcgcattggccagagttggacgatttcgttcgttcaatcggcccgttcttagcctgcgcctggtgcgcactggagcgctcaaggaccgtaagcgggcctgttgccgccgagggcttggcctcagccgcactcgatacgcttgcctcacttcgcgtactgcagcgcattcccatcgcagcccccaattccggggcgaggtccttgtatgagcctctggcatggacctatcaggccgcttggtcacgtcaggacgtgagtctggaggccaggttgaccagtacgcttacccgatgggctgccgaatgcccgtccactgccaaacggaccttgggaacctcgctcgcagagagcgaagcccgtgcatacctggccaacctgctacgcaagtatcggctatctcccacgctgggcaatggcctgagatcgacccagctcccggagtggaatgcactgagcttgggacgcaagaggtatgtactgtgggccggcatgcgcaacgttgcgtcggagttcctgaaagctcatctggacgaggaggccgcccgtcgggtacttgatcgagagatcagcaggagatgcacttggctcgttagccgagttcaatcgggagcacttgacccgactgacttttgcttcgtgccaggccatggctggcgtcagccgttgatcttggacgtggcaatggagacctttatccctctgggcagacagtactggctgcagccaagtagcgactggaggctttag

SEQ ID NO: 499107 - DNA, 942 bp, Stenotrophomonas maltophilia
atgccgaggagcgcgagtaggccattgagcatggacgaatcagtggttcaagttccatgtcgcgcggccgatacagctctgtccagactcctggcgggtcgtcccggccacgaatccagtcgatggcatcccgtttgcccaggagctccggagcgacgttctaagtaccctgccatgtactcaattcagaagatcatcgacctgctgctgctattgggcgttccttcgctgctcttcattggcgcttacgttctgcgccgccccaaaagagagctcagttgggagccggtgctggatcagcgagttcattgctggaaatggtgcgcctatggcttcatttttctcttgtatgttcccgggacgacgttgtatcgaacgttgattcctacgggttgtgatggacttgtttgcgtccagttcttcaccgcgagtggataccgtatcgccccgagcgaacttcatgttgttctcgtcgcaactgccgttttcgcggggtacttctttgcgcgtgttcgagcttcgtactcaccgattcctaccagggcccggggctacgtcctgaaggttgcctatcatggcaagggggagtactcgccacacttggagatagcccgccaagttcgccggcgtcagctcagagcggagcttgctgaaaggcgtaggcttgagcgggagggcttccacctatggttaagatccgtacggccgtgggtttgcacgttggccagaggctctactgttgagctacttagccccatgctgtcgggaagggacccactcactcttgtcaggtggctatctcgtagcggccccatacatgatgtagtccttctttctaggcggcttcgttggtgtgaggcgttcttctaccacctcaccgtgaatcatcgactttccttcaagtcagttcgatccgaaggcatacgattcagggtcggctga

SEQ ID NO: 499108 - DNA, 1014 bp, Stenotrophomonas maltophilia
atggactcgatgacctggttgcccatcgcctggttcgccgtcatcagcttcggcgtcctgatgtacgtcgtcctcgacggcttcgtactcggtattggcattctcgcgccctttgccgaggatgaagagcagctcgatgtgatgatgaacaccgctgccccaatatgggatggcaacgaaacctggctggtgctcggcggagccggattgctagcagcgtttccaacagcctatgcagcgcttctttcggccctgtaccttccagtacttctgctgcttgtatcattggttttccggggggtcgcctttgagttcaggttcaaagcccatcgctccaagaggctttggagcgtggctttcggccttggctcgcttctggccgcgttctctcaaggagtgattcttggcacggtggtgcaaggcgtgccaatgactggtgacacctacgctggcggaccattcctatggttcagcccctttgccatgcttaccggagcagccttggttgccggctacgccttgcttggaggcacctggctaatcttgaagaccgaggggcgaacccaggcacttgccaggcgcctgacccgccccctggtggtcgccgtgatcgtggccatggggctcgtgagcagctggctgccgttccttgatctgcgactaatgactcgctggttcagtgacgggaatttctggtggctgtcccccgtcccccttcttacgctcgccgtggcagtggcgctgtggcgcgcggagaaacgccccactcatgatcttgcccctttcctactgagcctgtcgttgtttgtcctgggctacctaggtctcgtactcggcatgtggccgtacctgctcccgcccggattgacgatctgggatgcagcagcgccagtgtcgtcgcttggcttcagcctggtcggcttggcggtcatgcttccggtcatcctgggctacaccgcctggtcataccgcgttttccgcggcaaggtgagtgcgagcacgagctatcattga

SEQ ID NO: 499109 - DNA, 1389 bp, Stenotrophomonas maltophilia
atggacgccctcctcctttcccgaattcagttcggctttctcatcagcttccatgtgctcttccctgccttcaccattggcttggccagttggcttggtttcgtggaatggcgctggcttcgaacccgcaacccggtgtggcgggatctgttcttcttctggcagaagatctttgccgtgtccttcggcatgggcgtggtaagcggtatcgtcatggcgttccagttcggcacaaactggcctcgtttgagccagatcgccggaaccgtaatcggccccctactgacttacgaggtcctgacagccttcttcctggaggcaagtttcctcggagtgatgatgttcggctgggggcgagtatcaccacgcctgcacttcttttccacatgcatggtcgcacttggaacgctcttttcaacgttctggattcttgcctccaacagctggttgcatacgcctgcgggctacgaaacgatcaacggagtggtccatccggttgactggttcgaggttgtgttcaatccatcgttcccctatcgactggcccatatggcaatagggtcattcataacaacctgcttcgtggtgggtggtgttggcgcctggtacctgcggcgtaaggagcacgtcgaagccggccgcaagatgcttggggcggctgtgatatttgcggccattaccgttcctgttcatattttcgtgggtgacatgcatggtctgaacaccctcaagcaccagccgatgaagatcgcagcggtagaggctcactggcatcagggccaagaaggtgaaggagttccgctggtcgtcttcgctgtaccaaatgagaaggaagagcggaacgatcttgagatcgcgattccgcgtgttggcagcctcatcctgactcactccatggatggaaccttcgcaccgctgacatccgtaccggcgagcgaacggcctccggtcacgcctgtgttcttcgcattccggatcatggttgggataggcaccctcatgctactgctcgcctggctttctgctttcaccctggcccgccgtaagctgttcgattccggggccctgctgcgcgcttggaactggatgcttccaagtgggttcgttgctttggtggccggctggtttgtcaccgagatggggcgccagccttggattgtctatggcgttttgcgaacggctgatgccgtgggaccgcaaacggcctggatgacagcgatctcactcgcggtctatgtcgctggatatgcgttcgtatttggttggggcatctggtatctggtcaagatcctccgacatggcccacatgcccaagacggaagtccgtcgctagagggtggtgatcgcacacctgcacggcctatctcggccgctgatcaatctctctga

SEQ ID NO: 499110 - DNA, 861 bp, Stenotrophomonas maltophilia
atgcaagcgcccagcccagtacctgccaacgagccctgcggcatcgcatatcgaagaacccttcggtggcgtggtggcgagcgcggctcaatcatggacagcgttgccgaagaagtgcctgtcgcgatgctctacaacgacaatcctttctcggtgatgatggccagcccaacggatctggaagactttgcgctgggcttttccatgacggagggaacaatttctgatccctcccaacttctccggattgaagtgaggccatcgctggaaggcattgagctggcgatggaagtcacagatagtgcgcccatcgtgtcaatgcccaaggacgccacccgcaacctacccgggcgtagcggttgcgggctatgtggagctagtcgactggagcaagtgctcagaatgcctttgccaatcgaccgacccaccacctactccgccttggcgctacgcgtagcgctgtcctcgctagaagggctacagccaatgaacgaggctgccggctcaacccacgcagcagcgtgggctctcccggacggagctatcgaagtggtacgcgaagacgtaggcaggcacaacgcactagataagctcattggtgcaatgaggcgctcatcgacttcaaccaacgaaggtctcgtgcttctatctagccgtgctagctacgaaatggtgagtaaggccgcctatgcaggcatggcgatcgttgcagcggtatcggcacccacagccttagccatagatctcgcaaaggcagcaggaatctgtcttgtcggcttcgcgcgctcggatggcttcaatatctattcacacccccagcgcctactcgatttggaagctgcacacctagcagccgtatga

SEQ ID NO: 499111 - DNA, 2274 bp, Stenotrophomonas maltophilia
atgtcagagcagaagatcccccgttacaaagcctacgaccatcctgccggtggttggggtgccgccggtgcaaccgccaaggttctgatgcagcagagcgtcattgccaagggatctaaagcgctcttgtcgatgaatcagcctgggggattcaagtgccccagttgcgctttcccggatgcagatcacaccaagaagctggagttctgcgaaaacggtgcgaaggccttggcatgggaggcaaccaagcatcgcgccacgcgtgagttcttcgcggagcacactgtccaggagctgatggcgcagtccgactattggctggagatgcagggtcgattgaccgagccgatgcgatatgacccggtaaccgaccattacgttccttgtagctgggatgaagccttcgcgctgatcgggcgacacctgcaggccctgtccagcccgcatgaggctgagttctacacctcggggaggacgccgaacgaagccgcgttcctgtactcgatcttcgtgcgcgagttcggaaccaacaacttcccggactgctcgaacatgtgccacgagccgaccagccgggggttgccgccggcaattggcgtcggcaagggcactatcgtgctcgatgactttgagcatgctgaggccatcttcgtcatcggccagaacacaggcaccaactcaccacgaatgatgtccaacctggtggaggcgcggaagcgtaatgctccaattgtcgcggtcaatcctatgccggaacgtgcgctgattcgctttgccgagccccaagacgtcgtgcaaatggccacgtttggctccaccgcgatttccagtgaatttgtacacattcgcatcggcggtgacctggccctgatcaagggcatcatgaaggctatgttcgagcgggaagcggccggcgagtctgttctcgatcacgaattcctgaccgagcacaccgtcgggctggaggcattgcgtgaagaagtgatgtccctggagtggagccagatcctccaagtgtccgggatcaagaaggagcagattctgcgttgtgcagagatctacatccgttcccgtgcgaccattatctgctatggcatgggcctgacccagcaccagcaaggatctcgccttttgcagcaggttgccaatctgctgatgctgcgcggcaacttcggaaagcccggggcgggcattgctcctattcgcggccattccaacgtgcaaggcgaccgtaccgtcggcattgatgagaagccgacgcaacgctacctggaccaagttcgcgacgtgttcgggttcgaaccgccgcgcgaacatgggcaccatgtggttgagtctattgaggcgatgctggctggaaccgccaaggtcttcatcggcatgggcgggaacttcatccatgctgttcctgataccgaaattgcctacagggcaatgcgtggtcttgagcttacggttggcatcgccaccaaactcaaccgtggccacctagtgcatggcaaggaggcgctgatcctaccggtggtggcgcgctcggagtggatccataccccgctaggtgagcagtttgtcaccatcgaggatgccatgtcgaatgtcaccgcatcccgtggagtgctggagcctgtgagtgaacatgttcttccggaagttgagatcgtgtgccgcatggcaatggcaacactgccggacagcaaggtcgactgggcagcttgcatgcacgattacaaccatgttcgtgagctgatcgcggcggtctatcccggcatctacgcagacttcaatgaacggatccaggcgccgcgtggcttccacttggacattccgccgcgccgccgtgagtggccgacacctaacgggaaggccaatattctggtgttgccgggtcttgaagtgaacgacctggtcgaggatcccactatgcttcggctggccacggttcgctcccatgaccagtacaacacgacaatctacagctacaacgatcgctatcgcggtgtgtacaacgatcgaatgatcctcttcatgaacctggaagatcgagtagcacgagggattgggaaggaggaacaggtgagcctcgagacgatctccagtgatggcgtctgccggcgggtcgatgggttgactgtgcttgactatccgatgccgcgtggcgcgattgcgggctactaccctgaactcaatccactgctacctctggattacttcgatcgcatcagtggtacccccgcggcgaagtcgatcccggtcagggtggtcatttcacagtga

SEQ ID NO: 499112 - DNA, 666 bp, Stenotrophomonas maltophilia
atggcgctggaaataggcttcgttgtcgccggtgcgcatcagttcgatgaagcgcacgctgaaggggcgctcgcgcaggtagtccatccactgcggcagctcatcatcattcaggccacgcagcagcaccgcattgagcttgatggccggcaggcccagtgcctgcgccaaggccaggccctgctcgatttccggcaaccggtcatgcccggtgatggttgcgaagcgctcgcgctgcaggctgtccatgctcacgttcaacgccgtcagcccggcgcggtgccagcccggcaggcgccgcggcagcagcgtgccattggtggtgatagccaccttggcgatgcccggcaccgccgccacggtggcgatgatctcgtccagatccttgcgcaggctcggctcaccgccggtcaggcggatcttgctcatgcccagcgccgcgaacgcacgcaccaggcgcgcgatttcatccacctgcaggaagcgcgggcggccgtcggcctggtaaccgtcgggcaggcagtagctgcaacggaagttgcaggcttcggtcaacgacaggcgcaggtacggaaagctgcgtccgaaaccgtcggtgagttggcggggatgacctgccagtgcgccctcacctaccggctctggcgcccgaatgagctcggctga

SEQ ID NO: 499113 - DNA, 282 bp, Stenotrophomonas maltophilia
atgggggcatccaagggtcataaggataagtcggtagccgagacagaagccctggagcgatgtgcgcagtatggggcgactgactgcaaagtcctgacaacttacaaaaaccagtgcgttgcctacgcgaccgcgcaggaaggacggaaggtaaggacgaacacgggagcatcgcgcgaaagtgcaacccagaatgtgctggctgcgtgcagtaaggagagcattgggcaatgcaaggtgctctataccgactgcactgagccgctcttcaagtcttactga

SEQ ID NO: 499114 - DNA, 798 bp, Stenotrophomonas maltophilia
atggagatgatcatgaagaacgcgtcgatgaatgccagcaccggaaagcgtggcctcctgcgatcgcgccttgcggcgttgacgctgggggtggcgctgtcgctgggcggtgtgtcctccgtaaatgcaatccccgtgtatgacggtgccaattggctccaagccatgctggatcgcatttccaatggcatcgaattcggtgagaacgccaagcgctggagtgaaatgctcaaccaggtgcgcgaagcaatcatcgatgttcagagcattttcaagtcgttcggtcttccgccaggcgccatcctgacgcgtgtgcccgatgattacatggtgaccgaggcctgtggtaatggcggaagtggcgatcccgtggacatgctgttctcgtactttgtcttcaacccaaagggtgacgtcaagcagcagcaacgtcagatctgcgtcaatatccggatgatgcagaatcgcaagtacaacgattcagttgacttcattcagcaaacaatcccgcagatggacgatctgatcacgaagatcaacgcgaaccgcaagcgcgacaatcgcgcgggtactgtgaccggcgttgacagtgattcgttgcggacggccaacgagctggcggtgcagtcgcagtcctggcaggcgcgaatgaaggcttacgacgcgtacatcgaggtcatggaagccaaccagaagatcgttgcccaggcggcattgaagggtgatccaacggcgattcgcctggcgagtgatctcgtaaagactgtttcgctcaaggccgcgttgagcatcaaataa

SEQ ID NO: 499115 - DNA, 1173 bp, Stenotrophomonas maltophilia
atgggtctgaagatcaatcgcttgacggcgagacgggtagccacagtcacggagccgggctaccacgcggacggcgggggcctgtacctacaggtcaccgcttccggggcgaagagctgggtgtttcggtatcgctttgagggcagacgcccagagatggggcttggcccgctgcatgtgatcggtctcgctgatgcgcgggtggcggctgatgccgcgaggaagttgatccaggccggccaggaccctcttgccggtaggcgcgccgccgcgatggccacgtcatccatcccgaccttctgggaagccgctgtgacctacattgcagagcgccaggccggctggaccaacccgaagcatgccggacaatggaccagcaccctggagacctacgccaagccgctgctgggcgacctacgggtggaccgtatcgagacggatcacgttctggctgtgctgaggcccatctgggcaaccaagacagagacggccagccgcgtccggcagagagtggaggccgttctggactcggtaactgtccagaagaaaagaactggcgacaacccggccaggtggcgcggtcacttggccatgatcctgcccaagccgacggccgtaacaaaggtggagaactttgccgccctgccctattcggaactgccaagcttcatggccgcgctggcgcgccggcacggcgaggccgctcgggcattggagttcaccatcctcacagcagcccggacgggcatgacactcggggcggcgcccagggagatcgacctccaggccggaacatggacggtgccaggcgaccgcatgaaggcgaaggttgaacacacaatccccctgccagcggcggcattagcactcgcgcggcaacgcatgcagcgcgcgctattgttccccaatgacctcacaagcgagccgctcagcgagaacgcgatgctggcgctacttaagcgcatgggctttggccacatcacagttcatggctttcgatccaccttcaaggactgggcgagcgaaaccactgactttccagatgacctctccgaagccgcattggcacaccggatccgtgacaaggccaaagctgcatacaagcggggaacgatgcttgaaaagcgaaggttgctgatggaggcgtgggccgacttctctggctacaagtag

SEQ ID NO: 499116 - DNA, 1524 bp, Stenotrophomonas maltophilia
atgacgattatctccggacgcaatggaacgatgaaaacctccatcatgggcctcatagcgcacccctttaccggcgaagccaaagatgcgtttggctccccgttgaagacgctttattcagaggtcttcagcttatctcctgctcacgacacggaggactacagctatgagatggtacttgaaaccagcaaaggcattctcgcagaagaggtcaagatttactatgtcgcaaaaaagacgaaccggcatcgcgttgtagtttccggcgcagaagctggtgatggcaactttaattacaacacctcattcttgaacttgaagcgactctacccaatggtagacaccaaggcaattcctgccactgctcaagctcttagcagcgccgaagctgtcgaactaaagaatttttacgaatcggtattcccaagcagctcatataagagcttcgcgcctatcgtgcagcccaagcttaagacgacttttgcgccgtctggacctggggcgacctacgactggagagccatctcgtcaggcgaagataacctaggatcaattttcaatcgactccttggctttatgcgtgcggagagaaatggaaattcgggcaatggaattttatgcattgatgaatttgaggcaagcctccaccccgtggcgcaaattcagctatttgactacctgctcaaatggtcgcagcgatataaagttcaggtcgtcattaccactcattcgctgcatcttattcagcacgcatacttggcacatcaagccagccttgacgccaagaggatcgtgattaatttcataagcaaagcaaaggcaagcaaaggcaacactccgattctcaagaacccaacatacgaacaggcatattccgagctcacgctcgaaacgccagagaaggcagcagaggctcgaaaggtgcgtgttttctgcgaagacgaccttgcaattcactttgttcgatgcgcggtggggaagagagacgttcttaagctggtggcattacacagctccctcgcaccgaagtccggcctaccgggaacatcgtactcttccctggcgagcctatgcataaattacccagccctcctcgaacattcctttgtagtgtttgatgctgatgtacccgacaccaagctggcaaaaataaaggacaaaaaatcctttgtccgtctcccagaccctgacaacctaggactggaacggcggatagttcacttcatttgctcgctagagaatgatgacgaattctttagcaaatttaatcgagagcaagaagcctttcttcgagactttaaacttgccgggataatttcacttacaccggcagacattcttgacgatagcattgtctcaatggattcctgcaaggcctgggcaaattcggacgtagcctcgttcaaaaaatacgtgacgcattattgccacaccatagacacaactgaattcctaacagctttcgtggaccgtataaatcagataaactccaaggtgggcatccctcccgtgaacatcggatga

SEQ ID NO: 499117 - DNA, 780 bp, Stenotrophomonas maltophilia
atgacgcggaacaatctaagcggacattacctggagccctacgcagggggagccggcgtagcgctgtgccttctgcaggaaggcgtaacctcccacattcatatcaatgatattgatccggctgttcacgcgttttggatagccgctaccgaacacccggatgatttacttcggttgctgcacgacaccccagtgacgatggaacagtggttccagtggcgagccgttcttcgaggagagcgagaagcatccgtggtggatcgaggtttcgccactctatttatgaaccgaactaatcggtcgggcattctaaaggcaggcgtcatcggcggcttgaatcagagtgggccttacaaaattgatgctcgctttaagaaagaggtcattacctctcgcatcgagaaaattgcaggctatgccaaccaaattaccgtgtactgtgaggatgctcttgcgctgattaagcgcagtgccgatttcttgccagctcgatcattgatctatctggaccctccctactttgttaagggaaaaggcctttatagaaatttctacaagactgacgatcatgcccagatcgctacacacctgcagtcgggcgagctatcgagcagctggctagtgtcgtacgacaatgcacctgaaatactggaaatgtattccagaagcagaaaggctcaatatagtctcaattattccgcccagaaaatctatcgggcaaatgaggcggtgttcttctcttctgacctcgtcgttcccgaagccttggcagcgaagtaa

SEQ ID NO: 499118 - DNA, 504 bp, Stenotrophomonas maltophilia
atgtattcgtcccacggcttccgcaccgccccgatccccgctggctggatccagaccggcgagcgctgggcgctctggtacaacggccgcgagacggccagcgtcacgccagatggcggtcctggggtccggctatggatggaaggccagaagatgtggcaggtaaaggaagtgcgcgccgccaacgtccggcaggcgaagcgctacgccgagcgctggtgtgcggccaggctctatcccgagctgccgctgcgccaagccgtcgcgcggctgaccgacagcaccccgatccaacccgagccgccgctgcccggcctgccgccaacccgccagcagcagcaacaggcccggcgtctggccgaggctggcgcgaaggaggtcgagcggatcaaggcggcgcttgaaccgcgcaagccgccgacagagacgaagccccgagcgagggacgcacgcaccaaggcgtgggtgagggcagggctgcagcagatgcgccgcggcgtttga

SEQ ID NO: 499119 - DNA, 276 bp, Stenotrophomonas maltophilia
atgaatgatcgaacatcggagttgctcgaccgactccattgctgcgaagcctcaatagaagtacaccgtgcctacatcaaagcgttggagtacggcctgcgcatggcggtattcagccatccagcgcgggaacagctctccggtgcctggctccagctgctgcccaatatcgcggcgaagcaccgagatgatggcggcgagctattcgccgccgccttccagcaggcccttacagtgctaaccgagcaaatcggcgagccgaacagcaagctttag

SEQ ID NO: 499120 - DNA, 450 bp, Stenotrophomonas maltophilia
atgcccatcagggcggttgtatatgtgagcggtgccggagagggaatcgccggcgacaagctgggcctgtccaacggaaagctggatcagattgtggatgacgccgcccggttcaaccgtaatgctggggttacgggggtgctcctcttcgatggcgaacgcttcctccagtatctggaggggccggaagacggattgtcggtggcgtactcccgcgtgctgggtgcgagcagccacaacggcatcgtggagctgcagaggggccgggtgggacaacgccggctgccgttctggccaatgaagtggcttccagtcgagcccgaggagcttaagcgcgtggcccatgcggactggacccggttcaatcagcgcggcgacgccttggcatcctacgcgacggctatggatctgttagtcgcgttagtcgagccctacgcgatcgcagcctaa

SEQ ID NO: 499121 - DNA, 126 bp, Stenotrophomonas maltophilia
atgggtgacatgtctgcactggttgcagcggatagtgatggcacttacgtgcttcaacttgcccagctcgtcgcggtccgcgtcgaggtcgataacgtgaaaaaggcctgtatctggcattgctaa

SEQ ID NO: 499122 - DNA, 666 bp, Stenotrophomonas maltophilia
atgtgcggccgattcgtccagctccccgttgtcgacttcggccagccggggctggctgaccttgcccccggcctagccgagatccagcccagctacaacttggcgcctacgcagcgcgcctcagtgatcctggacaggggcgaaggccggcaggtcacccgcttggcctggggcctgctgcccttctgggccaaggccaagggcctgcagggatcaaccatcaatgcgcgcatcgagaccgtggccaccaagcccgccttccgatcggcgttcaagaagcgccggtgcgtgatcccgatggccggctactacgagtggtcggttagcccgatcgacgagaagaaggatccctggttcatccatgccaccgggccattactggccgctggcctgtgggaagacaccagcccgctgctgcccgacggcaacctgggaaccttcaccatcatcaccggcgacagcagcggcgtctcggccgacatccacgaccgcatgccggtgtggctgcaggccggccagatcgatgagtggttggccgcaagccccgacgacgccatggcgatgctcctggccagcgagcctccggcgatggaggcttatcgggtcagccgcgcggtgaacacgccgcggaacaaccgcgaagacctgctgcagcaggtcgcatag

SEQ ID NO: 499123 - DNA, 372 bp, Stenotrophomonas maltophilia
gtgttcgatcgcccggccaacgaggatgcgcagtatctggcattgtgggatgcgaatggccggctgacgtacgcgctgggcgcaaagcccatgcggatcatcggtgtaggcggcgtctttcccaatggcggtatggaagaggacaggttccctgacttcaccggcaagacggtcgccggggtgatctgcgcgccggccaccagcacgttccagaacagcttcaccgtgatggggatcggcaacgggcagggcgttagcgggaagcacggccttttcggcaacgccatcaccatcccgaaaatcgggactggcggctcaccaaaccaggccgtggtcgggatcgtgatggccgtggatgtgacgaactactga

SEQ ID NO: 499124 - DNA, 438 bp, Stenotrophomonas maltophilia
atgcgccggcgtcatgtccgcccgtacccgccgggacgtttgcgcatcaatggcgacgcgtacccggccgaggcctggggcactggcggtaccgtggtggccacctgggcacaccgcgatcgcctcctgcaggccgaccagctggtcgactccgaacagtccagcatcggcccagagccaggcactacctacaccgcccgctggtacctgcagaacaccctggtgcgtgagcaggctggcatcacgaccacgaccgacagctatctgccgccggtcggcagcggcggcaagacgctgcgcgtggaaatcgaggctgtccgagccggtttcaacagctggcagcgcctgcaacacaccttcctctaccgcgcgcagctggtgaccgaggcgggcgaccgcatcgtcaccgaagccggcgacccgatcatcctggagtaa

SEQ ID NO: 499125 - DNA, 762 bp, Stenotrophomonas maltophilia
atgcctgacgtcaaactctcccagcttgccgccgccagtgcggcctcggtcgcggccggagccagcctgtggacgatggccggccacatcctcggcttgcgcatggagtatgtggggcccgcttccatccgcgtttccagcggcagcgcctggatcccgtcgctgcagcaggcagtcgaggtgcccagcgccctgaccctcagcggtctgacccttgcggccaacacgtggtaccacctgtatctgtacctcaacggctcaacgccggcgatcgaggccgccacagatgcgccggctgccccctatagcggcaccgcacgcgcaaagacgggcgctacttcgcggcggtacatcggaagcttccgtacgaatgcggcaggggccattttcaacttcgcgcagaccggaacggcaatcgcctacaaaaatgcgcaatcaaatgcccccttccgggttctctcgcaaggcaccgcgacaactgaaacaaccgtctctctggcagctgtggtgcctctgacctcgcgactggcaacagttcagctctacaactttgcagataccaacatggggacgggaacgagcgacgacagcgctgtggggccgccaagccaaccgaacgatgccttgttcctagttcgtcgtgacgcgacagcgatggtttcccatccacttgatggctcgcaggcaatgacttattggctgacggccgtaccggttggatccgtgtatgtggacgttttcgggtatgtctatgaacgctga

SEQ ID NO: 499126 - DNA, 375 bp, Stenotrophomonas maltophilia
atgtggacgttttcgggtatgtctatgaacgctgacgtatatgcggtgaccgatacgggctaccgctcaatcagtgaggggatggagctgcagtcgggcgagacggcaatggcgtcgatccccgcttcgctgctgctgcgaatcaacgccgaccaggtcaggttggctcgatcccagcagctgcgggccacagattggactcaggcgcccgacagcccgctcggtcaggaagcgaagctggcatgggcgtcctatcgtcaggcgcttcgtgacctaccggagaaggccggtttccccaactgcccttggccgagcccgccggccggcctggacggtgccgcttccgtgacgctgccagcggcagacccaaattga

SEQ ID NO: 499127 - DNA, 762 bp, Stenotrophomonas maltophilia
atgaagacgaccacgctgttcccctggccaggcgggaagacccgcctgctgccgcacctgctgcccctggtggctgatgccccccaccgcacctacgttgaggccttcgccggaggcgctgcgcttctgttcgcacgggaaccggccaaggccgaagtcctgaacgactgccacggcgagctggtacgcctctaccgtgtggtagccaaccaccttgaggagttcgtccgccagttcaagtgggcgctgacgagccgggaaatgttccgctggtgccaactgcagcacccggacacgctgaccgacatccagcgagctgcgcgcttctactacctgcagcggctggcttgggggggcaaggcgactggccagactccaggcttcggccggggcggcaagggcctcaatctgctgcgcatcgaagaggatctgagcgctgcgcacctccggctccacaaggtcaccgtcgaacacctggcctggcagcagtgcatggccaagtacgatgccgtcgataccctgttcttcctggatccgccgtactgggagacagaggggtatggcgctccctttgggatggagcagtaccaggagctggcgcgccagatggctgggctgcgtggcgctgccatcctgacgatcaacgaccacccggccatgcgggaggtgttcggtcagttcagggaccgggtggtgccaatccgatacaccattggtcggcaggcggtgcagcggcgggagctgatctacacgacctggtag

SEQ ID NO: 499128 - DNA, 255 bp, Stenotrophomonas maltophilia
atgagcagcgacggccaaggacaccgctatgtcgtagcgaccattcctgggagtgggtcacacaccccgctggcgcggcttctgctgggccgaccgagcggctaccgcgtttgctatgtggacggtaactctctcaacctgctgccggagaatcttcgactggtcgcgccgtgggccgatgaacgcactgccgctggcgcattggcattgcaccttgccattgcccgacacgataccgagcgcacccaggcgtaa

SEQ ID NO: 499129 - DNA, 213 bp, Stenotrophomonas maltophilia
atgcacgaccaaaacatcaacgccgcgactcccgttcgcctcttgcccattgccgaggtctgccagatcgtcgggctaggcgagagcaccgtgtgggaacgtacccgcgcaggcacgttcccaaagccggtcaagctgtcggagcggacaacccgctgggtgtctaccgaggttgaccggtgggtcgccgaggtcatcgccaagcgcgcctag

SEQ ID NO: 499130 - DNA, 447 bp, Stenotrophomonas maltophilia
atgaagaagctgctcatccctaccctgctgattgccggactgtccggctgcatgccgaccaagcaggcgtcgcccgagcagatcaaggacgctccgaccgcgcgcattttcccgatcggtgcccagggtgaacccacgggcaccatcacggtcacccgcgatgtcggattcgtgggcagcggctgctacatgggcgtcatggtcgacggcaagatggccgcacatctcgaccccgccgagcgcctttcccttgtcctggccgaggggcgccacgtactgacagccacgcctgtccaggggcggggcctatgcggcgtgctgcaatcggagaagaccaacaattcccgtcggcgctcgaccgaaatcaacgtccgtgccggcgccacgcaggcgtatcgcctctactcctctgctgaagagttcccggtaatcgaaccagcgttctga

SEQ ID NO: 499131 - DNA, 1242 bp, Stenotrophomonas maltophilia
atgcggttgccggccagcggccggcactaccgttcggcagtttcccaggggaagcgtggcagggcgtccaccgcctgttccagccgctgcagatgcagcaggtcttccgcgccgtggccgaagcgctgggctgatgtcccggtagtgctggccgctggccggcatccctgtgtggtgggatcaatgcggttgccggccagcggccggcactaccgttcggcagtttcccaggggaagcgtggcagggcgtccaccgcctgttccagccgctgcagatgcagcaggtcttccgcgccgtggccgaagcgctgggctgatgtcccggtagtgctggccgctggccggcatccctgtgtggtgggatcaatgcggttgccggccagcggccggcactaccgttcggcagtttcccaggggaagcgtggcagggcgtccaccgcctgttccagccgctgcagatgcagcaggtcttccgcgccgtggccgaagcgctgggctgatgtcccggtagtgctggccgctggccggcatccctgtgtggtgggatcaatgcggttgccggccagcggccggcactaccgttcggcagtttcccaggggaagcgtggcagggcgtccgccgcctgttccagccgctgcagatgcagcaggtcttccgcgccgtggccgaagcgttgggttgatgccccggtagtgccggccgctggccggcatccctgtgtggtgggatcaacgcggttgccggccagcggccggcactaccgttcggcagtttcccagaggaagcgtggcagggcgtccatcgcctgttccagccgctgcagatgcagctggtcttcagcgcggtggccgaggcgctgggctgatgccccggtagtgccggccgctggccggcatccctgtggggcgggatcaatgcggttgccggccagcggccggcactacagctcggcagtttcccaggggaaacgcggcagggcgcccatcgcctgttccagccgctgcagatgcagctggtcttccgcgcggtggccgaggcgctgggctgatgccccggtagtgccggccgctggccggcatccctgtggggcgggatcaatgcggttgccggccagcggccggcactacagctcggcagtttcccaggggaaacgcggcagggcgtccatcgcctgttccagccgcagcagatgcagctggtcttccgcgcagcggccgaagcgcagggctgatgccaggtag

SEQ ID NO: 499132 - DNA, 1080 bp, Stenotrophomonas maltophilia
gtggcgccgcccagcgacccggcggtgccggacgtgccggtggcgggtggcagcctgcccggtaccggtgcgccgccgacgccgggtgcacgccccgccgagggcgcggtggtgccgctgtaccgcgtggagaccgccgcctacgccgtggtgccgccgctgctgcgcgagacctcgctggccagcctcggcacgttccacgagcggcagggcgagcagcgcctgctgtacaaccagggcgcattccgcactgcctggggccgtctggtgggacagagcagcgagatccactggaagggtgatgcgcagcccggcttcgatggcgatgtgatgggcctgcaggccggcctcgatgtgtgggctgctgcctctgacaaccaccgcaaccagatcggcgtgttcgtcggccgcacccgcgcgcagggcaagaccaccggcctggcactgggctgggagaacgtgcaggtaggccagaaccgcctggacgacaagcacgtgggcctgtactggacgttcaccgacagcacgggcggctatatcgacgccgtggcgatgcagagccgctacgacggccgcgtgcgctcctcgcgcgggctcggcttcgggatcaagggcgatggcacgagcgtgtcggtggaggcgggcaagccgctgctgcacgtcgggcagtccgcatggtggctggaaccgcaggtgcaggtgatctggcagcgcacttcgctggacgaccgccgcgatgaggtgtcgagcgtacgcttcgacaacgacaacgcctggaccggccgcgtcggcctgcgcctggccggcgactatcagctggccgacaacggctggcagccgtacttcaagctcaactactggcatggccgttccggcgaagaccgcgtcggcttcgacaacgacacgatcatcaattcgcagcgctcgcgtgcactggaggccggcgtcggtgtggtcgggcgcttcaaccgcaccatcagtgcgtacgcggtggccgactacacccgtgaactgggtggcgatcgcaacgagaagcgccgcatcatcgaaggcaacatcggcctgcgcgcggactggtag

SEQ ID NO: 499133 - DNA, 1221 bp, Stenotrophomonas maltophilia
atgaagatctatcttgtcggcggcgccgtacgcgaccgcctgctgcagcgccccgccggcgaccatgactgggtggtggttggcgccacgcccgcgcagatggaagcgcagggctacaccgcggtcggccgcgatttcccggtattcctgcatccaaagaccggtgaggagtacgcactggcgcgcaccgaacgcaaatccggccgcggctatcgcggctttgtggtcgatgccgacccgggagtgacgctggaagaagacctgcagcgccgcgacttcaccatcaatgcgattgcctgcgacgaagacagcggggcgctggtcgatccttacggcggcgtgcgtgatatcgagcagcgcgtgctgcgccatgtcggccctgcgttcgtggaagatccgttgcgcgtgctgcgcgcggcgcgcttcatggcgcgcttcgcgccgctgggcttcaccgttgcgccggaaacgatggatctgatgcgcgagatcgccgccagtggcgaactggatgcactggtgccggagcgagtgtggcaggaactgcgcaaggcgctggtcagtgagcagccctccgccttcctgcgcacgctgcacgatgcacatgcactgggcccgatcctgcccgagctcgaagcactgtatggcgtgccgcagcgtgccgaattccacccggaagtcgataccggcatccaccaggaaatggtcagcgacatggcggcgaagctggcccccggcgatgacctggtcggctttgccgcgcttacccacgatctcggcaagggcctgaccccgccggaggagtggccgcgccacatcatgcacgaacagcgcggtatcaaacccctgaaggcgctgtgcgcgcggttgaagattcctgccgagcaccagcagctggccgaagcggtctgccgggagcacttgaacgtgcaccgcatcgacgaactccgcgatgccaccgtgttggaactactgggccgctgtgatgcgctgcgccggccggagcgcgtggcccgcatcgcactgtgctgcgaggccgacaaacgcggccggctcggcttcgaggacgccgactacccgcagggcgaaacgctcaagcgcctgcaccaggcggcactgtcagtacaggcgcgggacctggataccacccatctgaagggcccggccatcggtgaagcgttggccaaggcgcgcgtaaaagccatcgccgccgcccgctga

SEQ ID NO: 499134 - DNA, 411 bp, Stenotrophomonas maltophilia
atgcgctatgcgtccgtgcacgcccgcgcgctgatgtccgggatcaatctggcgccgctggtagatgtgctgctggtattgctggcgctggtggtcaccaccttgccgatggcacagacgacggcggtgcgcacgttccaacagcgcactgtctgcccgccggggcccgggcacacgccgccggcatcgatcgcgctgcatctcgacgcggccggtggcgtctactggaatgaccggcccttggacgacccgtcactgcagcacgccctcgcccagctccagcagttgccaccggcgctccagccctcgctgcacctgaccaccgccgacagcaccgactacggcgacatggcacgggtgctgttcgccatcgaggggcgtggccttcgcgtcacagcgcagggctactag

SEQ ID NO: 499135 - DNA, 408 bp, Stenotrophomonas maltophilia
gtgcagtacatcctggacatggcagttcaggccagggcgaggcacgccggctggtacgggcaccgcgatcttgtcgagttccgcgcattgggcggtggccaagtgcttgaccggttcaccactgagcagctttgggctctgggctggtccgtcaaaaggacggagttcggcgtactgctgtcggcgaaaggccacgagatcatcgcgaccacctggcccgttgatccgttcggcgaacaatccgattcgaccaccgagcgcataagggctgcggcggggtcgtctgtgacgagcgcgagcgagacacagccgaccaccgccgcggcgaacgggagcaccctgattgcagttggcaagcgcccgctgggcacgttccccgagacgccgccatatccggccagcttctga

SEQ ID NO: 499136 - DNA, 783 bp, Stenotrophomonas maltophilia
ttgtccgccaacgcgcttccgatgaaaattccgagcgaaacagagaattgcagacctgcaaaggagcttgagggaagcatgttgagatctgtcgaggccgtctataactgcccgcgctgccgggcgaatcagattacttttgatgtccactcgattcacaaggttggcgtcgcctatcgttggcaaaagatctatgaggcttcagccgtctgccgaaaatgcagcctgatgagcatccttgttctcaaaagctcggaagtagatagtgaggatgaggacgaagcagtttctggcggcgtaccagtttgcctcaaccatgttatgaaggttgacgggcatgtaagctgcaaggacgctgccggaatttcgccaccagagcacctgcccgaacaggtgaaagccgcattccaagagggcgcgacatgtctcgcggttggttgtatcaatgccgcaggcaccatgtttcgattgtgcgttgatttcgttgccactgaccttgtcaatgccaacagggataaacagccagacgccaggacaaagcgatctctgggcctgcttcttcagtggctctacgatgagaaccgaatttcgccggagcttcacgaactgtccgcctgcatcaaggatgatgggaacgacggagctcacagaggcacgttgtcccaagccgacgcagacgacctgctcgacttcaccatcgagctgctggagtcccactacacgcgaaaggcgcgacttcaaggggcagccgaacggcgcgcggcgcgtcaccagcaagcttag

SEQ ID NO: 499137 - DNA, 360 bp, Stenotrophomonas maltophilia
atgatcaagatcgatccgcacgaacgaattgacctggccggcacttgggccggcttcggtttccaggctgggcacatgttcactcccgaaggtcaccagctggagccctgcgacatggcctggtggtccctgacctgcaatatcgcgcgggaatggcggctgatgatggctgaggcggctccccgggcctcagctacacgaaaggcctcggccacggcgaaatccagcgtgatctacctagctgaagcgctcagaattcgccgagaacggcggttcggcgtgcgtgatcccgaccccgacgccgagacgtccaatgtggtctacatgagtcgtgggccgaaaccgcatcagcgcgtgtga

SEQ ID NO: 499138 - DNA, 420 bp, Stenotrophomonas maltophilia
atgcctgacgttcggaacgaatccgtgagggtcgcttttacctccgaggagaagcgcaagcttgtcgagtccgcccgcatagaaggccgatcactcgctgactacatccgcgagcgtgtccttgcggaatgccgagtagaggacgaggtgttacatttcctgctaaacgacttggctcgcgcagcgatgccgctgcaacgtgccggaaccggtcagcccgatccggacgacgctagtgcgccacaagaactgccggagcagcagcgcgcacgcatagccaaggaagtgcgggcttcattgtctggcgagcagatcgaagctttgtcccagttcttgaatcctgcgttcgagcgagggctttggcccggccccgcgccgcgaaatgggaggatggaagatgggcagccaggatccaaatga

SEQ ID NO: 499139 - DNA, 1476 bp, Stenotrophomonas maltophilia
atggacaccatcccagagccgttctcacttcgcaatccgtcgggcaacccgctggcgcggcgtggcgggttccgcgtcccgtttggcctgaaggatggccgtgtctgggcccccagcgaggtgtccaaaggcaaggcgtgcggctgcatctgcccggggtgccatgccccgctgtcggccaaggccaaggagagtcgccgcaagcgcccccacttcgcccacctgactgacaccggctgccagacgggtcgtgaaaccggaattcacgaacgggccaagcagctgatcgcagaccaccagcggctggtgatcccggcctggaccggcgacccgatcgacatgcccaacccgccgcatgcccgtgacgacgatggccggctccactgggggcggaaggtcgaccagccgagccgcagcatgtcgttgcgcgacatcgagatcgagcgatcgctgggcagctacaagcccgatgtcgttgcccgggatgaggtgggcgagttgctgatcgagatccgcgtgacccatgccgttggcgacatcaaggcggcgcgcgtccaggcgcagggccggaggatggtcgagatcgacctgtcccagctgcaccgcgacactccccacgacctggccgccttcgagcacgccgtgctcgatgacgctgccaatcgcagttggatctcctgtcccgaggcggtagcggagtggggggcttccaagcaggaactggacgagcaggttgcggcgaggaaccagcagatcgcacagctgcgggagcagatggccaaggcggcccaggcccgcaaggaacgcgaggcccaggagaccagggacaaggagggccggaaggcctacatgcgccgccaggagcgtgcgagacacgctgaggacctgggccatctcatggaactgacctcgcctgagcggatcgagcggatcctgcgcgagtatcgggtcagcgcggaagaccgcgtcagcgagctcctggacgccgtgccagcggcgattcggtccgcctgccttcgagcccatgaagatgcctggatcttcggagtggacccggttctttggcagctcctggcccatgaccacttcgtggcaaagcggtccccgggtgatcgcttcaaccagagggacgtcgccgcgtgggtccggcgtagcttctacccagagagggcgctgtacaggctcttcgtcacccagtacgccgcccgcgccgaggcccagcgcgcagggttcgccaagagaaggctggcttactgggttttcaccgacgaagagaacgagcggattccgaacttctacacgcccgtcaacgacttcgtcgacaggctggagtccgcccgggtcatccgacaactgccggcgcccaggggcgagtgcgaagtccttccaccgcccgccggtggctggcacccggtcgcctacgtggatccgggcaacgattccggtgaccgatcatcctcgcttgtcgccctttga

SEQ ID NO: 499140 - DNA, 3681 bp, Stenotrophomonas maltophilia
gtgctggcagtcgaggaaagccacatcaatcgccgcctccagactctgctgaaggacgagaacaacagcctgcgcgtggacgatgccgccaagatcgtcggctgctggaaggcgctggccaagctcggcatccacgagggtgccggcgaaagcgcagaaccgatgaagcgcgcggtcgcgttctgccaggtcatcgagcccagccggggtggcaagacccacaaggtcagctcgaaggaaatcgccgacatgttcaaggcggtcgtggacgcctaccaggacgccgaggacatcgaagacgccgcgcgcatgacctgcgaggccaagcacgtcgacggcagcatgaacgccggcgagaaggaagcgaagcttgactggctcaaggcacccacgccaccggacacctgtcgcgtgctgagcaacgtgcgctgcctttccgaaggcgtggacgtgccggcgctggacgcggtgctgttcctcactccgcgcaactcgcaggtggacgtggtgcagtcggtcggccgggtgatgcgcaatgccccgggcaagcagcgcggctacgtggtgctgccggtggtgatccctgccggcatcgagccgcacgaagcgctgaacgataaccgcacctatgcagtggtctggcaggtgctgcaggcgttgcgcagccatgacgaccgcttcgacgcgatggtcaacaagctcgacctcgtcggcccggaccgcagccggatggaagtcgtcgccgtcgccgacacggtgcagcgcaagaccgcgcggctgctggacggcaatgcccgcaaggcggccaaagccaagagcaggcacagtatcggtgaagcccagcccggctacgaagccgaagtgcaaagcgaattcgagttcgagatcggcgaagtcgagcgcgcgctctacgccaaagtggtcgagaagtgcggcaaccgccaccattgggaggactgggccaacgacatcgccaaaatcgcgcagacccacatcgaccgtatcaaggcgctgctggaagaccccagtcaggccaaggcccgcgaagccttcagcgccttcgccaacgaactgcgcgacgacctcaacgacaaggtctcggacgccgagatcatcgagatgctggcccagcacctgatcaccaagccggtgttcgacgcgctgttcgccgactacagcttcgccagccacaacccgatgtccaaggcgatgcaggccgtgctcgacgtactcgacgaactgcacctggagaaggaagccgacaccctgcaggcgttctacgacagcgtgaagctgcgcgccgaaggcatcaacagcgccgccggcaagcagaagatcgtggtcgagctgtacgacaagttcttccgcaacgccttcccgaagatgaccgagcgcctgggtatcgtctacaccccggtggaagtggtggacttcatcctgcacagcgtgaatcacttgctggagcaggagttcgggcagaccctcggcagcaatggcgtgcacatcctcgaccccttcaccggcaccggcaccttcatcacccgtctgctgcagtccggcctgatcaagccggaagagctggatcacaagtaccggcacgagatccacgccaacgaacttgtgctgctggcctactacatcgccgcgatcaatatcgaggccacgtatcacggcatcgccggcggcgactacgtgcccttcgagggtatctgcctgaccgacaccttccagatgtacgagaaggaggatctggtcgatgcgctgctggtggacaacagccagcggcgcaggcggcagaagacgctcgacattcgcgtgattgtaggcaatccgccgtattcgatcggacaaggcagccaaaacgacaacaatcagaacatcggctatccggcgttggatgcacgcatcgcggaaacctatgccgcacgctcaggcgcggcgttgtccaaggggctttacgacagctacgtccgtgccatccgctgggccagcgaccgcatcggcaatgccggcatcatcggtttcgtcaccaatggtggctatctagagaaggccgccatggacggggtgcggcgctgcttagtggccgagttctccagcctgcatgtattcaatctccgcggcgatatccgcaagaacatgctgagcaaaggacaagcgaaggaaggtcagaacattttcggaagcggcagcatggcgggcattgccatctcacttctgatcagaaatcctgaagccaatcagcgtggtcacgtctactaccacgatattggtgacgatctaagccgcgatgagaagctgggcaggatagaagcctatgccagcgtcgacggtattcccgaacaggaatggcagcacatcatcccggatgcgcatggcgactggctgaagcagcgcgatgacagcttcgggcgtttcatctcgctgggcgacaagaagggcgacgcgtccaagatgttcgacaacttctcgctaggcgtggccaccaaccgagatgcctgggcctacagccatagcaaggccaagcttgcggaaaacatgcgcaacatgatcggcttctacaacgccgaagtggcgcgcttcgatgccgcgcatattggactggacaccaaggcgcggcaggagcgcgtggacggattcattgacagcgacccactccgcatcagttggactcgcgcgctcaagcagaacttgaccaagaatcgcacctacacattcgatgccgagtgcatcgttcccagcctgtatcgcccgttcaccaaacaatggctgtacttcaatcggactttcaacgagatggtgctgcagatgccgcgcatcttcccagatgctgctgcaaaaaacgtagtaattcagctaagcggagctggagcacgatctggattttccgcgattatttctggccatataccgtcccttgacaccattgagaagggccagtgttttccgctctatctctacgatgaagccgcccaacaatccgatgacggcctgttcgcgagcattcccaatgatggcccacgccgacgcgaggccatcaccgatgccggcctcgcgcatttccagtccgcctatccgggcgagacgatcagcaaggaagacctgttctattacatctacggcctgctgcattcccccgactaccgcgaacgctatgccgacaacctgagcaaggagctgccgcgcatcccgcgtgtgcgcacggcacaggatttctggcatttcagccgcgccggccgcgacctcgccgcgctgcacctgaactacgaaacggtggacaagtacccgctcaccatcgagaccaagggcaagctgttggatgccgactaccgcgtcgagaagatgaagttcgccaagaagaaagacccggacaccggcaagtccgtcaacgaccgcggcaccgtgatctacaacggcaaaatcacactgcgcgacattcccgaaaccgcatggggctacatcgtcaacggcaaggccgcgctggattgggtgatggaacgccaggccctgcgcgtggacaaggccagcggcatcgtcaacgacgccaacgactgggccatcgaaaccatgggcaacccgaagtacccgctggaactgttccagcgcgtggtcaccgtcagcctggaaacgcagaagatcgtcgctgcgctgccaccgctggatatccgtgaagacggctga

SEQ ID NO: 499141 - DNA, 624 bp, Stenotrophomonas maltophilia
atgcatcgctccatctatctggtacgccacggagaaagtgtctccaatgcgggtagcatcaccatgccccatgccttgattccactaacagaagcggggcgcaagcaggcagaggcgctatcggctcggttgccagctcagccccccaggattcttgcctcgccctttatcagggcgctggacaccgccgagccttacgccaagcgaaggcaggtcaagatcgagcaggagccgttgctgcaggaattcgacatgatcgacccggtgttgatcgccggcatggaccaagaccaacggcgcccgatcgccgatgcgttctggaaagagggtgatcccacaaagcagatgggcgagcaggccgaaagcttcgggcagttcgcgagccgagcatccgcgttcatgaccgaccggctcccgctgctacccgacggaacggtctgcttcggtcacggcatctggatcggcatggtggcgtggaagctgttggggttcggcgcagacaccagtgatgacatgcgccgcttccggcgtttccagactggcctgccgctgcccaacggcgcggtctacgcgcttgaggaattggcgcccgctcagtggttactcctcaatagattcgcgtga

SEQ ID NO: 499142 - DNA, 366 bp, Stenotrophomonas maltophilia
gtgtgtaatgacgtgggcgccatcagtattcgatcccgatccgcagatgcggggcttaacgggccgtggcggccaggcgaggatggcgaggatggcgaggatggcgaggctcttatcacacgctacggcacgctggggcgtgtgaaggagccatttctgcttcgctcggacaacggcctagtgttcaccagccgcgattacacccggctggtgcgcaggtacggcctgaggcaggagttcaccaccacgcaccgccctcagcagaacgggatggtggaacgggtaatccggacgttgaaagagcaatgcgcgcatcggcatcgcttcgagagccaaacccacgccctgcgggtgattgttgactga

SEQ ID NO: 499143 - DNA, 1464 bp, Stenotrophomonas maltophilia
atggcttggaccgacgatatccacgggcagccggcggtgccacgagtggtaggggctgacctcagcccctatccctacatctccggctacggcttggcacagcgcatcacggcgtttgccctccccgccggtgcagagctcacggcccttggcttcagaaatagaaaggggatggacgttctgattgcgacccagcgattgggcaagccgcgatcgaatttcctctggagcctgggcttggatgacaccaatgtggggacctattggtccccggatgcttggtcgccgaccgattgcccagggctgttctcccggcatccgcgaccgcttcggcaatgctgggagtgcgctgcgtacggatatcacagcgcgctgttccagcttccctccatcactcgctgcccttggcatgggcaacgcctcacctgcacgtgccctcagtgcggccgagtccagtttggccggttcaacgaggacgatgcgctgggcgtctgtgcctgtggattctccgcgatgaatgcccgtacagcgcttgcgggcatgcgcacctttccaacgaatcaatgcgcgccgtgggccgaagactacctgcagtgggcccggggtcagcgggagggccgagttctctatgtgcccgaatccaatcaggcgtgggacctagcctacgcggctctggctgccccgcctgcccgcctgatcgctagagagcttaccgcctctagagagccacctatcccttctgtcttcgaagggataggtgcagatccaaaccacgattgcctgcggggcttctcgcacctgggtggtccccaggtcctccgcttgaccccactacccaaaggtgtcattgaacggctagcggccatcacggatcaggcagttgcagaagtaccgaagcacgagatcgaaatggtgcgaggtgaggctcgcgctcggccgttcgattcaatgtcagtgccgccggctaaagatcgcacgttccttatcggtccttatggtcggtcggagagcggtcatgcttggctcagcctggcggtagtggacaaggagctaaccattgcctgtggaaacgcgctactgcacttttctgagaaactccgcacatctctcgacctgcatctgtctctgcaggcgaccgtggcgtcagtgctgggtgccatcgacggtcgcaggcaccttgtggacgcaatgatggcttgcgtgtgccgagcttatgaccaaggtcttagaacgaggctgcgccaatccgggcaggagatgaaggaggcgcagggtagcactttggaggttccactgattgagctgcacatccgcgatggcgcgattgcaaaggtccaggtggcgtgggctccctccccctcggcaagaagggctccgagcgttccgtcgctccgggctgttcacgagacatcgccgcggtcaacgccgagttcgggccaagaaacggaccgggacggtgtgtaa

SEQ ID NO: 499144 - DNA, 1005 bp, Stenotrophomonas maltophilia
atgaagcacacacacagcaacccgttgatttcctcccaccatccgttgctggtccctgatggttaccagatcaacactaagcccaccgagcgactggccaatttcattcgtaaaaacatctttgaagggcaccatgggtgctctgcctatgggggcggcggcgtggggaagaccaccgccattgcctacctcaccgacaatgctccgcgttggttgattgacagcgacagatccccgatgggcgttgccatgaggatggtcatggccagcggtattcggcgcacggaccgcgcattctggtcgaccatgaatgatcggatggggatcggtagctcgagcgcaacctcagcagcggcaggaatggccaagctccggaacctaatcggcagccgctgcggccaagccggcgtgagcaggatggtcctgttcatagacaatgcacagcggatcaccgaggcagagtacgagtacttggaagacctggacagcatggtcagggaggaccggttgagcctgttcctggtgctgatgcgccagagtgacgccgaaggcgtggacgtgggtgatgactggcgtgaccgtgcatcccacagtatccggcgctggttcatgggcactaccccctttggcccattgatgggactggatgaggttaagcatgccttgagcggttacgacagcagctggtggccaacgcccgacgtgccctacagtcgctacttcgcgcgctcggccttcgatggcggttggcgcttggcgatggaggcgccgctgatctggcaggtgatgggagagcttcgaaaaaagggaaagttgccggaaagccaagcctggccgatggcgacgttcaccttgatggtgcgccatttgctccacgacattgccttccggcagaaggacttcacgggcttcaccgtcgaccaggtggctaccgccctgcagaactgtggctatctgcggctagagtacgtccgagcgcgcatgcgtatgcctttggctacctga

SEQ ID NO: 499145 - DNA, 795 bp, Stenotrophomonas maltophilia
gtggcaaaagccaaagcgcccagcagcatcagggcgcgcggagcactgcgtcggattcctggcggcttcgaacctgccaaggcccacagtgaaagcaagcgacggatcagcaaagtctccgggagtgagcactacttcaatctgggcgcattcgaggagctgctggacgtcatcatcgcaaactacaacgccacaccgcacccagcgctggggagcctgtctccgctgcagttcctcaggtcccaaccttgctcggcctttgctttctgtcccgatggtgccgaacaggacgctgcggacctgtgcaccgtcctggttccgttggtcgtgcatggcaacaagtcacagggtgtggtgcctcacgtcaacaagtacgtcaaataccgagggccaggcctggaaggacgctgggagctgattggcaagacagtgctcgctcgcgtcaatcggagtgacctgcgcacgttgacattgatgaagagcgtcaccgcgccgttgtgcagtgtgcgcgctgcagccccttgggcccgtaccgcacacgatgagacgactcgggcgttgatcatgcaatggatcaagaaccgctccggcttcagcgttttcggtgcggattgtgcggtcgccgcctatgtgagcttcctcaaaaacaggatgcaaacttcgcagctggcggccgatcagctggcgcgcatggacgccgtggcacaaccagcgtcccgccatgcggttgagcctgactactacggcactgtcatcacgatggcaaccgatggctggatcagcctggatgaatag

SEQ ID NO: 499146 - DNA, 594 bp, Stenotrophomonas maltophilia
atgcttactctgacgtctgcatgtgcgcgatcgccggatacgtctgccctcaatgaacgtgccgctgccgcagatacgcaccctgcccgcatctccatgaccgagctgcagaagcggattctcgcctatgcggattcgctcaggtcacgggcggatatcagtccggacaagttcggcacggcgataggtgtctcgctcgtgccagacgaaaaggtcagcatcaggcacatcgcaaaggacctggcaacgacggacggctacaactatggggcgtcttatctgtcggttgagtcggcacgtgagttccccagccaagaggtgatcttctatcagctgggcaagcagccagtgacggatgctccgaatggcgtgtgctactgggaagccgaaagtgccggacgagccctcgaagccctcggatacaggaccggaggagaagtgccatttcagagagggggcatcaggcagtatcggcgccccatcaccggtggtagccagggtatggataccagcctgttgacttatcgttccaatgaaggtgataccgcgagaacctgcgtctacgcggtccagtttggaggaggagacaaatga

SEQ ID NO: 499147 - DNA, 1431 bp, Stenotrophomonas maltophilia
atgaagggaatcgaatccagcgtcgagccactgttggccgatctgcgcgcagacaaacagcttcccagtggtgccgaggatgcgatccgacgcagcattgctggctccccctacctcaatcaccttctggcaaacgcagccaccagcgggcagatcagccggattgccgtgtcctacggacatcacaatggcggccacttccaggatgggtcggatggaaacccgccaacgatcttcatcagcgcctccaatttccagagcgtaaccggcacccggcttgaggaacgacttaccgaagtgctgggccacgagaccatgcacggcatcctggccaaggagcgcgccgcagcgctcagggacttcaagcagacctacagcgaggaactgatcgcttcacacgattcccggtcaggttcggtgaacctgaccgagccggtgcgcacgcttctggacaagggacgacaggacgaggcactggcggaggtctcgggcctgcgggcattggatagccgattcagagcgttgaatccaacgttggatgacaacggactggaggcaatgcttgcgtcccgctcgctctcccggtgcgttcgggctgagggcgcaaccagaggcctggcggagggcatttcatatgatgcgcttgccaagcgccccaacaatgacggcgtccagcttaccaaggccgtcgagcagtgcttctacgacggcactggcacgctgggccggcacggcgattccgactaccgcaactactacggcacctatccgttgtcagtgatcgggacgagccatgccttcctggccgaaggccgccagcccccggcaatccgcatcgatctgcatgagcttggactcgacccgaagcagcttgagcgcaatggcctcgactttggcagcacaaagatcctgcctgttggcgatttcggaaaggacggactgggctgggtggagctgaagaacaccggcagcgcccacaccatttcgccaccgacgcagagcgtcgaagatatgcagtcctcgcccatccgctcgctcagtcctgcagatcaggcgctgctggaccagattcggggcaaggtagaagcactggacaaggccaacggccgaaccttcgatgacgccagtgaacgcatgtctaccagcctgctggctgcagccaaggatgccggaatcacccgcgcggaccatgtggttctgagcagacagacagttgcctccccggccgcacacaacatctttgtggtgcagggtgcgatgtccgaccctgcctcccttcgcactcacatggcgactgcagaggccgcccaacagccagtgcaggagagcctgaaccaggtagaagcaatcggccaccgccaggcgcgcgagcaggcagacatgcagcgtacgcaggagcaacagcagcgggtttcggcgccgtcgatatag

SEQ ID NO: 499148 - DNA, 426 bp, Stenotrophomonas maltophilia
atgccccgcttcaacaccgccctggcactgaacctcgttctgatgctgctgggtgctacacctgccatggccatggccgcagacccgcaggtttccactgaagtgttcgtggagcgcggtgacaatcccaccttcgagctgcagcaggcgcctgccattgagtattcaacggccctcgtcacgccgcccgataccttcctgcaggctcccatgcaggtgctgctggttgctcagctgggcgagctgggccacgtttccaacgtgatggtggcgcggtccagcggactgcgggagatggatcgtgcggcccttaccgcagtacgtcagtggcgctttgatccggtcgtggttgacggcgtcgcgctgcatgcgcgggtgcgggtccgtctggccttcgcgcccacggccgaggcgccgccgggctga

SEQ ID NO: 499149 - DNA, 351 bp, Stenotrophomonas maltophilia
atgaagcctgtgatctatggcgctgtgctcctggcggcggtggctgcggggatcgccagccggcatgaacccaaggctggcttggatctgcggacgtttcggaaggtatccgacgctgagtttgctgtaatgcgcgagaaagccgttcgacttgtgcgcgagggcgtggtgcaggacgcgcggtactccggagaccgatacttcgaggtcagctgtgacggcatacccatgatgctggtggataactcattggagcagcttgtaatcgtgctgtatgcgaatgggcagattgatgttccgtgcgttgtgccgctgctatcgcattggagtgggcggattgtggcggagtag

SEQ ID NO: 499150 - DNA, 216 bp, Stenotrophomonas maltophilia
atgctggacgagctcccgtccagcctcacccccatgaacacacacgacgccagtgatctggccttccgggcgagtgagatgcccccaaccccgcccatcttcacgctcattttcctgctcacggggtcgatgaagtctgagccgaccaagctccatcaaggctctggcggccgcctgcccagcttgcgttctgcggcccaaaacaatcgggcatga

SEQ ID NO: 499151 - DNA, 1578 bp, Stenotrophomonas maltophilia
ttgaccgcagtacgtaagcccatcggtgtaattgatatctttgccggccccggtggcctgggcgaagggttcagcagcttcaagcccgaagaaggtgccaagtaccccttcgaactagcggtatccgctgaaatggagacgtctgcgcactcgactctccgtctcagggccttctatcgccttctcattcggcaggaaggccaggtcccgcaagagtactacgactatctggatgaaattgcgaagggcgacgcccttcctccggcagcacacttcggaaacggtcgatggagcgacctgtgggctgaagccgagcgagaggcgctcaacctcaccctgggtgaggagcgggacaatcaggccctctattcacggatcaacgaggtcaaggatcagtacgagaagatgatcctcatcggaggccctccgtgccaggcttactccgtcgtaggccgggcccgccagcggcatgtggaggggttctcctcaaagggcgacaagaagcatttcctctacaagcaatacctgggtcttcttgacgagttctcacccgctgtcttcatcatggagaacgtcaagggaatcctgacttccaaggttggcgacaaggagatgttcgctgcaatcatgcgcgacctctctgaccctgctgcagccctgaaaagggaaaagaaggggggaaagaacgggtatcgctatgtgcttcttcctatccacgttgaggcgaatcagaagcggacgagcgaacttgtcgcggaggatccgtctgcattcatcatcaagtgtgagaaccacggaattccacaggcgagacaccgggtaatcatcatgggtgtccgggaagatcttcttcccgatggaatcgaagacttgcccggcctcaatgccgcagagccggtcagtgtgaagaaagccctcgcggggcttcccaggctgaggagcggactgagccgcaaacaggacgatcccgaagaatggcggaaggccatggaatcggagagggatcgcctggtccggattctgggcaaatcccatccagagctgatcgagaagctcagctcgattgttccatccggcgggcttccgcgcggctcgatcaagtacacccaagacagcaacccttacgtcaaacagctcaagagcgactcgcagcactccgtgctcaaccatgagacccggggacacatgaaatccgacctcgggcgctacctcttctgcgcggtattcgcgcgcgagcacgaaagatcaccgaccagccgtgacttcccaaagaagctcgcgcccgatcacttgaactgggaaagtggttcgttctcggatcgcttccgcgttcagctcaagggcaagccctcaaatacggtgaccagccacctctcgagagatggtcacgcgttcatccattgggatcctcgccagtgccgaagtctcactgtcagagaggccgctcggttgcagtcgttcccggacgactatgttttcctcggcaataggactcaacaatttgtacaggtcggaaatgcagttccgcctttgattgccagacagatcgcccgagtcgtgtggtcgatactcagctag

SEQ ID NO: 499152 - DNA, 1944 bp, Stenotrophomonas maltophilia
atgcttgccgcttccaaagggcatctggatctctgccggctgatctcggagcatgctctcgaagttcagcggcttgcagttgagaaggctgacgattcatcagtcgcgctggacggcctctggagcaatgaacgtaatggtgaggccgaggaatcttctcaaacgcgagccactgattccacacagaacccctctcccgacggtgctgaattcgaatccgagttctttgccacttgggaggaagaggttgcgaccgaagcgccgctggaagatccctcgcttcgatcaacaataaagatcgtgcaggaggtgatttccaagcacgtaattgtcgataacgatgaggactggaatgacctggcgaagctactcccaagtcacgccgaaatttcactggtccaggagctcaatcacagctcgacacatggactcttcgaagcgctagttcatcgcgcccagatggagggcaacttcaatcctcttgaccttgaggtcatctcccgtgagattgaaggcgatgagaggggcgatgtacttcgccagctcactgtccttatgggccagattgacgccgtaccggaagacgatgatgagtggctacctcctctgcatctaaaacaggagagcgaaccagcatcggacagcgatgtcggtgagttggagcagttcatgcaggatctcgcgtccatgacgaacgatccctacttccacttcgcaaagattgcccagtcgtctgttctgcttgaccgtacgggcgaagaacgaatggggcttctgctggacttgtccctcaaggatgcgtatcgcgccatcgcagagagcccctatgctgtcgcgtcgatagcaggcctagccacagactttgagcggggtcgcgtctcagtcggccaaatcagccacatcagccacatcagcagcgaagacgatgagcgcgccagcgatcttctcgacgtctcggatgacgccgatgatggtccaggcccggcccgacccgtcagtggactcaacctgagcgacatgctggaaagtgcacgctgcggatgtttcgccttccaggaaaatccagacaaccaaggtcttgctagggatgcactggccgcagtatctgcgctggagctgacctcatcgaccgttaaacggtttgacaaggagttcagggcagctgggtgtacaagcgtactactgcgtagagcggtgcagcgtctgtcgcgcctcgagctcgagatgttccatgcaaacgttcgactcgcagtgcacgtggcagacagccatgcgtggagcacgctgccacgcatggatcgcattcaggagtgcctgataggcctgctcaaggctatcgacagattcgattacgcaaggggtaacaaattttctacgtatgccatgtggtggttgaaacagtccgttggacgggccatcggagacacggcgcgtgtcataaggttgcccatacacgtcatggaaaaggtcaacaaggtttcaaaggcagtcagagtcctccgtgaagactcattcgatgacgtgcgcgtcgaggacatcgccaaggtctgcgatctatcagttggggatgtagcaaagttgctgaatttgtcgcacgacgcggtctcttgggaccagcaggatgagacagcagatttggtcctcgccactccagatacctttcagccgcctgaggaagtcactgatggatatctacgtcgtcgagcgatcgatgactgcctaagtgcgcttggttcaagagaagctgaagtcatccgacatcggtttggattgatcgacggcaacgacaagacattggaggaagtcggccagatctttggcgtgactcgagagcggatacgtcagattgagtccaaggcgctaagactgatgcgccacccttcgcgacgtctcagggagttggtcaatggaaagccggaggctgacgatgcagcagaacaataa

SEQ ID NO: 499153 - DNA, 1518 bp, Stenotrophomonas maltophilia
atgcagcagaacaataagggtaggccgcaaggccgaaatgctccccccagggctgacgccatggttgaggcactgcgcggcctgggctacacgacggccacggcgctggcagacctggtggacaacagcatttccgctggcgccggccaagtagaggtcggattcaattggaatggtgtagacagctggatatccattgcagatgacggcagaggcatgaacgatgctgagctattaagcgcaatgcgcctcggcgaccgcaaccccttggacgtacggggggcctcggatttgggtcgctttggcctgggactcaagacagcatcgttctcacaagccagaaggttgaccgttctgagcatcaaggatggtcaatcgagctgcctgcgctgggatctggatgtccttgcttcagatcctgatggcgagtggcaccttcttgatggacccgagtcatcctcagagccacgcctggtacagcacactgcccagtcatcagggacagtagtcctgtgggaacaactcgatcggattgtcactgaaggtttcacaagcaggcatttccttgacctcattgacgacgtggagcgccacctcgcaatgatattccaccgctatcttgacggcagcggccccggcattgagctgcggctcaacgggaaagcagttggaccatgggacccattcctgtcgtcaaatccggcaacctggaggtcacccgagtcgaacgttggcgaaggtggtctgagaatcaccagccaggctttcgtgctgccccacaaggaccgcctcaacgacaaggcctacgttgaagcgggcggaatcgagggatggtcgagtcagcaaggcttctacatctatcgtggacggagacttttggttgcaggcagctggctcggcctgggacgtgggcgctcctggtccaaggacgaggctcacaggctcgcacgcattcggctggacctgcccaacgatcttgatgcgcaatggaagatcgacatccgcaagtcatccgctcatcctcccgcggcactgcgggatcagctctaccgcttggccgaagacgcgcgcgacagggcgcgcaaggtattcctgcatcgggcgcattcgaattcatcgctgggccggcgcgacgaggttgtacccgtgtggcagtcgagagagacggcgacagggcgacgctaccgtgtcgaccgtacgcacgcagcggtgaaagaattgctggatgacgcagcgtacggcaccaaggttgaagcgatgctgcgtgtcctcgaagaaactatccccgtgcagagaatctggcttgaagctgcggaaagcggagagcatgcaaaggggggattcacaggggagcccgacgaatcagttcgagaggttctcaatttgatttaccggagcctggtggagaagaagggcatgtcgccgagcatggcaaagcggcagcttctaagaaccgaacccttcgatctccactcagagctggtcaaaaatttgccggacaacatctccaaggactga

SEQ ID NO: 499154 - DNA, 2970 bp, Stenotrophomonas maltophilia
atgagtgactcaagcgaaagcagcgttatcaagattgtccaggagcttctggctggcgagaaggattcaggaccgatcactcctacgttgattgacgagaagatcagcctggtgctgatgatgaatcgaaagtgggcagccgatcttgatcgtgaagctgttacggacgagcttatccggcgattcagtgtatggatcggtgatgacatcagtctctccgacgatcgtggccatgaaccttggctcgactcctcgaggaaagaggactggcgctactggcagcggtatcgggagatgatcgagaaggacttgtcctgggatatcgctgacaacctggacaaatcaactgacaagattctagggatgcttgaggatcctctgcgtgaaggccagtggagtcgtcgggggcttgttgtcgggcacgtgcagtcaggcaagacagcgagctacaccggccttgtatgcaaggcagcggatgcgcagtacaaaataatcatcgtcctcgccggcctgcataaaaacctgcgatcccagacccagatacgcctagaggaaggcttcctcgggtatgagaccaactctacgcatgatgtgctcaagcgcgtgggcgtcggcttgatcgacagtgacctgtccatcaagcccaattgcgctacaacgcgagctgacaatggtgattttggtgagtcagctggaaagcagttttcgatcagccccgaacagcggccttggctgtttgttgtcaagaagaacaaatcggtacttgccaggcttctcaggtggattcagacgcacgtcgcggatgctcctgttccaggcgcggagcccgcctcctcgaacacgaaagagctcccaatcgtggccagaagggcgaccaagttcccattgctcatcattgatgacgaagctgacaatgcctcagttgacactggtgaagaggtagtcgacgaagaaggaaagcccgacgaggaacatgatccaacagcgatcaacaaactgatccggcgcatactgaattcattctcgcgctcagcgtacgtgggctacaccgctacgcctttcgcaaacatcttcattcatgaacgcggtgagacacgcaacgagggtcctgatctctttccatccgccttcatccagaacctggcggcaccggacaattacgttggccctacgacgatgtttgggcgcgcgtccccggagggtcgcaagggacagcttcctctgacccaaccggtgggtgactaccagtcagacgacaagacaacgggatggatgccgacaggccacaagatcgatcatgttccggtgtggagcaatgagcaggcactgccaccaagtctaagagaggcagtcgactcctttatcctggcatgcactgtcaggaagcttcgtggccaaggaaagaagcatagctcgatgctcgttcacgtcacacgattcaacaacgtccagaaggtggtaaaggctgacattgacgattacgtcaagcatgcccgacaggcaattgggcgcgggatcgaccacgccgactttctatctagtctgcatgagctgtggaatcgtgacttccttcctgcttctgccgcggttcgtgagcttgggttgggtgaccttcccagtgcagatgccacttggcaagacgtcgcgtctgcgctgccgggagtactcgatgacatcgaagtgcgaatgatcaacggaactgccaaggatgccttggattacgagcagaacaaggatcgaggcctcaaagtcatcgctatcggtggcgacaagcttgcacgcggtcttacgctggaaggcctctgcaccagctacttcctgcgcgcatcaaagatgtacgacacgctgatgcagatgggtcggtggttcggataccgtccgggctaccttgatctctgccgtctctatacatccccggacctcattcgctggttcaagcatatctctgatgcatcagcagagctgagagaagagttcgatctcatggccaattctggggccacgccgcgggagtttgggctgaaggtccagtcgcatcccgagatgatggtcacgtcgcagatcaagatgcggagcgcgaagacactgcacctttcgtacagcggagagcttgttcagacagtcagcttcccgactgatcaaccgactctgaatcgaaacctggatgcaggtagtcggctggccgagcaaatgggaaaacccgacgagagcaacccaataagggcagcgttccaagggggctccagggaatggcaggggcatctctggcgaggtgtcgacttcacaaccgtagtcgacttccttgacagctacagcacactgtcagtcgcccaccgggtgaatagcaacgtacttgctcagttcatccgcaagatggcgggaacaaatgagctcacggagtggacagtggctgttctggggactcaatcgggtgagccctatgagctggctccagggatcagtgttggcatggcgcgcagaaaggccgattcgatggaggggagccggtactcgattggcgtcctccttgatccgaccgacgagtcaattgacgtgagccaggatcaatgggacgccgcgctcgcgctcaccgtgtctacttgggagaagaagcaggagaagaaaaatgcttcggctccggagatccccagtggcgtggcgctgcgccgagttcgaggcaagggaacttcgaccgtgacggcggagccagagaagggcctgctgattctgtatgttcttgatccagctcgtgcgggcgccaggataggggcagattgggagcgcccgaagaacctagcaggcgccccacccgtgttggcatttgccgtgagcttccctggaagcagctccgatatcaaggttccctacaaggtgaacaacgtcggttgggagagcgagtattccgacatccccgagtacgtcatcaacagcatcggctgggaggatatgaatgctcagctccagcagtga

SEQ ID NO: 499155 - DNA, 1029 bp, Stenotrophomonas maltophilia
atgctcagctccagcagtgacacagagctggtcgccgcgtggcgcgccctgagcggccttgccacaggcgatggctggaaggttatcgagcttttcagcatcgggaactgctgcgtcatggcaggccgtcgtggtgcgcggaatgaagagagcgtcttggtcggcgtcaagggaaacgtgccatcccaaccatttcagctgccacgcggccaggggttcagcctcataagcacagagcttcagggccatcctgcaggccattcgtggtttgccctggttcgacaggagtctggatcgcttgagctctttaccaaagtggcggtagatctggtgaacctgatggagagcacgtccgctcaggaaggcctacggattcatggtgcaatgatttccaggatccgtgcctggcaagccttcatgaagcgcgacagcgatggcgttctttccacggaggaagagattgggctctttggagaactcctggttcttcaaaaccttctggacgatggagtttcagaattcgacgctctcgacagctgggccgggcctgacgacggggtacacgacttcctgcttggtgatggtgcaatcgaagtgaagacaaccctggcaccggcaggatttatcgcgaggatttccaaccttgatcagttggatgacagcctgaaccggcccctctttgttgcggcggttcgtctagcccaactgagtgggggatcaacccttcccgacttgattgaccaagtggctggaagaatccacgatcccggcgcatctgccttgctgaacagtcggctcgtttcggctggctacatagacatgactcgagccgagtacacaaggcgtttccgatccagtgagctcacatatcgaatcgtatgcgctgaatcgcctcgcctcactcgttccagcgtgcccgcagcaatccatgaggcacgttactcgctcgatctggatgcatttccgattgcggcgtctacttacgctgatatttcgactagtcttggagtgaagaatcaatggaattga

SEQ ID NO: 499156 - DNA, 1794 bp, Stenotrophomonas maltophilia
atggaattgaccgatttcctttcgcagattcgcgcggaagtacaggatgaaatagaggatcgaatgtccgtttctggggccgcgtatccctatccggagctggtttttgccgagattgcgatgcgccacatggaagaagtgggcatgacctacgagccacaggtctgccacgttgatacgcgtgtccatgtcggaaacatcaggctaagcggatactccatctctgaagacggggaacgccttgacctgttcgtgacgtcctacaaggattcggacaacgtccaggccgttccggactctgaagcaaagcaagcagcggagtactgcttccgatttctttcgcaatctgcccaaggaaagatgacgaagacgctcgatccatcgaacgatgcgtacgaactcgcggtgcatattgaacgtggctatcgggacttcgaggagatccggatctacgtgctgacggatggccaggtaaagaccaagaacttcaaatcgcagcaggttgggggccggaccgtgcgacttgaggtgatggacatcgagaggctcaaccgccacctgtcagagggaaagccgagggatgagctggtagtcaatttttcggaagtggcgggcaccccgctcccgtgcgtctatattcggggcgaggaagacagctatgactacgcaatgaccgtattcccagccgacgtgcttcgccatctgtatgacaagtacggtgccagacttcttgaggcaaatgtgcggtcattcctgagtgcaaccggaaaggtcaacaagggcatccaggccacgctgcgctcggagccagagaagtttgtcgcctacaacaacggcatcgtggtggtcgccgacgaagtcagccttgggaagaccagcgatggaggacctggcattgcgtggctgaaggggatgcagatcgtcaacggtggtcagacgaccgcatccatttacttcaccaagaagaagtttgcagacactgacctgtccaaggtacaggttccggcgaaggtcgtaattctcaagacggaaaactccgcagcggaagaggcgcttatcagcgacatctcgcggttcgcgaacagccagaacaccgtcaagcagtcggatctgtctgcaaactcaccttttcacgttgagctcgagaaactctctgataccgtttatttgcctgatggtgtcggtcggtggttctatgaacgtgcctcaggcagttacaacaccaagctggcgcgagaaggcagtacggctgccaaataccggactctcaagactacagttattccgccggcccggcgcttggtcaagactgacctcgccaagttcctgaactcttgggatgggcgaccagaccaagccagtctcggcggtcagaagaacttcgcgcgcttcatggacgatgtgaaagaacgggaagagcgtggagaatctgtggtcccggatgcaactgggttcaagcagatgattgccaaagtcatcatcttcaaacaagttcagtcactcatccgtcctctactacccgcattccagggcaacgttgccatctacttggtctcgctgctttctcagcagcatggatcaaagatcgatctcatgcgagtgtgggagcaacagggcctctctgaaggcttcaaggagcaaatccgcacgtgggcaaaagaagttaacgccgcgcttcaagcttccgccaagggaaggatgatcagcgagtgggcgaagaaagaagaatgctggttggcgcttcagaagctcagcctcagctcaatcggaaatagcattattgaactacgatag

SEQ ID NO: 499157 - DNA, 1026 bp, Stenotrophomonas maltophilia
atggatgagcgcggagctgactatttcgtttgtcgggtaatgacgtctcgtcagaagagtctcgagcctttggatgtcccgatatacattggtggcgatgaggttggagggctttgtcttcttcgtgaggttcgggtgcaagttgctgcattgacgatctatcagcgagaagcattcttgagggactcggaaaatgtcgagtcgcaagatggatggtatgtgtttaggtctgactacgtggtcataggtgccgaatggcgcactgagtactcggctgcgatgggcacatcagcattctgggggcagtacgtgcacgcggagtcccctggctttgaagtagcagctgcagggacgaacaacgagaggatcgatgttgaccagcgtcaggttcgactcacgccgcgtcatcaagagtctctgtctaagtacgcagcatatggacggccgacggacagattcttatttctctaccattttatggaaatagatttcgagcgggaatttgttcgaagaattaaagccgtcgacatggagcgtgcatttggtattggaaaaattcttaaggacatgggcgggaacgaggagttgccaagactcattgccttggtgaaggatatgcctgtagcgccgcttgaggagattgcaggcaatcttagaaatcacatgcaggtcgcagaaagtgtgttttatgacttcgggaaggaatcaaatccaattctcgacatcaatgattttaggcagttgttcagcgagtgtccgacggttagctatgcgtcattcctcgatcataaaaagaactctgcatcgatctcaattaatttgacaaagaccaatgaatcttacttggttgcaatgaggaagctcggtgcgtactggatgtacagagtgagatgttgcattgctcataacaagatgggtgagtatcacatgatgacgtcgatggatatggaattcatggaggggtttgcaatacctatgctcaggtcgatgattagtttcaggatgtctgttgcttcgttggattaa

SEQ ID NO: 499158 - DNA, 1110 bp, Stenotrophomonas maltophilia
atggcgtttagtgttattgctaatgtgcgggacgttcgaactggctcattggtcatctacgcgcaagccggtattgaggagtacctttccttgattggccctgagtttgatgagttccatattcagcgaaagagagtgcagcacaggggctacggcagaatgaaggaggacataaaggccggcacccttttgcccactatcactcttgctgtaaaagcgaactgggtcgatcaagttaatgcagcttttgaacgaggagaggatctttctcagcttcttcaaagtcctggtagggtcgatatcttagatgggctgcagcgaactcatctgttgtctgacctgcaggatgaaggccaccgtttcgatgatggtcaaaagttgattctcgagttctggcttgagagggaggttaagaatttaatttatcgaataattgttcttaattctggccagaagccgatgtcgatgcgccatcagatcgagctcctcttctcaactactaaggatgagcttaagaatcgcattccaggcatcgaaatcatggtcgagcgtgatgacgagcgtaggacgcgaccaggcaagtaccccttggaaaggcttgctattagctattatgcgtatataacaaagtcagctgaaatagataaagaaaatattattgcccaaaagttggtggaggagggtgttctcgctggtggcgaggatgagcttgggcggaattttgaaaaatttacgagaattctaaaaaaattcgtagagattgatcagagggtccatgctcgttgccctaaagagcagttcctgtggataggttctgacaatgtcatgatctccattttttccgcggcatctgatttttctattactgatgcgcgggagagtcgcatgcatgcagcgctggaccggctgatactcgatttagctgaggcgcctgaggcgcaagatgtcctggggttcgcggtgtttaagaatacaattcagggaattcctgttcggcggactaacgtaggttacgctaccagaaagctgcttttcgctgcatttaaagagtattttagagatgagggcgaaaagccgttggccgatatctgggcggcagaggccacctga

SEQ ID NO: 499159 - DNA, 1206 bp, Stenotrophomonas maltophilia
atgtcgttcttgccgactgccgctgaaccagggcgccgtgcggcgctggccatgctggtctccattcttgtctgctatggcctggccgccgtaggcctggcgggctggccggtgcaggtggcattcggcgcggtcgtgctcagcgcgctgctcgccctgccagccgtgcgtgacctgcgtaccgcacctctggtcctggccgttctggtgctggtgctgatcgcactgggaagccccagcgatggctgggacccgcgttcgatctggctcttccatgccaagcggatctacctggagggcacgttgtacgcccagctggatgattacgcgccgtggagccacaacgactatcccgcgctggttccgttgttgatggcctgtgcagcagctttggccgggcactggaacgaactgctgcccaaggcggtggcaccgctgctgctgctgccggcgctgctgctgatcgtcccgagtttccgatggcgctggtgcggggtgctgttcgcagtgctgctgctgcgcctggggcgcgacatgctgatcaacggctacatggatccgctggtggcggtctacgccgtcgctgccgtggcgacagcgatgcgtcaccgcatgtccggggagcatggtggtggtcgtgagctggtcgcattcaccctgctggtggccgtgctgtcgatgttgaagaacgagggtgcggtgcttgcggctctgttgacggccgtggtgctgggcgaaggcgtgctgcgtgagcgtcgcctgggctggcgcatcctcctggccgcggttgtggccctgctgccactgctggcatggaagctggccgtcgggcaggcaggggttgccaatgacctggcgggaagcgacatgaaggcgcagctgttggcgcggcttggcagcgagggcggtgccaagccgatcgtcgggcgcctgctgctggatgtgtgggtgctggtgccgctgctggtgctggcggtgctctggcgtccggtgctgcgggttccggcggcatcggccgccgtgctggcggcgctggcgtacgcagcggtgctgttcctggtctacctggggacgccgcatgacctggactggcacctgcgcaccagtgtcgaccgtgtccgcatgccggtgacactgctgctggggtttgcggtgttgctggcgctggaacatcgcgccaccgcgaagatcccgggcacgcgctga

SEQ ID NO: 499160 - DNA, 426 bp, Stenotrophomonas maltophilia
atggatgacatgacccccacctcttcccccctgcgcactacgcgccgggatctggcgattgccgggatcctggtgctgctgttgggcgcttccctcgtatcggtcgccaagcgatcggactatcagacgtcgctgctgcgccaggccttcgctgaggacgcgggattcgacgcatccgtaccacgtgaggtggtggatggacgtgatctggtgcgcgcgcagccgatcgcgccttcgctgctttcgctcgggcaggggctgaaggacgatcccttgatccagcaacgcatgtgggaggcgctgtatccggtccggttcagcgataccgataccccacagcgcctgctgagggccggtgatccgctggttgaccagtgccacgtccaggggaggagcggagatgtcgttcttgccgactgccgctga

SEQ ID NO: 499161 - DNA, 600 bp, Stenotrophomonas maltophilia
atgaacaaatatctgcgtgccgcgctggcaacccttgcattcattgccgccctgctgctggtctactacgtccacatgcgccagttccgcgtgaacgtggtgctgtatgccagcatcctcgacgcggtgatcgcagtggtggtggtgtttgcgggcctgtatgcattgaagtggttcagggatttcagccgcctcgagctgatccagctggccgccatctggttgctgggaggctacgtgttcgcgatctcggtcccgaccgtcatcgaccgctcgctgtccttctacatcctggagaaactgcaacagcgtggcggtgggatacgcgaagacgcgttccgccaggtgttcactgaagagtacgtccgcgagcatcacctggtggaagtgcgcctgaccgagcagctgcagtccggaaccgtgcagatccatgatggttgtgtgcggttgaccgcgcgcggcgagcgcctcgcatcgttcggccgcttctaccggcagaacctgctgccgacccaccgcctgctgatggggcagtacaccgatgcgctcactgatcctttccgcgacagccggatgccgtccgactaccgttgccaatag

SEQ ID NO: 499162 - DNA, 405 bp, Stenotrophomonas maltophilia
atgccggccgtcgcagtggctaaggatgcgctgggcggacaggccgtccgctacgtgatcaatggcctggtcgccaccgcagtgcactatggagtgctgcacttcaacatcgaggtgctgcacatcccgctggccgcgatggccaatgcgattgcagcggtcttcggcatcactgtgtcgttcctcggcagccgctacttcgttttccatggcaggcagggcagcctggcgcggcagggctcgctgttcctgctgatctacgccgcgatcgccgtcctgcatgcgctggtgatgtacgtctgggccgatcgatggggcctggactaccgcgcagggttcgtgctggcgaccggaatgcagatggccgtcagcttcgtcgccaacaagttcctggtgttcaaatga

SEQ ID NO: 499163 - DNA, 945 bp, Stenotrophomonas maltophilia
atgcgaaagatcgtggtgatgccggtctacgaggacctggaagcctcctcgaagttgttcgtagagctcgcccgcacccagggtccggacacctatgtggtggccgtggacgacggctcggtgcggcagccattgccgatcagcgccattgaggcttcggggctggagggcgtggtgatccgcctgcgtcgcaatgtcgggcatcagcgtgcgatcgccatcggcctgggctatgtggccgagcacttcgatggcaatgatattgtcgtggtgatggattccgatggcgaggatacgccggagagcatcaccgagctggtggcgggcctggattcggccgatgtcgacgtggtggtggccagccgtcgcagccgggtcgaatcgctgaagttcaagtcgttctacatcgtctacaagctgctgttctcgctgctcagcggacgccagatcagcttcggcaacttcatggcggcgaagatgccggcggtgcgccggttggcatcgatgcaggagctgtggatccacgttgcagcctgcgtactgggctcgaagctgcgcgtgcagacctgtgcgctggatcgtggtccgcgctatgccggtcgcagcaagatgaacttcgtcggcctggccctgcacggattccgtgcactgatggtgtttgccgaggatgtactggtacgcgtgggcatcgcctgtaccatggtggcggcactgtcgatcatcggcgggatcgttgccaccgggctgaagatgctgggctttgcatcgcagggctggttctcgctggcattcggcatcctggtgctggtgttcctgcagaccgcggcactgacgctgatcatcctgatgttgtcggggatgatgcgcggcggtggcgtcatgagcgtgggcagctatcgcgaattcatcgacgaggtcctgcatgccggccgtcgcagtggctaa

SEQ ID NO: 499164 - DNA, 1062 bp, Stenotrophomonas maltophilia
atggccagcaggcagttcgcatacaattgcgcgctgacgaccgaggacatggcccgcgtggccatcgccaattggcctgctgttccagaaggatcgaggtttgctttgaaattcactcacgatcagaagcgcgtgctggtgaccggtggcgcgggcttccttgggtcgcatctgtgcgatcggctcatcgcgggcggccatgacgtcctctgcgtggacaacttctacaccggcagcaagacgaacgtggatgggctgctgggccaaccacggttcgagctcatgcgccatgacgtgacgttcccgctctatgtggaagtggaccggatcttcaacctggcctgcccggcgtcaccgatccactaccagcaggacccggtgcagaccaccaagaccagcgtgcatggggcaatcaacatgctcggcctggccaagcgcctgcgcgcgcgcatcctgcaggccagcaccagcgaggtgtacggcgatccggaaatccacccgcaggtggaaggctactggggccgggtcaacccgatcggcatccgcagctgctatgacgagggcaagcgttgcgccgaaacgctgttcttcgactactggcgccagcatcagctggagatcaaggtcatgcgcatcttcaacacgtatggcccgcgcatgcatcccaatgacggccgggtggtcagcaacttcatcgtgcaggcgctgaagggcgagccgatcacgatctatggtgatggcagccagacgcgcagcttctgctatgtcgatgacctgatcgagggcatgttgcggctgatggactcgccggctgacctcactggtccgatcaatatcggcaatccgtccgagtacaccatgctggaactggccgagaccgtgctccgtctggtcggcggcgcgtcgaagatcgagttccgcccgctgccctcggatgatccacgccaacgccagccggatatcagcctggccaaagcagatctgggctgggagcccaagatcggcctggaggacggcctgaaggagaccatcgcctacttccgccatcgcttgcaggcctga

SEQ ID NO: 499165 - DNA, 528 bp, Stenotrophomonas maltophilia
gtgatcgccatcgattgccgcaacacctatgcctatgcccagcgtctggtcgcactggtcgggctggatgatgtgatcgtggtcgagaccgacgatgtggtgctggtcggcaaggctgaccgcatgcaggaggtcaagaccgtggtggccaagctgaaggccgaaggccgcagcgaggcgacctggcaccgcaaggtgtatcgcccgtggggcgcctacgattcgatcgacaacggcgagcgcttccaggtcaagcggatcacggtcaagcccggcggcacgctcagcctgcagatgcaccatcaccgcgccgagcactggatcgtggtcagcggcaccgccgaagtgacccgtggcagcgaggtgatcctgctcagcgagaaccagagcacctacatcccgctgggcgtgacgcaccgcctgcgcaacccgggcaaactgccgctggaactgatcgaagtgcagtcaggcagttatctcggcgaggatgacatcgtgcgcttcgaggatacgtactggcgcagctga

SEQ ID NO: 499166 - DNA, 978 bp, Stenotrophomonas maltophilia
gtgaccgtcaatgacgatgcaacgttgactctgaatcgcctcgctccccccgatgtctccgtggtcgtacccgtctacggctgcgccggctgcctggaggatctctctgaccgggtaggcgcaagcctgtccgggcagggcctcacccacgaactgatcctggtggatgacaacagcccggacaatgcgtgggcacggatccttgaactcagcgcagcctcgccgtcagtgcgaggcctgcgcctttcgcgaaacttcggccagcatgccgccataagtgcaggcctggcctgcgcgcgcggtgcggtggtggtcgtgatggactgcgatctccaggacgttccggaagagatcccggcgctgctggccagcttgaacgacgatcatgagatcgtgctgggccaacgcatcgaacgccaggacagctggctcaagcgcagtggctcccggttgttctatcgcaccttgggttggctgaccgatacccgctatgacgcctcgacggccaacttcggcgcttacagccgaaaggtggtagactccatgaacgccatgccggaaatggatcggttcctgcccctgatggcgcgctggacaggcttccgcacacgttccatcccggtatcgcacgggcgacgcaacgaaggaaagagcggctacagcttgcgcaagctgatccagatggccacgcggatcgtgctgtcgttctcggacaagcccttgcggctggtcatgaccatggcctttgcactggcgacagtcggcatcggagtcgcgctgttcgccatgctccgctaccttgcgggtgatatccgggtcgccgggtttaccagcatcctggcttcggtctggcttgtcggcagcttcatcatggccagcctgggcgtcgtgggcctctacctgggtcgtatccattacgaaaccaagcaacgcccggcatacatcgtctggcaggacacctggaaggacgcggcatga

SEQ ID NO: 499167 - DNA, 762 bp, Stenotrophomonas maltophilia
atgagcaccggctttgaactgcagcaggctgcgctggagtcagtgcgcttcggaatccgtgtcgagcgtgcacgcagcacggcgggtgccgcgaccagccccctgctggaacagatacggcgctcctctgcggatctgatcattctacgcaccgaggccgggcactcggaacttgcgacggcgctccagcagcagggcgagttcgtcatccacgccgataccctagtctattacggtatcacgctggttctcggcggcggcgccgccgcttccaatgtccggccagcgaccacagccgaccgaccggcgattgccgccatcgccgcagccagcttccggggctatcgctcgcactattcggccaacccgctgctgccggttgatcgtgtgcacgaggggtacatcgaatgggcgcagagcaggctggaagacgacgatggcaagtcggccacgtgggtcgtatgcgagggagaaacggtggcaggctttgccactgtcgatattgaaagcgacaccgtggacatcgtcctcaatgccgtcgaccctcgattcgaacgccgcggccactacggcagcctgcttggccacctgctccatcactacgcgacgcgttcgctggacaggctgatcatttcaacgcagatctggaatttcggtgtacagcggcagtgggccaaggccgggctgcgcctctacgccgccctcgatacctaccatctggaacgcaggctgcagcacgtgcacggcacggtttcgaactga

SEQ ID NO: 499168 - DNA, 366 bp, Stenotrophomonas maltophilia
atgagctatgttttcatcgcgttgaccattctgctgaccgcctatggccagctggtcctcaagtggcaggtagggctgcacagccagctcctcgcaagcccgatccaacccctcaaccttctgcaactgctgttgaagccctgggtgatttccgctttcgccgcggccttcggtgcatccctgttctggatggccgcactcagccggctaccgctgagccgcgcgtacccctacatggccatcaacttcttcatcgtcgcgctgtttgcctcggtactgttccgggaacagctggatgcctacaagattgccggcacgttgatcatcatggtcggcgtggttgtactatcgcgatcagtcgcctga

SEQ ID NO: 499169 - DNA, 1137 bp, Stenotrophomonas maltophilia
gtgattccattcaacaaacccttcatgacgggccgcgagctggagcatattgcccaggcgcatgccaatggtcatctctcaggcgatgggcccttcaccaagcaatgtcacgcatggttgaaccaacgcacgggggccagcgcgtcattgctcacccactcgtgcacctccgcgctggaaatggcggccctgctgctggagctggtgccgggcgacgaagtgatcatgccttcgtataccttcgtatccacgtccaatgcctttgtgctgcggggcgcggtgccggtcttcgtcgacatccgggccgacacgctcaacatcgatgagcgcttgatcgaagctgccattacgccacgtaccaaggccatctgcgtggtccactacgccggcgtgtcatgcgaaatggatgaaatcctggcgatcgccaaccgccacggcctggctgtggtggaggacgccgcacaagggatcatgtcgacgtacaaggggcgcccgctcgggacgatcggcgacctgggcgcactcagcttccacgaaaccaagaacatcatctccggcgaaggcggagcgctgctctgccgcgatcaggagcatgccgagcgcgccgagatcatccgcgagaagggcaccaaccgcagccgcttcttccgcggccaggttgacaagtacacgtgggtggatgtcggctcttcgttccttcccggcgagatcacagccgcattcctgtcggcacagatggatgccgccgaagacatcacggcgcggcgtctggccatctgggaccggtaccacgcctgggccgaaaagcatgagcgcgacggcaagctgcagcgcccgaccgtacctgcgcactgcacccacaacgcgcacatgtactacgtgttgctgccatcgctggaggttcgcagccgtttcattgcagagatgaagcagcgcggtgtccagacggtgttccactacattcctctgcactcatcaccggcgggtctggagcggggccgcactggttcagacatgacggtcaccgacgatatcagcgtccgcctggttcgcctgcccctgtgggtcggcgtggagggagagatggacaccctgctccagcatgctgacgcggcgctggacgtcgccctgggctga

SEQ ID NO: 499170 - DNA, 624 bp, Stenotrophomonas maltophilia
atggctcagaagacaacaggactgcactccattctgtcggccccttgggcgtatgacctgcttcaaaatgctctgggcgcgcgcaaggcccgcaaccgactgatcaatgaacatgcgcggccaggaccgcaggtgacggtgctggacatcggctgtggaacgggcgaaatcgtcccgcacctgccgcgcggcgtgcgctaccacggctttgacctgtcaccggcctacgttgaagcagcaacgcgccgtttcggcgatcgcgcgacgtttcactgcatggacatcgccgattaccagccagatgcgtcggctgcgccggccgacctggtcctggccgttggcattcttcatcaccttgatgacgacatcgccatcaagctgatggcctctgcgcgcgcgcagctcaagaccggcgggcacctgatcaccatggatggcaccctgatcgaagggcagtcctcaatagcacggaggctgattcttcgtgatcgcggccagaacatccgcgaaccggagggttacgcagccctggcgagacattctttcgaagaagtcgacgttaccgtgcgccatgatctgctgcacgttccctacacgcactgcgtaatggagtgccgggcctga

SEQ ID NO: 499171 - DNA, 2022 bp, Stenotrophomonas maltophilia
atggaatggaccactcgggtctggaattgggtgatgagcgaacgtggcaggaacactttgacggggctgctcctgctgctgaacttcgtcctgatcgtggtgtttcttttcaccacctacaggggcttcttcaactcggactctgcggtcaggaatctgctggcacaggagatggttgataccggtagtttcttcccgccgggatggaactacgtcaacaaagacctcatggtcgtgttcgcgcagcttggcgtctggccgctgctttacctcttcggtaacagctacacactgttcgccgttgtcggcgtgttctgcagcgcactgatcctggccagcgcctggtggttcaccggcctgttcggaggggcaacctggcagcgcctgctggcgcttgctgcgttgtccggaggcttgtccgctgtcgcagccgagggcatgttcgggcagtcagcctatggcttcatgctgatgctgacctgcctgaccgcagtgctggcctggaagtcgctgacggtcgatggcaagccgcgcccgctgtggtgggcgttgctgttcgtgcttgtgaccttgtctacgtggagtaatccgcagcgtgcggtggccacctacatgctgcccgtgtactgcgggctgggcgcgatgctctggggccagggctggaagacgcgcctgaagtcctgccttccggtgttgctggcgacgttcgcaggtgtgcttgtgggcgccgcattgagtggctggacgctgacccaagtgaacaataacagcggcgtcggcgtcgccatctggctggacttcgacggcatgatgaacaatgccatccggaccctgcagggtttgattgccctgatgggggggctgccaaccaagggcaccagcatggtcgatgggctgggcatctaccaggcactgcgcctggttgctgcattggttttgctggtgatgatgacgcgcaaggtcgtgcagctctgcgctagccatgacagccgtgcgcgtttcggcggcggtgtggtcgcaggtgcagcaagctgcttcgtgttccttcaagtgacttccaccattccggacatgaatgatccggtgagtgtttcgcgctatctgttgccttcgctcgcattggggctgctggctctgctgagcagtccgctggttccgggaaaccgcctgtccgccacggtgaagacagggcttggcctgctgttggcgttcaataccgcgttggtcttcaatcccgaatcgatgctctacaagggctggtacatccccggccgcgaagagttgatccaggagatcgaggcaaagggggggcggtacggctatgcctcgtactgggaggcttcacccgtcaccgtgctgtccggcggcaaagtgaccgtgcgcccgatcgtggtcatcaacggtgaactgctgcccatgcggcatctgtcgtccgatcgctggtatgagccggaggcctgggacggtgaaaccttcctgctgctgagcgatgccgaagcagcgacggtcaactggggcattctcacacgccatctgggccagcctgtccgtgaagagcggatcggcctgcggacgatgtacgtgttcaaggagaacatgtcccgtcatctgccgggctggagccttacgctccatgatccgctgcggatcgatgcctctcctgacggcgcccgtactgtcggcaaatgggccgacgccgtgggtggcctgcaggcaaagcctggcgaaggtggttacctgcactttggtccgtacagttcgcttgctgctggcaactacatcgcaacgttcgatgtcacgggaaccgcggagaatccgtcgcaggtcgtcggtaccgtggatgcagcggcgtatggcggcaagacggtcatgggaaccacagaggtcctcggaaacggcaagcagcagtacgttgtgaagttccaactggagcgcccggtacgcaacctggagctgcgtgtggtctccaatgccactggcaatgtcgtgttcaagggcgtaacgctggcgcaggcccagtga
